United States Patent Application Publication US 2014/0325702 A1 - sequence listing, part 15

SEQ ID NO: 15027 - DNA, 2976 bp, Heterodera glycines
  unsure (1)..(2976): unsure at all n locations
atcagcagttgatatgtgtgaagaaatggggaccgacccaattgatcaaatgagcgaatattccaatcaaaatgttatcaaaagtgatcaaaatacgaaaatggaaccaaatcatcaacagaaaataaaaacaattcaaaaatttgaagcaattaaagaaaagttgaagcaaaaaagaaaatataaactgaaaaacaattcaaaaattgagagaaaaactggaaaaattttaggcacaaatcgtcaaaaaatatacaaatggaaaaaataattaaatttaaataaaaagaaaacgatggaaaagagttattataaaggcaaaagaatgaattcatcgaacgatttggtgaatttaaaactttatatgagcaacgcaaacagaaagaatttgtgaaggaattgggcattggaataacaacatttataaaatggaaaaaagaattaatgccaacaaaatattacaaaagtaagagaaattttcattttcatttttattttaattttaaaattaatattaatatttttaagcacatattcaatattccaatgaggataaaataaaaaagatgaaacaatatttcgaaattaaagaaagaaatgctaaaattaccgacaaaaaattgcaaaaaaattgcaaattggaatttcaacttttagagagtggagagagaaattttcttcaattttgggaatatgattacttttattggtaaatatgttttttcagtaattattagagaccggacttttaggcaccaaaattttttaaaataggcacctaaaataggcacgaaaaaggtgagaaaaggtataaaaaatggacaaaaaggacaaaaaaggcacgaaaaattggaaaaaggcagcaaaaagaaaccttttttagacaacatttaaaaaaaaaaattttattaaagatttttagagagcaaaacacgtaaaaataaatcaaaaaacttacaaaggcatatgccttaaaaatccggtctctagtaattattttctattttatttttattttttgtcaaaaaagcattatgtacaacaaaatgattcatagtgccaaatgggacaatttttgcgaaaaaattaccatatgtttgcgttcattatattggtcatgtcattcgcttccatttcaatgcttttggtaagattttgcgggttttttttaaataaaattgtgttattatgtcccaataagataggctgaatgctaaataacataagtctcactaatttaatattctgaaaatgataattaaatttgaaacggcttttcatttactaagcgttagtaaatttattattccatttacgttattgactcacatgaattgacagtacactaccctttttaatgttttacgttaaatgttttattaaatttaaaataaaaaataaattaaatttaaaaaatcgagattttcttaatgcagtgactaatagaattatctgtttttgtaattcaaaataaaaattctatttaaaatcgaacgagtttgaaggctaaaattaatacaagtaaaaattcttcatttattttatttaaatatttatagaaaattaaataaaaattaatataataaaaatgatttctgccaaaattaatacagaaaaaaaaattcttttttatattgaccttaaaatgaagaaattgaagattgtaattcattcagcaaattatttataagaaaaaacataaatacaatataaaacaaataaaataataatataatttataaaattattttttatataaaacccagacaatcctaagaaaaatactttcgcttattcaccaaaatcgcattatcagagcacatttcatcaaccaaattggatgtcaaaaaagggaaacaatggtagggataaagcggaagacgggttttgctaaatccgtgtcgcccccgcaggctaattgggatgtctttttggctggttttgtgctcattgtttattgtttggcccgtgtgacccgctgatgaagaaacagtaaagtggccgtatttaatgggagtttcactaaagcattttgcaaccccaaaaatttggcttaattgttttagctagtttatcatcttttgtgtaatttaattccattcttcaaatgttttccaatttttgtattttaaattaaataaataaatttttgtattttaattcaaatttctcccatatttttttttattttaataaaactttttccaatatttcagtccaatttactaaaaacaaaatgtttgccattcggccatttccgttgcacaacaattgcatgttgctgaactgcttgatcttcatgctgatgacagtgatggtgctgctgcccatctctgacgctttcctgttcggtggtggcggtggctgctgctgcccgccgccatgtccgcctccgccggtgcgttgcgcaccgctttgcccaccgccatcatgctgtgagcaaccgcaatgccagccgccctgtcccgcgccgcttccgccaatgtgcgactgtccatcgtgttgcacatatttgccaccaccgcccccgccgccatgctgctgcggtgagttttttggggggcgtaaatcacaaaataattggaattttttattgagcaatttggtttttaaatagaaaaaaattagtctatttacaaatgtttcaaaaaaatattttttaattttgattctttcaataaaaaaaaaatattttttaattctgattctttcaataaaactttaagctttatcgaatttttcccgaaattttcaccgaaaaattcttctttattattaaaaataattttattaaaactattttttcactcgaaaaaattattatatatatatttgattanaaataatatgcgagattaaattcgaaaatgaatatttaaattttcaggtggaggaggatatggcaaataatcaaatcaatgccgtgccctttttgatataatccaatttgggatatgntacttactgtattttttt

SEQ ID NO: 15028 - DNA, 3223 bp, Heterodera glycines
  unsure (1)..(3223): unsure at all n locations
ggggacctctagagtcaaaatctaattcaatttgcgacttttatggaagttaatttccgcagtccactcattttttaatttaggtcattggcataacttcacttttgaaatttttcttaacaaaaagcaatttaaaccatttgaaaatgaataaaaatgttttcagctgatttggatacaatgttcagaaggatgctaaccaaaacatacacaaaacagcaaaagcaacaaatggccaaaatggtgaaagaaatgcttgaaaaaaaggttaatcagcatactgtacttcactgctgtagttacaattcaattttaaaatgaacgatttatgtacataaaattctcgtgtaaaaatctcaaaccaatttccaacagcagatgaaaaaggaacgtgggactggtaaacaccaaattcatggacaaaaactaagtgatgatgaacaccagctgagagcgttgccgaatgacggtggatttttttttttattttagattttttgctttgggacgattttgtttttgagattaagagttacctatccgttcgggccaagaaaaataattggtaaattttatttaaaaaaaagtcgggaataaaaatttaaaaatcttagttttcggatttaaaatgaaaattattacaggaaatcataaaatgatacaaaaaccccaacgattagcaaagcgaaattaaattgggaaaaattaagatagtacattaagtattaaaattaaccgattttaagcttttgtgatcgaaaagaaaaaagaaaatcttttaattttaaaattttagatttaagatctgccaatttgaattttggaaaaattaaggctggcaaattaaatggagtttctgagggcgttttgacacgaaaactgagttaaatcttttcactttttggcatttttctttgttttttaagctgattttctgaggaagaaagtagcggctggtggtgaaaatggtgaatttaattatgctttttaatttaaatagttgatattgtgaatttatattaattttagattcgtcaaaaatgccaattgtgctaattggccatttggacccggaacagacaaacgcactcacaaaagcagtcataccaattggccttgaaaagctggcctaatttatgagaaatctgaaaaaagagatactattgtgatgaaattactactaatatttgtcatttgatatttgagaataataaatatgaaaattcatttttaattatagatacaggcaaatcttgatcagcatttaccagggctgtcaaaaatatgcaaatgcatttttttcctgaattctacgtagcctatgaccaattgttactctttagttagtttggcccctcctgcttttctacatttttgctttacggggggcggtccctttgtactctccccgccccttatgactccgcttatttaaactcttccctttgaactcccctttccacttttgtcggatccggatcccgaccaacctcccctttcccgttacgagttggagaatcacaatgatgtatttaatttcagaaaagaacattggaaagtacgcacaaacgaatttggaaaaaatatttaaatgcgtggcttttgggacagaatttgaatgtttttgaacaatgaagctgataagattctgttgggaattcgtgaacatttctaatttaatgatgagtgactttcgananccaatggggaaaatgagacttattgggaaanagttggagaatttaacggccaaattttagaacttcaaagaattcccgaaatattaatctcccataatgaaagcaaaattgaaaataaaagggacaatgatcaaaatggggatttaatgcaaaaacagagcataaatgctattactgaaaaagatttgttcatgagtatattcgatttaaatgaagaaattaataatgaaaaaggagaaaaaacaaaaacgaattaaaaattaatgacaaaaaatctaatgaatgtcataaaaacatggattttataacaaaaagttttagcagcgagacaatggacgcgccaaaagttccagcggaagagccattcaatgaagagggattgatcgccgaaaaagtgcgacttttgaatgaaattgaggatttaaagcaccgattggaagaaacagaaaaaaggaaggcggaggcggagaaaaagagaagtaagaataatgagcaaaggccagtagatgaaattgtcctggatatggacgaggaagacgaagaagaagaggaggaagaagaagaagcaccccaagagtcaaaaagggcacgtttggaccctttggccacaaaggaaatagtgcaaaaaaccattaatgaaaaatgggaggcttcgggattgataatgattgacccccgaccggtagattcaaaggaagcgccgaaaggtgtggaaagtcgggattgggaggactcccgccgcttgctaacgagagaagagcgagacagagggtggagtgatttcgtttcaacaataagaaaggaagatcgattaagcgtcattggaaaagtcggacttggatttaacggccgacgtatggccggtaattgcataagaagtgcggaaaagagcattttgcagtcagagatcattcaacctgaaggaatgaggaaacaaattccagtccggaacgaattggaggcaaaagaaacagaagaagagttggagcgaagaaaacgcttcgcagcaaaaacaccggcaacccaagggcagtttgccaattgtgtttgggaggaaacagcacaaaatacaaaagaggagaaaatgaagaaaattgagaacagcatttgccaaaaaataaaccaaattcaacaacaaatgacagaggcgtttggaggattaaaagaattagccaaagaaatggatgaactgacgaaaatcgccaaaaaagaagaaatggaaaaagcggaagaatttcatccgaattcgaaccgatttgccaacacaaatacgtcgacttggcgacaacatgacgagttccgctaccgtaatcgtgggacggtcggcagatgggtcaacaacagccgtggacgcgggcgacagcgcccataccaccacaattggcgcgggaatgaaggatggccagaaatgatcattcacaatcagaaccatcaacaagtggcgcatttaccgttgaccaaagatcaatttaaaaatgattcgaataaataccgaccatagaatagtgatgatggttaatatt

SEQ ID NO: 15029 - DNA, 3567 bp, Heterodera glycines
cgaagagatcttagctcaaattgtggcatttatgcctccgaaataattttggcgcgtagtttttacaattctacgcgcccgctgttgattttttaaaaattcaaattttggcctcaaaacggaaaagtacctttttcaattcataggggtgtgttttctgaaatttttttcaggccatttcttagggatatactttcacgattttattgcatttcaaatggaactttccgaaaaacgccaaaaaggcaccaaaacggcaaaatgccaaaaaaggcatttaaggcacgaaaatcccgaaaaaggcaaaaaaaaaaggcataataaaagtcaacgtagaagtctttttaagaatatttttttttgaatttttttttgtttgcacatgcatatttttttcctggactgtgggaggcctgaaacgcatgaaaaacaagtttttagcctggtttgaagcttctaggatggatttccatatgcatattttgcatatttgggcatttttccaaaaaacttctattagaacggcccccatcagctaaattggcctttttaccccaatgaacggaaaatttcctcaaaaaatcatattttagcaaaatttctcgaaaatattagtaaaaatacaatttttttcaaaatttaaaatttatgccaaaaaatgttaaaaaatagaaaattttcgattttttactcaattttcttcaaaataaataattttacttttattttgtatttttgattctatgatgatttttcataccatatttaaccattttcgagattcttagcttaaatttagtgaatttgaagaatttgggaaaattttgccctcaatttggaaaaatctatgtgcatatttttcactttttatgcgcatattttgcgattttatgtgcatataattctactccctacctatcatatatttttttagaaaatactcaataattaaattccattttcttcattctcgacccactttatcgatgccttacgtgaacgaaagtaagacgaattcaattgtatagggctctccatcttataaaaaatttaattctggcggcccttaaaaaattatcactttttcagggggtgagatgcaggacggcgctagcttttcaatcgtccggtcattttggagcctcgtctacttcttagcattcttgtaatcattcgcagcccattttaacaccattaaactcaatcattttactggtttaagttattgtcggcaaaaagtttattaatgagcaaattttttttttgcaaaaaatggaaaatttagaacctagcgtttttcaaaaatttcgatttaaaaattgtatcattggcacctcaaaaaacgatcattttgtttgcaacttttttgtcataataaattatatttgcggggattttctggatcgctcagtcacgaatcagacttctattcaaaccaatccaaattcgaaaccataatttactaattagaataaaaaaaaatttttattcgcgttcgggtttgagattgatgtcaaaaaatggtgttagattcgtggccagcaaacccccgaaaaacactaggaattaattcacccgatttatttttcccggaattaaacccctaattttccgtcggacattttctgacatttctcaaaaaaaaaatcagggccccggaaattttgagtgaatctgggccttgtccgggctttacaaaaaatagcatttatcagacccaattttgcatttttgtcagcttccgttcgttggtcggtccgctcattgacagtgcgccgcgctatgacccggacagcgactcgcggcatcggtcgctgcgcggcaacggcgggggcggcggttggggtggtggcggaggagggggaggaggaggcggcggttggagacccggtaacaattcgggaacattttgggcacgttcagattgtattggacctccaaattttttgaaaaaatccaaaggggaagggacctttttgattgcaattttttccaacttataacttaaatttgggtaaatttgaacaagaaaaaacggaaattcgaaacaggtcaaaaatagatgtcagattcgttatcagttgactccaaaaaaaccccgggaacgagttttcaccaagtatttttacaaaaaaaaattgtaatccaaaggcgatagataaccttttgttttgttgaaccttttttcaaattctggaccttaaatttttgaaaaagcttaaaggggggggggggccctctgcaaatttttcatgataataagtcataaaaatttgtttccgggtggtttcctaaacatgaatctgacctctgtgttaaccaaatgagacttgctaacctaaaatcgaacaagaaaaaatcctaaattggaaagtgcaaattttcggcgtttttcaattgcaaaccaaaagggtcccccctctttggttttttgggagccctgttttccccaaaatttaaaaggtatccttttggaaatacaaaacacaattaaaaaacaatttttttcaaaagatttcatttttcaggtggtggcggcggcagtggtccccggcgtccgatgggtcggctgaacactgacgggccgtcatcgatgccgagctgtccgagcggcggatgttgtcgttgatttgagaatgttcgagtgatatgaggcttcgaaggagtgaccaaacaaggaaagattggaaaaattccctcgaattttcaaaatctgtgaaataaaaatgctctccaattccccccgcgaaaaatatctgtccgatggttcacggaaaaaattttacctttaatgcgcacattttattacgagttttcggccaaaaatttacgaaattataagaatttttcgtaaaattttgaagctaattcaaaaaggaaaaaaacaaattccaaaaatcgtttttcatctgtcaatttattttccgacgcagaaaacccttgtcccttccgaataattggataatccctccattttctggtgcttttccaacatcttccaacatatttgtgtaaaaattgtagaataatgacatggaatttggtgcagaaataattaatttgttgcctttgctgtcacttttttttaaattacttccattgtcacataaaaaaatgtgaaaattaacttttcagcaaaaaatcgggaattttttgacacgaattgcagcttttaattatcgcagatgactgttgttgtaaccggtgaagaagagacaaaaagtgtgaagaaacacaaggagaaggatgagatgaccaaagttagtttttttttggaaaatttaaaatggaaatattggacccaagaattcgtttaaggagccttagatttttttagaaaggcgcctcatctacaaagaatgattttcggaaaattctattagtaaaattataccccgtttcggcataaaggtacttgtaggttttgtcacaccctgaaaaatttaaaaaaattttctaggcgaaataaatgtgcttggccataatgtatttccagcgatttacgtgaaaattcacatgatggaaaaaggaatggtaataattagatggttctccccattttggcag

SEQ ID NO: 15030 - DNA, 3999 bp, Heterodera glycines
  unsure (1)..(3999): unsure at all n locations
tattattattcaaaatttaatttaaattttcagttgccaaaaattgtcaaagcgttgttggaccaaattgttgcggaaggcgaagaattgacattcgaagtgcaagtggcaggcgaagtggaccaaattcgatggctgaagaacggccaaccgctggacaaagacggaagagtcaaaatgatcaaagtggacgaacaaacgtacgtcgttgcttttgctctgatcattcagcaatcttagcaacaatcgcctcacactgacatttttccttagcagttacggtatccgattgattcattcgggccaaatacagtaccattatatatatattgattattggacagcctgtaaatctgattccgacctgactgctgctagtggacctctaataagctagcatttttaccaatagtaccgtatgctgagtttgaatttgttcagctaccgtatgacaattccaagtgccgcgctgtccgatgccggcgagttcgaagtgcaggccatcaacgacacgggcaaagctgtgtcctcagcgcatgctgaggtggaccaggcaccgcgcattgtgcaaggcctcgtcccagcagacatcgccgagggggacgagcaggtgttccgtgtggagacatcggcaccaattcggacgggttgaaattaaagataattaattaaaaatccattcgccttatttagtcaaatggttcaaaaatggccgggagattgaagcgccgccgggtgctcgcattcggctgaaggatgtgtcgccgaagaaatacgaactgctaattgatgacgcacagcttgacgatggggcgaattacaaggtacagaaaaaagagagagagtgagtgctacagtaattgtcggaaaagtaatggttgggttactgtattataagggtaacggattatggtaataaacctgcaccggtcaatgggcgtatattggtacttgtccttttctgttcaggttgtgctgtccaatcgtgctggcgaatgcgaatcgtccgccgatttgggcgtgtgcaaaccatcggtgttcaaactgcgcagcggactgcaggacgtgaccattgacgaggggcaaccgctggaattgatggccgagttggacggcgaaccggcggcggtcaaatggttcagtaatggcgaagagataaagccggacaaacgcattaaaattgtaagcacttaagttagcattggccttggcatagtgatcaatcttttttttcaaattatttcttaattaccccctcctaattaccccccactcttcgcaaggtgtccaatccgtccaccggtgtctattccctgagcattccaagtgcgcttgcctctgacggtggtgcgtaccgcgtcgtgttcgagaacccgcgcggcggagagctgtctagcggttcggtggcgcatgtgcgggccaaaaaacgcgcgccggagacgaacccagcagtgtttctgagcccactcgaagacgtggaattgccggagggcgacacgctcagcctgaaatgcaaagtaagtgtgatttgtaagcatttaaaaaatgtatttttaattgactaaaatgcaaaaaaaaaggttggtggacagccgttgcctgaggaggtcaaatggtaccgtgaggagaccgagctgaagccggacggggatcgaattgccatacgactcggcctcgacggcacggccacgctgcgcattcgcgaagtgcagctcagtgaggccggacagttcaaggtaatgaatgccatttgaaaataattatcttttttaattttaaggctaccgcctccaatgaagctggccaagcggagacaaaatgtcaagtgaaagtgctgacgcgtgagccggaaccgatggcaccgaagttcgtcatcccgctgcggagcatcgaaggcacgcccggcgagcgtgccgagttcacggtcaaagtgcgcggagtgccaacgccggaactgcaatggatcctcaacgacgcacccattgactttgcgagagaaccgcgcttcaaattggaggatatgcgcgacggcaattgggcaatgaccattcanngtaaagcattaatttcgtatcttggatatgtaccgtatacccataccgtacatccactgcatccccaattttataggatatccnagagancgactttggcactttgcgctgtgtggctatcaatccgctcggacgcgatgagtgcgagcccaanttcgacccagcgcggactggttggcagccaacccaagaggagggggggcccccaggttcatggggccgttggggaccaaacccgtgcccagggaaccccaatggccttcaaatgccttggggacccaaacccaaagggggaattcaaaagggactctcaaagggaaaaaaaagggaaaggaaccggcccccaaaatttgggattggaaaaaagggaatgggcaaatcccaaaaaaaaaatttttttataaaaaaaaaaaaaaaaaagggtttttccccacaaaaaaaaacccaaaaaaaaaaaaaaaaattttaaaacccaaaaaaaacaccccaaaacaaaaaaaaaaatttttttaaacccccaaaaaaaaacacccaaaaaaaaaaaatttttttggggagaaaaaaaaaaaaaaaaaaaaaaaaaaaaaaatttttttttttcccaacaaaaaaaaaaaaaaaacaaaaataatttttttttttttttttttttttttttttttttatttttttttttttttttttttttttttttttttttttttttttttgtgggagaggaggggagagggggagggttttttttttttttttttattatttttctggggcgtgtaatatttaaaaaaaaaatgggggggaggaggaagtttttatatcaaaaaaaaaacaaaaaaccccccttttttttttttctaaaaaaaaaaaaattattttcccaaaaaaaagaagggaaaaaaaaaaaaaattatgggagaattttttttttttttaattatataaattttttttttctcccaaaacccccccaaaaaaatttttttttttttttaaaaaaaaaaaaaaaaacaggggggggaaaaaaaggggggtgaagaaaaaaggggttttttttttttttttttgttttttatttttttttaaaaaaaaaatataaaaaaaagagtttggggggttttttttttttctaaaaaaaaagggaaggggttttttcaaaaaagggggggggggggggggggtttttttttttataaagggtttttccaaaattttttaaaagggttttttataaaatcccaatatttccaaaaaaaattttttttgaaataaattaaaatttttaaacaattttttgaaaaaacccataagtattaaaaaccttatttccgttaaacctttccaaacctttatataaaattttttatataacaacccgaatttaaaagaagaataaattcattggatcatttttaaaaatgatatgaaaatgaagtaaaattttattgtaaaaaatcaaattttatatatttatattaaattttgtttatgatattactgtgaacgtactaaaaactttatttattaattcttaaaaaaacaaattttataccggaattaatgggaaaacgaataatggggtattaaattgtacaaattgtattataaattatttaattttatacgtaaatatgacttttgttagattaacgaagaacctgacgaaattaaagacaaaaaggaaaacaaatagaaattttaaataaattttaatttcaattaattattttattgtaaaaaataaaatattaaaaatctacaaaaattaattttaaattaatatccaaaaattccaaccacaacatgtatgtacattcccttgattaagaaatgaagaagtatataaataaatatttttatttgaaaacaaaaattataagaaattattcgtaataattacaatttattctataatataaataatatttttaaatcattttttataaaa

SEQ ID NO: 15031 - DNA, 2327 bp, Heterodera glycines
tttttgcttttttgactcgcctcctttttgtcatccttcccaaccaaaaattgaacatccggatattctccgttgtccaacacttccttcatttggtctgccaacgaattgacaatttgtccattgctggtgccttaaaattcgaaatttattgaagacgaggatttacataagcatttcatggaattgggtaaggggcaaagccagcggaattttgtattttaggaaattctttagaacgccattttcggccctggttgaatgattgttaaattgttggacaatttcaacaggaacttagagaaagttcagtaaatatttacagatttacctgctttatctttttgcgccaatgcttttacatacaaattggtaaatgaatttattaatgggaggcatatatcctcgcttcttcatatgactgctaaacatttctaatcctaagttagggaattccgcttatttccggtaatttttagagaatttagtttacggccctggttgaatgatagtaaaaattcagaaaagtacaataaattaattacagatttacctgctttatcttttggcggcaatgcttttacatggaaattggcaaagacggagaatatggtaaaataatgagaaatatatttcattttgacaccttaaattataattaaatgttcagttggtcttccaacaaaaaatgttgtggaaagaaaaaatgttcaatgtgaagtgggtccagccatgtaaaattaaaaaaatgggggaaatgaatctcggaatggaatctattttaatatgaaaaaataatgaattttaagcgataaatcaacttatttatatgcccagtttgtagtggttgtatacatttatagggaaataataaaagaaaattccggacaattttaagaagcgatcattttgctgggaagatacaattccaaggacataataaaagaagactgttaggggcagcgccctttggctttcgagtgtggtcaacataacgccacacgcaatgccctttgacccaatcgatatttccttcccctctgttcgtttgttatttaaattccccctttccctcattcatgttcactcttccctattcagttcactttttgtgcaattgacattattgttcttccccaatttctcttcatttattttcttctaaataaattgtattgtctgcacccaaaataaatatttatatttgttgaacactaaacattggcttagcacccattgtgtggaccgaacaaaattggcgacgcccgttcggaagcagaaaaaaatagaggaggacaaataaaattgcagcttttagcagcaattcaacaatttgttgactcaaagagaagtcaacaaccaccgcaacttttcaacaaatttgtcatcccttctatacagcttggcgctgttagcagaagaaccggcattcagctagaaagctttcagcttttagtgtgaaagaaatattttgcgctgctatttatttgtctaggcgacaaaaacttagctcaaccacgcgcacccacactgatagcatccaggcgctgttatcaatagtgtggtgaacaaccaaaagaatggcacaaccgacggcacaagagcttttaaagctgattgccgaccagcagacggcgatgacacaacagcagcaacaaattgcacagcttttagctctgcaacaaacgcaaaaggctgatacagtgctcacactgccggatgtggccatcttagagccgagtgatgacaaatcgcgaataagcgaatggctaaagcgcgcacaattcgcaatcgattgcgtgtctccaaacgcatcggacgctgtcaaggttaagggattatgaacaaactctccgaggcggcattcagcgagtacaccaaattctgtctgccagagcccgtgacaagtttcagcttagacacaacagtcaaaaagcttgagaagctgttcgtcaagcctcaatcgatcttcatcgaccgatttgagtgcttgatcgcccgcaaaggaaagggagaggacttccgatcttttgtcaaccgtcacaagcgtttgatcacggatttcaaattcagcgacttaaaagaacaacagttctatgtcctgatgttgctgacagcgctcaaatcgcacggcgatgcaatgctaaggcaaagaattctgtccaaattgaccgcggatggagacaacatcacgtatgatgcggtggtggaggactgcatgaagtttatgactacaattgcggagaacaaagtcatcgagtcttcgtctagtggaagtcaacgaagaaaaccgtaaatgcagtccatccaaaacgagaaaagccgaa

SEQ ID NO: 15032 - DNA, 3603 bp, Heterodera glycines
  unsure (1)..(3603): unsure at all n locations
tttatgaatttttttaattaaaattcaaaatccacctccattaagatgggaagnccttcgcgctcaaagnatctgaaactttctttttctccgtcaacaaatttaaatttttaaaaatgttgaatttgccaacttttgcagccatcccaacgggtccttctcgtagtatcggagctgttgttcttcttcgtcctctccttcctcttctgcgtcctttttgttctccgtttttcccattggttgtgccttttctttgttttcttcttctttctgttctcttttgggaccaccgcaaacagtgaaaagacgtgaactgcctgaaaaacattgccaaaagttgttcattcaatttaaaatatttaattccgacccgctatttggaacacaaatccgttgtgcaatgggacgtaagtgcgttttttgagcggctgcttgttcagcctcaccccgtgggtgctgttcatgtcgaagatgaacctggaaagagaaaacatttgattggtaaaaccccttttatcctccatcttttaccatcccggtctcccctttatacattctccgtattgtaaaatggcgtggaaacgagaaacggacggatgctccaatttgatgtcacacggctcaaaacggccaatggaccaaaatgatttttggtgggcgctgtcgtggagacggacagtcccaatgacagtgccctcttttataatctgaaaaagagagtgaaaaaacaaatttactttccaaaatgatcatttcacttcaagaaagtattcctgtttgtcttcagcagggactaaagcccaaaatggctgctgatatcgcaaatcactgatggttggctgctgttgctgctgctgagtttgttccgtcgctgtcccttcgtcgctctcttccgattttgccggtttcagtggcaaatttttctgcggaagaaccggttctgcgaaaattccttcaccttgcaaagttttctcattttccattgtttgtgttgctgccatctaaaaaattaatttaaaaaatgggattaaattcttttttgtttaagccgccagtgaaattttaatttaatttcgaaatgccaaatttaatttacgaataatttattctcttataaatagggatgatatttataggcactaaaaaccgccaaaataggtaggctctaggctctaaaaaacccccaaaataggcactaaaaaatggaaaataggcactaaaaaaactcatttttaggggtgtaaaatgacaaaaaattattcaaaaaagtaaaaaaattaggccaagtcagtattgagataaataattttttaaagcataaattcttgtcaagaaaataaataaatacattttggagatgaatttttggaaaatttttcatttctgagggggtttatttttagaaatttttgggtcgattcttaggggtgtatttttaaaattcccaaaaaatcgattcttaggggtgtatttttcgtttttattgcatttttgttaacaaattttggacaaaacgccaaaaatccattttttgaaaagaaatgcgcgggatgaaatttcttttggcatttttaatagtaaaaatctaaaaatagtatttaaaaacaaaatactactaaacaaataagcataaatgtgcaactcccgtttcattttccaagattcctttattctatgtaaatattttcgtttttattgaatttttgctaacaaattttgggcaaaacgccaaaataggcaaaaataggctctttcaaatttttttaggctttataggcgctaaaaataaaagcctagaaaataggcattaataacttgaaaagtagcttaacaaccgccgaaaaaaacatgtttttcgtgcatttcagaccatagggagctcaggaaaaaaataggcttttgcctaaaaatatcatccctacttataaatcagtttcagcttgggcaagcaaatgttgaattgttttctggacaatgactcaccatttaaattttgatcaatttctccaagttcatgagccccaattgttggcttctggtttgcctgaactgttctggaaatccttatacaaaaagatatccaatcaggcaatttgaactcaaatacctaaataaaaaaaacaaatatttttagattttcgatgcaggaaaatattttgaggttatcatcgaagaaagcgaaccgaatgaaacaatttcatcgcaagtcaaagctatgagcgaattgaaaatggacgacccggaaaagtcattcacttaaaattgttaaagaaaatcaaaaaagagtttagtgtttttctcattgaccatgcgtggactttccgtccgaatacagcacgttttgcacttcaacaagttgacggactgaggaagagattattggacatgttcaatatcaaagtcaacttatatttattaaaaaaaaatcaaaatattttttcatgaataggcttggtatgccaacaaagaatgtttaaaggacccttttgctgatgatagcgcagaccaacagcaaaagtgtgctgatgccgtagccactcattccgctgattgtgaggactcggaagtcgcatcgccatgcggccaaaatgtcgaagaaatatgggaaaagcattgcgaaatggacgacctaataattgacgaaatgtggaaatatgcaatgacatattcaattcgaatgctcaatttggtcccaaattttattccctttaataggccataaaataaattcaaaagtaaatttaattaattgtcaggaaatggacgaacaccaaattcctgtttggtatgtcatggacgaattcggtgttcgaattggccattctcttcagccaaacgtaaaaagcaattaaaactgtctttggtttgcatttatattcccgttttaaaggtcaaaatggttccgtttctcgacttttctgaaaatatggcctacagtttgcttttccccgtccaaaatatttcagaggggggttagtttttcttcaaattattgttttaagctattttatgtgcaattcttaagacactgtgactcgcaattatgtcgatacgcaacttctcaaaactcatcccgattggttggatgtactgctccatccctggcaacccttccccaatttcgctgctttctcaatttgtcacgttcccaagcgggacgaatatttcatggtaaaaaaaagatttttacccattttctaagcaattgtccgtcttatctctcctcatttgtccctccaattcagtccggtcgtctgctcgacttaatcccttccggggaccaaatcccaacggtcaatttccaaaagtctatggatgacccggacattttggtgtgtgcctcggatttgcaactcatcggacatttgcgccgattccgtgtgcaagaaacaaacgatccgatgaaagcgcatatcatttggcgtcgtgaccatttcaacgattttaggcactcattttcactgatttacattttcattttcccttttgatcagatcgttggcgtaccaaatccaagcgctttgatcaaccaatttccgtttgaatccgttctgaccgtcaaagatcttttcgcagctgccgtccaatcattcgtcgaaaatt

SEQ ID NO: 15033 - DNA, 2413 bp, Heterodera glycines
  unsure (1)..(2413): unsure at all n locations
aaaatattcatcaaatcntggtttttaaaaaaaattaaccctttctttttgttgtttttgttttatataagtattaaaagcaaattaacaatcaaagtccaaaaaaggttaaaatacctaaattagaattaattctcttgatttttaatattttcaatttcgtaacaattattacatattactataaagaaaacaagaataaaccaactttggttttctctaaaataagatgttctaagtagttcattctaacattaaaaaataacatttaaactatcacttaataaaattgaccaagaagatttttttaataattgaagaaaataaaattaaaaagatgaataatttaatttgtattttataattgcaaaatcaaaacttcattattaaatttagtatcctaaaatttacaaaaaatttacttctttcttaagaataatacaaattacgtactcagactgcaaatcatgagaaaaaacataaatgaagaaacatttgaagaatataacaagcattatttaagaaattaatatactatagaaatatagaaccattcattaaaaaataagaaaagaacttaaaatttacaattaaaatccaaaatatcaaatctgtttacaaaagaaatcaaaaacaataaaatataaatgttcgaaatttctctgttaactgagacacaagtatccaaacatttccaaaaattggcaatatggccgcacccaatttatgctgttttttaccatgcctattttatcataatcagtattttttagcaccaaaattaaatttatttttcaaaaaatacctttgagctaaggtgtgatttaaataaaatttgtcataaaattgcctttcccaagggctaacgggagattattctaattgttagagttgtttggatgtgcatgatgattttttaataaaatcactcacattagcccttgggaaaggcatttacatgataatgtttttttgattcacaattggggcgcaaatgttcgggcgcaagtgtaggtgcgcaaatattcggggcgcaaatgtagggacgcaaatgttccgtcacccgacaatttaaggccttttcgcacaatgaagatgatcaattttccatttacccagcaaaatccccggcagagaaaagaacaaaaaaatgtgagtggtagggggggggaatagacgagagagtgtcagtgtgaagaaaaattatgtgggagagagcagagataaggaaaataattttgcaaaaaatctacaacaataaatggcaaaaagtttccagaaatgggatatgtgggctaaactgaaatttcataatccataagtggaaattccattaaatgagaaacgcactaatttttcgaaaaacgcaaagctgtcccatgagacccatcataaaataagttaatcgaaagcgatgcaaatttaccttttccatctgaaattgtgtatccaatcccaaattgcttagcatttttattttgctgtatatttttggatttctttcttagatttttatttatttttaattggcaacaatggacgaaaaccccaaaaagaattttatgcttattcttgcgaggcatttccctctgcttttgattcatctgccaattcgtattctgttttgtttggcccgtaggcgtttaacgaaaagtcaaaactatcacatatgttttcttccgctctccaaatagcctaatgatcaaactcactcagcagaagaaaaatggagatgaagcgacagcagctgtttggggggggggggggagataaagtggagttggttggtcgtttgacggccaaaaagtgaccaaagggggagggaaggaaccttgcgagaccaataaaagaaaattcaaggccactataccgaaaaattccagattgtaaaaataaaatgttcttttacttctgttttggattttacttttaaaccctttacacaaagattaataaacatgccattgagagtcatcacgtcgggctttgacatttgcatcataacctacgccgtttttcgcagttgaaactattgacaaaaatttgtctaagtgaggctaaatttttatttcaaaaatcgtgaccttgaattcaggttaataaacgacgtggccagtaagatttcccattgctgacggaataacaagcatttaaaaatacttggtatacaaaaacgaaaagttataataatgataatatataaattatctaataaaaatgaatggttaaaagataagttgacttcaattgtaaaaattaagagacataaaaataatttttttaatattaaaccatttacaccatttaaatttaaagctaactagttgaagataacttgattaattctatagattgtaaacaataactgtctgcaagaaaccaaataaaatagtaatgaacaaacatcgcatta

SEQ ID NO: 15034 - DNA, 1287 bp, Heterodera glycines
aaaaacatttaacttaaaaataaataatataaataatttctttctctattttttataatatttattagtttttgatttactaaaaatattacattaaatgaacagaaatctaaagatcgagtattcatgatacaaggggcaaaatacagcgagagactcgatgctcagagaaaatgaagaaatgctttattgtagacaagaaatataaataccaggaaaattaaatataaaataattttgcaaatatttaatgcaatgcacggaaacagtgggcgaatttgaatcgcatttttcccataccgaaataaataaatttaaaattcattatgtacgacggaaattaaaaacaaaaattattatgaataataattgcttaaaatataatgataaaggtttaatattaaaattgtaagaatttgttaattactttgtcaaagatttaaataattacacaaaattcctaaaaaaataaacattggaacattaggtaattaattgatataagcccaaaataataaaagctgataataaacataaaaatatagcaatatttacaaaactttaaccaaataaagtccgttaagtggccagtaaaataaaaataaataaattcataacatgcctttaaaaatgcatcattattaaagatacatgtactaatggccatatgtttatggttggtatcaaaaaatagttgtccaaaatgttattattttattgcaaaaacatttaacttaaaaataaataatgtaaatttttttcttaattttttataatatttattagtttttgatttatctaaaatattacattaaatgaaaaagaaagctgaaggaagagtatccatgacaaaaatacttgtttaaatctcacattcttttgatattcaaaatggcatactttttaaatttgttcaaaaatcaatttaattaattttcaaaaaatgccaaattaggtctactgagaatttgaagaagcttcatttataattttataagaacattaaagatctcggttaatttaacctaatttcataaaattaagctgagcaagagcttttatttaagcaaaactataaatttattatatactaatttaaaagaagaaaaacacaaattttttaaaaacttgatactaaaacttcaattgaaaagataattaagaaaataggagtaaaataaaatacaagtgaaaaaaataacaaataattttttataaagctatgaaaatttcaacagaagcactcggagcgctaggtacagatatcctcactctcatctttaatgt

SEQ ID NO: 15035 - DNA, 5355 bp, Heterodera glycines
tcctccgcctgtcatttgtgcttgcttcacaccgcgccactcactgatcagccactgactgatcagctttggtgataagcttaagcggcggttcgcctcggtttcagtgcattcgatttgctgttctgatcagataatcaccaattgcgcccaatccgttgcgacttttgctccccgtcgtttaaatcacttttgctgatcactcgctgactcactttcattttgtcaattctctttccattttctcattttccgtttgctttttcctcctcctccccctgcgtttgatcagcagcagacggattctccgcaactcgtctcggataagcaaattaatttgatcttcaacgcactgttaagcaaatgtgcacaaatttaggctaatcatctctttccatttaatgaatgtgaatgctttacaatttgtttacgaaggctaaaggaaaagcatcgtttggttttgcgcagcaaattaagacaaaacaaaagtgggtttttttgcttcagcaggaccaaacgcagcgggaaaagccacacattttgatgtactctttcttatcattagcagagtcattctgttaatggcgtttatttttctcgcgcttcaaagagcgtctttttacaatttgtccatttttcggcttttcctttttcttagctgattttgtcagctttattcccaaatttttttttcaattaaatccaattggccttcccattttgggcgttttctttcttttcactttttcatagcattctaatggggtttttatccgtctgtttccttttctgcgctgtcaaaattttgagttttcccaattcgcgttcctcgccataatgccaccaaaagcgacaacaaagcaaatgcccctccccccatatttcctatatgttttgtcatttgtccaccatttgcgcaattgttgggtcgggttgtgtgctgctgctggagggtaagagaagtgcggcgagtgcaactccacccttacctccctcttttggtcgtccccccccattcccacaacaatggacccaccgatcgacccacccccgttcgaccgatcattgttgaagcggcgggtgtgtgcgtgatcgcgtgatcatccaccccatgtccagttttactttgtctgctaaaagcactcccactcagctcatatgcaataagtgggctgctgcttgctgttgcttcaacgtagcaatttctgattggaactgactgatgggtccgaatctgagcctatagatggactattacataatatattccccgttttgccgtaagaaagagtcttaaatccggcattttcccgaattcttctgcagaatcccattcaagcactgactaaactaattggcaaaaagtcgagagtttggattagttcggaatgcttggtttctttacaatctctttaaaatcattttggcacagtttatgccctccttttccccctccatcgttttgtttccccgtttcccgtttcaaattttactttttcttcctcattaatcccttttattcattcatttatttattcattttcttccattctttgctccttttcttctccatttcctttcacttcttcttcttcgtagttcgttcatatcgctgcttttttcgttgcgcgcaagcggaaactccgtccgtcgccattaaatgttatgatgttttttgttgttgtccacctttgtgctgttttctctctctgtgcacttttgagtgtatgcatttgttcgggaatggcattttcaaaagcactcatttaaaattattccctaatcaattaaaaattatcaaatgtggtagcatttttttaatcagaaataatcatttgtacatataaatgctgaaagaaaaaatcgttgactttgaacggctaccagacatttgcggacaatttcgggaaaaatattctaaaatatttttaaaaaatctcaaaacatggaatggagactgcaaaactaaataaaaatttatttttggcttttaaaggaatcatattttatttttacacttcaaagaattaatttcactggccaaagtgagatgctgttccttaagtgattaaagaagagttgatccccaacactgttcggggaattcgaacgtcgtctgtttcactctgtcgggtgagagtgctttttttatttttagaaaaatatttttttctatttgacgaccaagtttttgacccccccccccaacatttaaaatttttttagccttatacataattctcggggaatttgataccagttccccgactttttttcccaaatagtaggggaagaaccatagataactcttgctctcgtgatcaattggatagcatttcgagaccccaaaaattttcggaaaggaaaaccgaacggactaatttacgaactgttaatttgaaatagtgaaagtaaattttgttcatgattaagcatatcttcaaaatatttttttatatctaaaattagaagaaacgttctgatgagtccaaattttgcattgcattttaaaaaaaattgttcttttataaatattttttattttttcccgaaattgtccgcaaatgtatggacgcgctttgaacggtgcaatgacattctcaaaaaaccaccaatggaaaattttgacgcaaaattattaataacttcgccaaaaatgaaccaaattttaaaattttgatatctttcgatatccctaaatatttttttattatcctgctgccttttcggcgcccgagaaattttttggaattaatgcgatttattaacagattttgaccgaatatgataattttaaggatttccatttagatttttttggattcaaaaaaatatatttttagttttcaaaatatgttaattttgtcaaataaatatgggtttggagaggaaagactgaaacacattcttttcattaattaaaataaatgcttatttttaaatttcatttttcaaatgtccgatggtccgattccccgcgataacattcactcattaatcatttttaaacaaataataaataaacatcgttcattcgcatttcattttgcattttcatcattttttgttcattccaacgggcacaaatattaattccttttaatcgaccaattaatgaatgttttgcacccgcaaaaattgtaaaaaaacgaaaaaaaaattatttctcatttaatttgacgggcgatggggcggggtgggtaaaagcagagatcgcaaattgaattctgattttacccattcaattcattagcggagcaaaggcaaatgaatgaatgagccttgaccgccgcccctcccattttcccacgtcttcgaaaatgaaaaatgaatgactgagggggggggggggcgggaatgaatgggggcgtttcgggattttctttttttttgaaagaccactaaattcgagagtaatttcacttccttgtttatttttcttaatcgaatttacttatttttgctttttttcaacaaatttgtgcttcaaaaaatataggttttataaactttctgcttttaatgattttcaatattaacaaaaagtcttggattgtggtttaataaattgaacaaaaaaatcaaaaatagtaattaaaaaataattgcatcaattttctcatgttgctaatcattggcccacaaaaaggccattttaatgactttaaattatcccaacgcatttagtttgctgtgaccgccaaccaatgaaatgaaagtgaatttttttgagaaatgcctaaaaatagtttattttattgtcttcccacgggcaaaacttccatttccgtgcagtttcaccacccaacacattccaatctctcccaaaggaagtgaaaacagccgaaatttccatcccatgccactcattcattgcccgccgagggcacgaattcattcagtgcctccggcgtttgaataggcggcggattttaagcgtgcgccgatggcgcggggaggggggggggagttgcaactgttgcaaaatgtgcgtcagtcagcgccggcagtcacagagattggctggcagatctgctgctcggctggtgccgacccgatcggtcgtcgtcaattcgttggaatttccccccgggggttggctcccatttccccccccccactcatttctcatcattttcttgttttggaagcgctgcgatgaccgatgaccaaccaccccacccacctcaacaaattcctcgtcaaatgttgtgtatttaccgccacaagcacataaaatgtgtttgcatattttgcgcatctgttacgtaatgagcgaatgacttcaaagtgatctgatcaaagagtcagtcacaaagtgtgatctacggaatgacaaatgaccgtcggcggagtgcgcgcgacaaattccaaaagtccattttggcgtgcaaaatttgccccattatcaagccgaggggggagcactgatcaaaaggaatttgaccctccggcatttcaaaataaaatcaaagaattgaaaattaaaatacataaatgttttttgcattatatttcgagtgcacaaaaacaaaacaaaaaaaaaatgcatgataattccctcgtgattaatgagaagggaaagagaagggaatccaatgaatgggacacaaatgccaatgccaaaatggcaataactgaaaaggacatggcactttttgcttaatatacaataaatgaatccggttggtgccgaaaaaccaaatgaatgagcagagaatggcattttgtggctgttgagttaatgttaagcaaaaagtgtatagcagtatttttgtaaaagcgcttacacttttctggcttaatctttttcaatcccttttttgaattcaaattggctctgtcatttctcattaatgcatttgcgcataaattgaaccaaatagaggcgaattgggctgctgctgctgctgcttttggagatgatcttttgtccggctttaggaagaggcagcggtgcgattgggtcaacaagccccccccccttaaatctcccccatccctaaatccatgccccctttctcccccctcagtccccttattattatatcctctccaattcttccaattcgtttatttattcaaactgactgaagaatgaatgaatactattctaaattatgttttgcaggatttgcgccagccgatcagttggtcggtcagtcggtcctcccccccccccgcgggcgactgactgtccgttgattggaacacttttggagaagggaattattaattaattagttcgactatttacacaaaataatgtaaattcatcgcccgcatgaagagaattgtccgggctgaggctcggaggagggaacggagaaaaccgatcggaaagtgatcagctga

SEQ ID NO: 15036 - DNA, 2044 bp, Heterodera glycines
  unsure (1)..(2044): unsure at all n locations
atactcaaaacagtgaaagggcatgccaattagagttggaagcaggtccatcaacttcgacggcacattccacaccggcgggtcatcaaataatatgtttgaacactcaaaattcggattcagaaaaggggtttggaggtacagtaattggtgtggaaactgtggcaccaaaggagaatggtacggtagatcagagagtgggtttggttaaaattcgaggtgaaaataattcaggatcagcaaatgcagtaaaatgtcacacactgatttgccgccaaaggcaaaggcacaaaggggtttgcctcaaaatgggtttcaatttgatgcccttaaatgggcccaggtgcatcaactcatacccccgcccactgtcttgtaccccaatccacagatattgcgtactgcggtggtggtgcccattaaccagcagagttgttcgagcagttcagttaatggtgtacaattgatgccaaccaatggagaaatgatcgtaactccatgccaacagcagcagccgcaacatcaaagccaaccagaacaccaaaatcatcagcaacagcagcaccaaaaccaacagcaacagccgcaacaccaaattcaacagcaacaccaccaaatgcatcagaatcaacgccaaagggcaattgaaggggaaagccgattcacaccgcggcgttttggcccgaatcgctctcatccttatggaggccgaacaaccgcttcccatcggttcattagggaacaacgggaaacacaactacctatcaattggccatggaatccccttccccgaattcaaattccagtcgaaattcgtcgtgtcctcttgcgccgattagcacaggagcgggagcatgcctttggtcttgctggagtcatgcgccaatggaatccaccaatggcccttttgttgctgtcaatggaagctttctacagtactcttttggcatttgtagtgaatgaaggcgagccggggccatcacttccccaactttaattcgcgcggccggagtgtcatcgcttcgcagagcgatgacgaagcacggaaaaagaaagaaagaaatgactaatcataaagcgaggacggaggccaaattgactgttatttaaccgccaccattttgccttttctgtcagttgaagcataaagagcaatttgttgggcttttcattcaataggcaaataatttaatattgttcatttaagcttgtaaaatttcgggttcctctggcggctataccagagaaggttcacttaatttattataacagtaaataagacgtaacaatttgatttaactcactaaaaaagtccaaaaatataaataatgattactctgaattttggcaatgatatgtaaaatagttttaattattttatgagaaaataatcaagcttaaatttgccaaaatatcgagaatattttttatatttccaaaaattaattttttaatatatttttttctaaataaattttgtgaaaaggaaaaacaaaaacgattaacagcaaaaataagtttgttaatgtttgatttcaagaatacaaataaaagaaataaaaaaataatgatctataaaatataaaatagaatttaattaatttttaaactgaatgctgttattaattatatatcaaaaacttaaaaatgcaactttttcttgaattattatttatcaaaaaataaaattttcatatttaaaccagaattaaatgtttatttttaaataatcaataacaacaataaataatttttaaaataatttatagtaattttttaatcaaaatatatcaccggcagcgccatatatgtatntacgaataaacagatcgtacatttgaaaattaaaaatctaaattaaatgataaagaaaaaaaataaaataaaattataaccttttctcatgaaaattttggtaaatatatcttccataaggttacacattcaataaaacttaaatgaaaaaaaaaaaataataaaattaatccttttatcctttattttaggcatttatttatgggaattccaaaaattatgttttggg

SEQ ID NO: 15037 - DNA, 1687 bp, Heterodera glycines
ttatttaaatgaattagaagcttttaccccaataaatccattcttgttaaaaaattcattcaactttttgttcgaattagtgtccggtattcggaattaggtaaatccgagttcagatccgtaatcagcaccctcgaaaacccctaaaaactggttttgagccgaaaattaaaaaaaaatttttgaaaattatagacacccattcttcagaattgcccaaaaaatgaatatataaacggtgacttttgcctccctcccaacacaatttgcgtcccaacaataatgactttctcctcctccgtcgtcttattactgcccgttcaacttctgctggttgtcatcggcgctgtgttcatcatcctcagccaatgctgtggtggcggctccaagaagaaaaaggtgccaccgtttttgatcaccccccccctttttcacaaatgaattcattcctttttcagcccaaagccggagcagcggtgccaacgccacaaacatcggcagtgggcggaccaccgggagcagcggaagcgccctcgtcagtgtcctgcgcgcgtcttggtttttgtggatggcctgcgcgctgagacacgctccacgacggtgcacacaatgtcaaatatccaatttgttccgctcgcccaatttccaatttgccaatgcgtccaatttgcaatttgttctgcgcgtccaatttccgatttgtcagtgcgtccaatttccaatttgtcagtgcgtccaaatttccaatttgtcagtgcgtccaatctgcaaattgtcagtgcgtccaatgtccgatttgttcaatgcgtccaatgtccaattgcgcgatttgtctttgtccaattgtcggcgtcaatttgtccaatgtttcccgattgtccggcgcaatggttgtccgtgtcaattggtcgcagtggtcgaattgagtcaaattcccttggtgaggtgagaatgtgatttgacgaaatgagtgaaaatccaaatgccaataaattggtaaatggttttccgcctcttttcaaaaagtttgtgatttagttttgaagcggaaaatcacttaaaacctccaatcccttgccttccgttgttctcaaaattcgaggaatttttattgagcaatttgatggaaatgcgaagagcaataaaaatgttttaaagcattttaaattgtgtttgtcgaagtgaagtgatgagagtgggaaagaatgaatggcttaaatatggcggatgagaccgccgtcaatttacaagagatgtgtgtcggagataataggagaggaaatgagaaatagaaattaacaatttaaatgattgaaaatgatcgaaaaacatttaaaattaaaacataattaatgcaaataaaaaggagaatttgggcaaaaataaaaatgaatgtccctgatcatcgaattaggtgatagaaatttgtccgattggcaagtcctcccaattcgccacttcctcctcatgtcctcctcactttcttctccctccattttcgccattcctctttcgttccgtctgcactcgctcaactcgtccgagccgtttcgccctcgttgaccgccttgtgccaaattcgccgatcgtttccctccgccaagttgagattggcttcgttgtccaacttctcttggtttgggaaatggtgagttaattggtccgaaagatggggaatgtttcggac

SEQ ID NO: 15038 - DNA, 3224 bp, Heterodera glycines
  unsure (1)..(3224): unsure at all n locations
acactccctaccacttcaagcttcactccagccaaaactttattgatttgtccaaatgctacttacaaagtgaattccgaattcgcaaagaaaatgagcatggtcagctggttgacctcacagcagacgaagttgctccgatccagatgatcggtcaaactttcatccgaaacatcaaaatgagcataaatggacgtgaagttttcaactccaattcactaatggcctacaaaacatacttctcacatgagctgtcctattccaatacggcaaaggactcgcatttgaatgcggcgggctattaccgtgacattggcggctcgcttgagacaggggacggatgcattgcgcgacgcaacctgtttgcgagaagcagaacagcgcaattcattgccaaaattgacgccgatttgttcaaccaacctctctacttgatcaacttctgtgagctggacattgaaattttacccaacgacaacgactttgtcctaatcactacgcccgctgttgcccagggtgctgcagctgctcctcgttaccgcttcgaggttgtcagtttgaaaatgtatgtgaaaaaagtctcattgatggatggactggcattggacattgcgcgaaaacttgaagtgaaaccggcacgatatgctgtgaggaaaacgctgatgaaatcaatgttcattagtcatggacgtttcgagtttacagccaatttgttcatggatcaaattccccgccgtatcacaatggggttagtggctaattctgactatattggaacaatttcgcgcagtccgttcaattttcaaccgtttaatgtgcgcgaaatctcaattattgctaatggccgctcctttccccaagcgccatacgacttggactacccaaattggaaatatgttcgccctttcaatgacatgaacgaagcagtgggattcgccaactcattggaaagcaatggaattagctatgaacagttcggaaaaacccactgcatttatgtgttcaatttgaccagcagtggagatgatcaagctgcgctgtttgacctgataaagaacgggacaacagcggtgagcatcaaattcaaccaggcagtgcccaccggggggataatgctggtggtgatgggcgaatgcgactctcttgtgatgttagacaaaaatcgatcaattagcacagacattactatttaaggctgtcattttttgtatgccactatcatttgaataaagatgaattacaaaaatgttggaattattttcttcatacttcgaattaatttcgatgttgtgtccagtcaaacaaccgaggtatcagcatcatattccgaatatataaaaagactaaaaatgggctggcccaaaagcagccctcaacccagtacaacgcgtgtcccagagtatctaagacgcaaattattgacacgacttcccagtacaacttcgacccggctggcaagtccagcaaccaccacaacaacccatcctcaacgccctaagcaagagaagctgatagatgaacaagtgtcctcaattttgcctccactgattcaattgtgcaaagactcctcaaaggaaaataatttcttccaacaaatcatttgctgggcactgttggctctgtatttgatgcttatcgtcagtttggtcctacaccaattgtgctctgttttttggttgaaacgtaatggacagcacacaaatcaccaaaatattgagagaaaaccaacggacgtcacaaatttttcgaggatgtttcgccagtgaccaattgcctccacctaccaccctacagtatcctgcggcactcattgtgaaccgtgacccccatcacaaagggggctcccattggtgtgccatttatgcccgggacttggacgcgccagtgatttactttgatagccttgcccttcccataccaccaagtattttatcatcctttttaaataaatttcccaaaggtttacacaaaaacattgaagcctaccaatctccattgacatcaacatgtgccccccattgtattgtgtttgtttaccacatgtcccatggaaaatcattcgataaatttatacatattctcaaaacttgttcaaaccctgacatgtattcattaataatattaaataaaatgttgaacagttaaattatattttcaatttcttaattttttcaaaattgtgtcttccacctactaattatgcattattctacctaaaagttacattttccaacgcttaattattttcgtactttatttcccattcattaattatgcatgcaataaaataaaaaggggcggagcttaaccatttgagttggaacaccggtataaaagccgctcgaatttcttcattcagacataaaaaatctgaaatggttctcgtcagcgaattttgtgctcaatttctctcctgccctacaaagtcacttcgcgatcgactgaaccacccagaggaccgagtccgagttttgcagcaattgattgggaaaaaggtccagacaacatacaaggatcggaatggaatgcgcaagtgttttttcgttggtggaatgactgaacgaggcgcggcatttgaaccagcatatggacgtctgcgtaagccgttcaacattaacgtggcagcgcatttttacgctcgtcaccgtgtcaaattgcactacccctatgtgccatgcatcattgaaggctttatccatggtgaggaccgttattatccgatggaactgcttgaaattgtcgacgacaaaaagggagggcgattatttggtcgattgttcactgaaattgaggagcaggaggaggaggacaccaaaagtgaatgttcacactcttcaaacacttctatttacaatgttacggtaaaggatgcacatggtatgaaagcattgacgaaattgccaccactgggcgtggtgagtgcagccaaccatcatcatcatcatcagcacacacgtactggtgaacacatacacacaccacatacccccaaatttaccacaaaattcattatttttggtaattaatattttcactttcttaattatgcctttttctacctaaaacatatactcccaagcattaattatgttaagcttaaaaaacttgtatcttcaaatccttaaatttttaaaactttattttcaaatccgtaattatgcatttttcccccctaaaagtaacatcctccantgcttatatattttgaaatttattttccattc

SEQ ID NO: 15039 - DNA, 1577 bp, Heterodera glycines
aatattaccatgccatttcaatctcattcgcctctttttctaaaagcactttcattcctccaacaaaatccccttttgccgtcattactctctctttggaggaaggcaaatcaacacttttttaaaattagttttttgaggagaattgccattacttttgtacccaaaatctcaatatatatcccactcaatttgggtcattctgctcatttgtaagtgccattgttttatgcccttgcaattcccttcccaataataatttcactgacccatccaaaatgctctgagattgtttgttataatattgatccaatcattcccacggtttatgctgcgttttattttttccattcgttttcttataataagtccttctcctagaaaggggtaattccaaataatctaaagccttaaatccggaggtttgatgggtcggcaacaataaaatctatttgcacaaataattttaataaacaattattatgtaatatttttgttttgctttattctataaaaagtcaatttttaaacaaaaatacatgtttatttttgcttaattatatttaatttcctagtctttaaagaataaattctgctcctctattataagcattactattgctatggacacatttgaagaatttgttattgtcaacgaaaaatcattcaccgatattttactcacatttggttataatcgaggcggtatcagtgagatcaaattcagtgatgtcactcaattcgctgcactgtaattaccataattaatttaattacaagaaaaagaaagttctttttaagcgaatttcaacttgattatgccaaatcattggaaatcaaacacattggcaaaacggcgagggaaatcttgccattggcacaaattattcgctggcaatgggatgagaagggctcacaacaaatcacagatgtgaattaataaaaatatttaaattaaaaaaaatgtcagtatttttagacacaaatactcacgacggaaggaagtgttcggtttcattgcctcgattatttgggttccattgttgtacgaattttgaagaaaaaggacgactcacatacagcggaaaagtaaaattcatacaattaaaatttgtttaattaattaattaatttttttgtttgcttttaagtccatttcaatctctcaattctccggacgatgattttatggtggaaatcggtgacagaaaggtgaatattattaatttgcattttcaatctgtcattttattttattttttatgatgcttcatccgttttttaggtggctttgtccgcttctcggcttcgctgcttctccccggtgatcgatcggatgctaagcgtggagatgagggagaagcagcagcgatcagtcactttgaacgaattgagcattgacatggaccaatttttggattttcttttgtacatttcgccaaatgctctgagccaaccaattcttcccaatcgtaaaattgaaaataagaataagttacaatcagctaatattttactgtatgattcaaataatttaatttatgaaattatagtataacatgtgcttactctgctca

SEQ ID NO: 15040 - DNA, 1395 bp, Heterodera glycines
ggaaatcggtgacaaaaaggtgaatattattaattttcattttcaatctgtcattttattttatttttttatgttgcttcatccgttttttcaggtgactttgtccgcttatctgtttcgctgcttctccccggtgatcgatcggatgctcagcgtggagatgagggagaagcagcaacgatcggtcactttgaacgaattgcattgacatggactaattcatggattttgttttgtatatttctccaaaggagattccgttgatcgaccgagttaatctaatcgaaaaatatgggcttacaaatttgaaagttctttttttagttttgtcattttttaaattttttttctttcagaatttctttttgaatttcaatgtggacaaattgcgtgcctttttcaaggaaaatcatgaattttttttggcgacgatcagcaaagaattttatggcgaattgatcgcgcgaatttgtggttgaatttcaaaatgaattttatctaatcaattctttcgccagcagatgtgttaattggtacgtattgaagttaattataatttttggattgcaaatcgaataaattttttattcctttccaatgataggaaaaaataataataattaattataaggaggtcaaaaactcattttttagggctgaaaattatataaactaaaaatgaagatgttttttgtgcttttccggccaaaaaaatttttcttcagtgttatttcaaaaatttaggcgctttaggcgaaaaagcaggaatatgtagtagggtccgtaccccgtgggcgggggtggcttttcgcgggggtcagagtcgcggtggcgggggcacgataatttcgcccccgcggggacgggggtttacttttaattagctccaaaaaatctcacaaaaaaataaattttatgatgatttgtttggctccacattccttaagtcgatgtatcgcctcgattcactattcattttggcataaattgcacagattttgtctaaagattaaccaaatttagggattttaggctaattttttaagaaaaataggcttcttcgtgggccggcggtgccgataggcgccgctgggcgaatttggaaatttaagcactattttctaacaaatattcaccaaaaaattaaaacttttccgataaatttttgtttttcttcggtttttattttgtaattttgaaatatattaaattttcctgatttagtcaaggaaaattgcactttttaatttcaacgaatttttcatccagcggcggctggcggagccatcaatttttttttaaaattgagtttaatttgttaacgaattatgccaagaatggtcaattttttatgggtgtttttgtacattaatcataaaaaaataattcaaaaga

SEQ ID NO: 15041 - DNA, 3497 bp, Heterodera glycines
  unsure (1)..(3497): unsure at all n locations
tcgggaccaaaaaaatagatttttaacaatttttttgtggcgcatttttcgaaaatttgagtgcaatttgttaacagatttntgtcgaaaaaagtttccaaatcttgtgattttaagccaattttttaagaaaaaattggagtttttgagggataatttaaaattttgaatgcactttcataataaattttgtccaaaaagcccaaaatctgcgattttgaggacagtttttagaggaaacaaaaatttttagggaggcgagccgggaaattttttttggaaattttggctctttttgtaaacagattttcataaaaattggaattttgtaagaaataaataaattaaaaatataaagtggaattttttttagaaaatattcaaaaataagacaatatgtactttacatatctctttcagaattttaagcgcaaataaaaaaaaagtgccaaaatctaccttgctaaaacggtaataaaggaatttgcccacaattattcataatttatttgtgtttttctatatnntgtttttgtttttctattaataataaattttaaaaatataattaattatatttttctctttaagtttcatcaataattntgtttaaattcatttatttttttctatcttcatttattattttaatagatattttaaattttggggatatgatatggttagggctgggatttttaggtttttacctatttttttgcggcttagttatgatgagagaagccgaaaaatagcattttctcctaacaatttccgatttagagcgactttttagcacctaaaattacctaaaactggattttcggtcaatagcacgtattttggcatttttcgagttttagcacgtattttggcctttttccagaaatttcatagcaaaaatgcaataaaattgaaaaacacacccctaagaacctgtccaaaaaattgtttttaaatatacccctaaagattgaccaaaatttcagaaaatattcccctaagaaacaaaaaaattttcccaaaaattcgtccacaatatttattatttattttcttgaccaattgcaattgtgtgggcgaaattgataaaaaattagtcgcttttggaatttttgtacataaagacactgatttttccaatttttaacacctattttcgcacctattttggcctttttgtgggtttttagcacctattttgcactttttagcacccattttagtacctattttgggatttttagcacctaaaaatcccagccctagatatggtcgtaaatggtcattgtcgaaatgccacagttccgtccggtcagttccgtcccagttcttttgggccgtttccgtaccagttaaatgttgacaaatgaaatttatttttaattaattgattaattatttagggaaattcaatagtaatttttaaaaaattttatttaagaaattcccaaaaatcttagttacaaataaattttttcaaaatcccacaaaattactatatgatgcaaatctttttaaattctcaatttttctccagcggcgcctattagcgacaccgacgccaagaaacatttctccacgtgaaaaatcccacaaaaaaagtaaccactccactttgcaacaattcgtgtggctaatgaaccattaaagcgcattcatttttaattgcttcggggtggttggtggacatggcacgggaccatctcatacatcagctaattcatttattgtagtcgagaaatcagctctctattattatatgtacgctcatcgcgcattctatgtaccataattatggtaattaaggctcccgcaacagtcaagaactggttggttcatgaaagaaaacccaacaatttaccgcacaattagtgaggcggcgaacgcacaaagcgcccacccaaaccgcaacaatcacttaataggcataacaatcgtcaagatggggaggtgatcaaacgagaccaaaatactcgttctgcttcttctactgctgctaagctaatgagagtgattagtgccgcgacaaattgattttgtgccgcgccggcgccgcggaagttgccttttttcattttgttacatgcgtttgctcgagtgctaacagctaacatataaaaaagcttatgtgcgcaaaatatgcattttgccaggcatatgatcaacatcttcaccattagcattagcaattttttatgccacaatgtacctaatttattcaccaattaaaaatttttatttacatttttctaccatattttgcgattttttccaaaaacaaatcgtgatgaattaaaaatgttttgtcccaatttggagagtatgcatggcttccagcagaacccccacagtaattggatactgtagatcgcactataattagatgcttcacgagcactgttagggtactttaggagcattattgtaggacacaattagaccgctgcgggttctaccataatatactgtcatataactactgtagcgggttggaactatagtcgactgctaaggggcactctaattttgatactgttgcggcactactaacgaaattggatactgtagctggtgtggccttttatattcaccgctctgttaaaaaaatgcggtggtccgtcttcattcattaccggttaaccaccatcaccaacacaaccaccatcatcgttatcatcagcagcgtgttggcggtgctggtcggcaagttgcagtgttgccaccctgaaggagcaggaggaggggcaggaggtgacaaaaacaaaagttttttttttgaaaatttcctatagggttaggtaggcgcccctggccgacccccttccaaaccacatccctgtcaagaataactataaaattgtgaacgggaggcataagtattagtgatgctggaaactgaaaatttcccgagactcaaggccttgacccaaaaatccgaaattctctcgagtcgagactcgatgccgagactctcgagcatcactaataggcgtgcccgaaaatactccccatcttcaaaattcttctgacaacggcactgtgccgtgcccctccccatcctgcccgcctcaccactgaagattccgtcgaaaatatattccgtaccccctaattcgtcaaagaaacgattttataaaagccaaaaaatgttttaaattttttattagttttcatttgaattccgttttaatttttagccgccgacacaccgggtgcaaccgctcctggcgctggaggagccccacccgcgccgccactcgcgcctgcacccccaccgggaactgaaggaggccaaccggttccccaacccgcgcctgcacccccaccgggaactgaaggaggccaacccgttccccaacccgcgcccgcacccccgccgggaactataggaggccaacccgttccccaacccgcgcccgcacccccgccgggaactataggaggcctacccgaaggacccgcacccgcgcctggtggtgctcttgtgaacacga

SEQ ID NO: 15042 - DNA, 2035 bp, Heterodera glycines
gggaatgggtggaagataatcatgatcattcactgcattcaatggaatgtaattgcgaaccatattcaaaattcgtctatctgctgccaaatatttgcctcgctttttctcaggtgacaatccagcgatcgcagaattgtatttgtggtcggcaattttctgttcacgtcgaagaacatcagtgaaatgccacaacgatggatgacgacaattgaacgcgccctgcaaacggtggtgttccgcttttgcgttattgttcgtcctcgcatttccatccaatgttcgttgatagacgttccactggtccgggcggaacagtggttgcgaccatgtgccattgggacgaggacgcccaacataattgtccaaaagcctaaaaaattattctaaattgaaaataaaattttatttctgaccaatcaatgagaggtcgaaaagccaccaaatttccaaattccatgtcaagtgccgtcactgcattcctgatatcacaaagtggaacgaatgcgactgatgtaagcatccgaacattcaaagcaaacaccggatcagaacaataacgcttaaaatttgaaaaaaaattttaaagggaaatttacctgccataagccttgctgcttcactttcttttgtaagttccgtacaaaatgaaaaaagcaaaaccggatctggcatccgggaaagattgtcgtaacggcatttgacatggccatttcaaaatccacggaaaaagaaatgggagcaaaatttggccacgcagcacgcaaaagtgtaaacattctttcgtacgatgtttgcgatttggaagtcattaaggcatggcacaccgggaaaatccatttttcacacctaaatatttaatttacaattttgaaaaactgaattaaaacaaacagactttgccaagatcgtataaatctgagaaaattgggctggtgccaatgagaaagtttcgtcgccaaaacactcattcattctgtccgcaaaacgcccgaatgaatcgcgaccaaacaataaaattctgagaaaaaaagaatttcgcattttttttctaaattaccgttgcggggtttttccattttcaaaataaacaccggagtcgcccaacagaaacagctcctcaacgccttccgtggacgtgtaggtcctgtatgcttggttgatctcaaaattcagattggtcgggactgctggtggtgcattgatttcgtggcgcgcccgtttgattaactaaaattagtttgcttgttatttttaatttgttaaaaaaattctcgtacgtcattcgcagccctttttgtcaccaaaattgcggctggtgatggcacgttctgcaatgcttctgaacgaatgacagatggcggttccaaggtagtgatggcacggagtttgattgtagttttgacttgttgagcctcaacattcgaagcatttgcgggacaagtgtgtggcgttgaaagacgaatgaagtgattgtttaggtccgtccaaagacggcctttacatttgttgacgctgtctttgaattcgcacacccaaaattttattgctccattcacactcattttgtcgaatatgtaaagatgtccttcgtgaggaagcttcacttgttgtttttttgtttcaatttttgaagccatattcgatgaaattgattaactaaaaaagttttatttttgttttttgtttgtagattttaaccaagtatttgaatttttataattttttttggcgccgaaacgcagtggacccaaaattaattagtaattttttatttctcttggttttacgttttaatatttaaattattatttctttttgcactgctggttccctatataagaataatataccccagtttcaagcttaaaaactaatttaagactttctagcgagttttacaggtcgagcgtggggtcaatcgacgcagtttttcaagggttataagggaaaaatagtgcggtttcgatcggttaagaactgttcgaactgtgttcgaaaaatgactcaaaaatagcacttttttgggattgcc

SEQ ID NO: 15043 - DNA, 1402 bp, Heterodera glycines
  unsure (1)..(1402): unsure at all n locations
acgaatctgttgcacgtcacctccgncctttgttgctcttcaatgcgtccggcacgttgtacttcttcagtttcgtcgttccacgaatctgttgcacgtcacctccgcctttgttgatcttcaatgcgtccggcacgttgttcatgtcatctttgtcaagagcattcttcagtgtcccatcctccaaccgttttggttgtttgcacgcttccttctgctgttttggactgtacatgtcatcctcctcgtcgtcatccatctcatcatcacttcgatcctcctcatcatcagcactcactggctttcgtcgcggaaggttcttcacatcaaactgtatctgtacaatgggctgatgcgtcggcttctcttttggttggacgtagacttggatcaacgttccaccagtcggaattgttataacataagtcctaggccgccgttttaacaaaaatgctaaaattaatcattttttattgattctaaatgtccatagtgtttttgtacctttacaatcaagattattataatttgtgaatttctatttttcatgtgttagagacatttaaagctggtatgactaattgagtttttcatttcattccacttttcatcaaattccatattttattttaaacaaaaacatttttaatttttcagaaatttattgaattcacttttttatttggtttcgtccgacaacaagaaatggtaagttgtaacggaatagcattcctgataactcaattaattcatattcaattgcttaggcaaagcgcacaaaaaaggtcggcattgtcgggaagtacggcactcggtacggcgcctcgttgcggaagacagtcaaaaagatggaggtgtctcaacatgccaaatacacatgtgcattctgcggcaaggtttgcataccgcacattatgttgcaatttgctagcgacaagaagacggatacaataaaacactaatcaaaagatggtaaattccatgggattgtcattctgtttttagcggttttgcgatgtgctcagagttattcgaaaatgattatcattcatctgacattaattttggaccctaaatttgtgaaataatttgcttattctcaaaattaccatccaaattgcttattgcatttaatacattgtcaaagcgtgagttgtttttcgataacctgaaattacattgcagaactgctcaaaaacatcacatatatctttttgtggacgattggaattacccttgaaaaagtcaatgggataagaggcacttattatgtgcaaaaagacactaagtctgtgggttgcaaacgtccaagcccagaaactatcattttgtttaatcattgcatcgggaactcaaatatttcatgaccaatctccaaaataaaaaacaataaatttatctc

SEQ ID NO: 15044 - DNA, 2581 bp, Heterodera glycines
  unsure (1)..(2581): unsure at all n locations
gcctatcggcaccgccggaccacccgccaccccctcccccaaaagttttttggaaaaaaacgcgccgcaaaaaaaggtgggttgaatagcaaaaaaaaaaaaagatcgtcgccggagaaaaatttggaccttcaccttcgtatgaaaaatcggtcccgaaacaccccccttgtcccaatcgtctgtcgttgggctgagacaccccttgtatatgtatggtccattaattaattatctcttaaattaggttctttttattccatttcttagtacgattaatagaatttgggatagtgcagttatcgcaccacaattttgccatgcatagcccctcgaaactaggcaatcggtataggatttggtccatttttgtctggtgttcaccactttacgccttttttgccctttcgtgacttttcgttcagatgatagcactgctcaattcggagagtcttgacgaggccgttgagttcgttaagcacttgcaggaaacggatccttctccgtccgttttacccgtcgtcaacatttccctgaacgatgctcggcgaactttgtacttgagaagcgacttttcacgtgaccaaatcagcgcaaaaatgaaaattttaaaggcctaatgtttctgtttattttgtatacaatacaatcaaaagaaataattatttatatttatatatttttaatttatgttttgtgaatataaagatgaaattaagtcaagtacagtttttcagtattttaagtcaagttgcaaatttttgacgacgatttttattcaaaatttgtcaataattatcatgagaatgtactaataaaccaaagtgttcgctaattgtaaataataaatttgattcgatttggaatgattgtttcaactggtaaattgcttttagccaaatgtttcccgctaaatacaaagcctttcgactggaaaataaagtcgcggtgatcacagcagcgacaaatgggtgagcaacaccggcattctgaagggcactcaatcgatgatcactgataggaaaatgccatacaaaatgggcctattcacaggattggattggcaattgctgaacgattaggccacgagggagcacgtctggtggtcagcagcagagacgaagacaatgtgaagcgggcgatcgatcggctcgtctcttcgggactgaaacgttcggaccttgccgggtcgtcacttttgcattggcttttcgtccgtccaatttcaccttcccccccccctttcttttcagttgcacttgccatgtgtccaattcggaggaccgaagtcgcctgctgaaactgaccatccaacggttcggaagtgtgcacattttggtgaacaatgctggcatcaacccaattttcggcgatttgttggacgtggacgagtcagcctgggacaaactgttcgacgtgaatgtcaaggcgggcttcatgattgccaagctgttcgcgccagaaattgaacagagcgggtcggtcaaatgttcccggtttttgaaaggataaacgccgttgacagaatagcttcgaaattgtgccttttattttaattttccagtggagggtccatcgttttcaactcgtccatcggcgcctataggtccccccagggaatcgctgcttacggcatcacaaaaacggcactgctaggtcttaccagagctctggcagaatcacttgcacccaaagggattcgcgtgaatgcaattgcgcccgggattattaaaacaaaaatgagcaaagcggtggggatggaaattaaaattaaaaaatggaaaacactgttttaattagctttgggaaggcattgacgaacggagcagtgccgaagccattggcacacttatgggacggctgggaatgccggaagaatgtgctgcactcgtcgcttttctctgctcttccgacgccagttacataacgggcgaaactgtgccggtcgccggaggcgcctactcacgattataaaagggacagacaaagaagaaagaaaaacaaacatctattanaaaataaaatacaaattgttgcaaagtagaatattcaaacgaattttaaaattttacattatgtaaaattanacgggaaaattggaacacctaccgtaattttgaggatcatctccttaacatttaccgtaattttgcgaattctctccaatctcttcgccttttgtgccgctttttatgcaattggtaaataccagcaaaaatttttattccaattacaaataaaaatttttgggctgatattacgcaatcgcactcaaatgcacccaaaatcaaaagcaaattatctgatcggcacgagaaaagtcaattttaagaaggaattgggcggtgaatcattaagaaatggatttggtgatctgtaatttaagaatttagccttcaaggaatgaattaaaatgcaaaatgaataatgaaatggatgaatgggccaagcaagggccatccttccccctcccttcccttttgctgttggtgagaagaaactcctccccctgctcttctccgccctcctcccactctatcggtccattcattgtacagcaaaagacggcaaccattccccc

SEQ ID NO: 15045 - DNA, 1012 bp, Heterodera glycines
  unsure (1)..(1012): unsure at all n locations
tttgtcaattttaaatgagcagcacaaaaattcacgaaaaaacaccatttacacngctcaaaatatgcaacattcgcacaaactgtggacgcacaaaaaaatacaacaaaacaaaatatgnatcagatcagtcggagagattctcagaaaacgatattttgtacagtntaaagttgatttgctgttttgaaaatattaaactgcgttcattttaatgtntaatgttcgacaaaaaaattattcagagtgtgacggatgtctttccctttcgaatttttcgtcccccgggtttcgacatgaagccattcgttctgtctgtcccgagtctttattggctctaggaaaatccgacaccggaaaatccgacacaagcagaaaatccgacaccgctggaaaatccaacacaagcagaaaatcagacactggaaaaaccgacacgacaccaactttaaatttaaaaaattttgattgtttgagttaatatctggctaagtttatcaagttttcgaattgaattttaaagaactaaattggttgcgccattcgatgggatattgctaacaaataataaaggggttgtcgattgttgcgagtcgcataaatcctctgtgagatccatgtcttgctccacgtacacttgcttatgcttcatgccctttcctctgattccatttgccggattgtttacaaattttttgagatgattaaaaaagggtataggagtaaatatggttattatatgcctatcttaaatagaatttatggcaataaaaatatttattttaaaaaacttaagtatgcaacttttattacgtgtattttaaatattcctaactcaaacaatcacaaagtattttttaagtttaaagttggtgtcatgtcggattttccagtgtcggattttccgcttgtgtcggattttccaccggtgtcggattatctgcttgtgtcggattttccagtgtncgattttccagtgtcggattttccggcgtcggattttccggctccc

SEQ ID NO: 15046 - DNA, 1845 bp, Heterodera glycines
  unsure (1)..(1845): unsure at all n locations
actagttttgtcttacagcacaagttgcaaaggagaagcccccactgactgttgttggggatgttggcggcaaaattgccatccttgtcgacgatattattgacgatgcacaatcctttgtggcagcagctgaagtaatttaattttccccttttaatataaaggccagcaaattaactatttgcaggttttaaaagcgcgtggtgcctacaaaatttacgtggttgcgactcacgggttaatgtcactcgacgccccttccttactcgagtcatccccaattgacgaagtcggattaggacacaacgattattatgataaaaattcaacggtttagataattgttacgaatactgtgccacacgaaatgcaaaagttgcgttgccataagataaaaaccgttgacatttccttgctgctcagtgaagcgattcgccgcatttataacaacgaatcgatgggccctcttttcagagaccttacaatcgatgattgatcaagcatcgaatcgtgcataacctttctgtgtcgatatttttgcaaatggctcgtctttaatgtgattttatcatgaaaaatataaagcgttcaaatatttaaagcagtgtttctaatttaggggagggggggatgcattttggaaatacggtgtattacctttcttttctgtaagcattttttgctttttttccaatgtctttcacttgtcgctacatcaagtgctctaattgcacattatggggcatttatccacaaattcaaaacggacataatgagtgaaactggtgtcgttaaaacattcaaatattttccaagcaggcaaaggtatagattattggtcccgaaaattattttttaaataaagtttaagaaaattatttttaaggataatctgaggcgccgagcacgaatccggtcttattttggctcagtctcgaatcccgaacccggactcgaacaaaagttcgagaattcaatttttcgtacttcgcagttttagttcaaaacccggctatatacgtggaatcaaacaggatcttattaatacgtcaataaaagattatttaaaccattttgaagtaaaaatgtaaagtttgaaaaatttaaatttttgaactattattcgaatctgggtcaggggttcgaatttggtcgaaattgatgtcagaatcggatctccgaccctgaaagtgtgctcgacgactcccggccaatgagaaagtgtgctcgacgactccggggcccagtgatcagcagcgggatgatgaatgatcatttgagaaaatgtcgtccgctgactgcgcggaagtgaatttaatataggtatttgagaaatggtcgatctcatcgcattttaaacggatttggtgctctaattttctctgatcagaaatgttctatcacttttatttgtttatttttttcgaatattaatcgtttcaattgacaaattaaattgaattacttcaaattagagtgccacgggaccgggaatttttgccaaaaccgggaccgggacctcgattttttttcgggaccgggaccgggaccgcaagaaaaaccgggaccaaccgggaaattttaaaaattcaaaaaaattttaaaaatttaaaaaaaaattcaaattttaatttatatcaagtgaaaataatacaaaattatttggttttttatttaataaattaaattaatgaaaattttcaaacaaattttcttcaattatttcaaacaattatcatttttggactanatcatcgaatattaatagaaattcagatttgattttcacatcactttttttcggagcgctttttcaaaaaacttttcaaaacccgggacccggga

SEQ ID NO: 15047 - DNA, 931 bp, Heterodera glycines
  unsure (1)..(931): unsure at all n locations
atgcttaataatnttatgggacgcgtattctgcactagaaacaaagaattacctaaatgtgcaagttttgggagttactatatgttggatttctatagcaagaattatcgttagaaggaaaatttcattaacgctcgaacttgagccccattttaattttaagtgcccattcattttgtttactgataaaacctatcagaattttaacatctttttatcaaaccaacaacagcaataacgaacaaagacattttcttaaacaacaaacgtcggtcacatcagaaaaagaaaccgagaattttccctcccacgtgttttctacgtgcctcctcgtggtccataatgccagccgaagtggtgagcaccaaaaaaccgaactgacgcgatggaagtaaattgctggtccatttctccaagtcggccattcgaatgtcgaaacgaggactgaaatcgaaaaataaaataataaagtctttccgcctatgattaaacgaagtcatttgatttcaatcaaatgtctattgtattttgcaatattgtgaaaaattcagaaaattaacgagatgaaggcatttggaatgggaaacaaatctacagaatttgtttaataaatcccataccagtaaaaaaatatttgggtgggagtatggccactctttcttttcatgtaacagaacctgatcacttggcatttgttgatccgtccagtgagattcaccacaattttgccggcacgatggtcatcaacaatttcgaattcgccaatgtagccgtgtttcatcatgaccgtgaggaaacggatgatcacctttgaagacggtcggatgatcacctgtataatattaatggaaagagttcgtttactacgcttaggatatttggcgcaataataaacggctctagtgcactttatgagtcccaatcgactttt

SEQ ID NO: 15048 - DNA, 2478 bp, Heterodera glycines
atcgacaaaatcccatttggaacaacgccaatttgtgccggaatcggtcggaatttgcgtgttgtgcgccatttactttgtatataattagcaatgaaatgagtgaaacaaaaaattcgcgtcacttatccattagcgggaggggttaagagaaaagtgaaaagaaatagagcgaaagagagagggaggagagaaggcgagcgagggggagaaaaaagagagatggagaaagagagaaagtaagagaaataaataagaaattagtaaaatagagagaaagaaaaacaaacagagagcgagcaaatgagagagagagagaggaggaggaggagaaggcgatagagtgtgcggaaaacaacagggcagacagttagatagtgatggttagctaattagatgctgtatgtgccctgcatatactccatttggaagcatttacgtgacaattcaaaaaacacagttaatgagcacgtcaatttccaatttcatctttaaaatttatcgattacttctcagcaattcattcacttctgtcgataactttggccgagagctgcgttagaaccagggctgcacgcaattacggattacggattgcggaaattacggggttttgggagttacggattacggatttttccgtaattttgatccgtaatttgacttttggattattttttcgagacgatttcttgtaagattatttttataaaaaacaaatttttctattttttatttaaagggctacccgtatttcgatttatttaagaattaaaatagatttataattttttatttgttgttgttaaggctatttgggtatttttaaattttgactacaaaatggcaaaaattagtctttttttggctaaaaatggttacaaaaaaaaattttttggagtgttttgggaccgctgatcaagaacacgacatccattttgcccaattccgaaccctcacccgaacttgaataaaatcaaattaaaaaacgcttgaatttttaatatttttgatcattttgtgattaaacctcatttcgttatattttggacttacaaaaaaatgattggactcataaatatttgattggactcaaaaactcagattgctttccttttcagatcaaagtgttcatgaaggaggtgcggatcatgcgacagctccaacaccccaatgtcgtccagttcatcggtgtggcggttggccaggagcccctgatgatcgtcatggagttggggacggacctccggcgctatttggacatgagcaagcgacatcggctcaacgctcgcgccaaactcttcatgtgcctcggagcagccgccggactggaccacatccactcgaaggacatcatccattgcgacatcgctgccaggaactgcctctacgcggacggcatggtgggtgagaacatgatggacgagggaggggtcagaaaaattggataccaaaatttaaggaaattgaaaaaaaattttgagacttttgcttttcaagagtgaagtgattgaaagagcatgcttttcaatcgaatttaatttttcttttttttccttccccaattttttatgtaaatgaattctctggttgactattaattttgctcatttttcaacaggtgaaaatctccgacttcggcatggcgcacaaagggacggtgaaaaggtggacaacaacgccaagctgcccatcaactggcgccgttccccttcgggggtggagacgaaaaggcattgagtgaaaagtccaaaaaagttcttttttttatcatttctcccttttgcagaaaatgaagggccagaggatagtcttcccccggactgcgccaccggagttcgtcatgctgcacatctgggactcgaagcacaacaaccgttactcaatgggcgcggtgtacgactggctgaagcgacacaccgaagaaggaggaagaaggacgaggagagcgcctgaactagtaaatatgatgatgtgtgtatgtatattgtatatgtgtatattatatatgtgtatttgtgaaatttctgtatttttcatgtcaccgtttagaaaaagtgggacggggacagcgggacaaacgccacaattaccggcccaacaaaaagacattcaacatggacaccagttttggatttgtgggtttaataaaaaataaaaataaataaaaaataaatctaatataaattaagctcttttttctgttagacctgcagctcaaacttcgacaatttgttctgttcattcgcgtcgacgatgcggaagaggtcgtccccccccccgtcattctctgccccccttcataaatattaaaattttttattatattttatttttttgaaaaattccgacttccgacatttttggggtcggacttccgacatttttggggtcggaattccgacttccgaaaaatttttgggctcggaattccgacttccgaaaaatttttgagcctcgaaattccaactcccgaaa

SEQ ID NO: 15049 - DNA, 2156 bp, Heterodera glycines
  unsure (1)..(2156): unsure at all n locations
ataaaaaaaattccatannactcataaaanaccatnnnacncataaaanttctttncnacncataaaaaaaannccatcaaacacataaaaattctttaanacacataaaaaaaantccatnnnactcataaaanttctttnnnacncataaaaaaaannccatannacncataaaannccatnnnacncataaaanttctttnnnacncataaaaaaaannccatnnnacncataaaantccatnnnacncataaaanttctttnnnacncataaaannccatnnnacncacncataaaacnnaacanaaccnccnantttnaattataacttttttcattntaaccaaatccaactttcttggtatcattcgaaagccctaagtgtctctattattctgaaaaattgcgaaaaaatttcatattttgaacaaacttatggccaaaagtacatcagaaatcagattttcgaactttttagcttaaccctatgtacgagttgcttgtgtacgaaaagttacagcctaacaaaaacttggtactgaagagactgagtctttatttatcaagaaataataatacatttcatttgtcagaaaatatgttcttgttttttcatgggtttcaattaaattatttctttgcagtgctttttccgtacattcggaagcgtttcgaggtggagtcttagattttatctgctagagtttagacaacaaacgtcaaaccatcacttttttaaaatgtttttgatattttgacaacggtcggcgtccgactctttgtagaaactcccgttttcctctctctccacttcccttgctctttaaatccccgtctttttctcattcactttctcgtcgccttccggtctctcctcttcctccgttctttcccatttctttcgtcgtaccctcccttctctcaacgaccttcctcctctcatccagcagcgttctccctctcccgcaaccgtttgcttttcctcacttccgctctcttccccctcactctttttcctaccgtatttttctgtcgttcttttccgatattctctgggccaaaacatttccaattcctcgccctcttctttgcacaataagctcagattgcgcgtccatctccgtctttgggtgatcagcaacatttgcggcccatccacggctgggattgtctgaagctgttctttgcctttgccattgtcatcgtttggcttggcattttttttgttgagctgtgcaaatgtcggccaatcattcaccggttgctctgtttctgttccctctttggcctttctatgggcaatttatgctccccccccccactagtccttctcaatttgcaccttttcccaaattcggcccccgaattttttctttcttttatttgattgtcggcatccgacttattttagcttatttgttagtcgtatttcgacgcattgatgggcagcggtcgaaataatgtgattatgtcatgtaataaaagatggcgtttcagttaaacaggaagcaatttactaaaaaacaggcctcagacagccaagggtttgtcttcaaaatatgattccgatgaaacacggaaaaagtcatcacaggcccaaattttctttttcaaaagaaggatataacaatttaaacaagaaaaatcattgatggggtgtgaattggtcagtgttttcgttggctgctgcgttttctctcgttcctctcttctttctctacttctctctctcaaatcccctcactctccatcgaaacgacaaggaaggcaaagacaaataacaaccgactgcctcgcccccaggccctcccactagcaataaatcacaatgtcttcaaagcgtaaaaaagacaaaaaattgctttggaatgctcactattttctgcgctggcaataaattacatggtgaccactgaattttgatcattactactgtaaaatgcactattcttcagtatttttgtgacaatgaccgaaaagtcaccacaaaagcaaaagacttttggctatttttctaataattcatggggtagtcccaggatttggcttggaggaagtgccgccgcccagngcgaccagctttttttttttttttacttttcacatcactttttttttgcggcgttttttttctgaaaaattttcgaggaatg

SEQ ID NO: 15050 - DNA, 2252 bp, Heterodera glycines
tcggtctacgtcagtggggcccccacgtttgggccccagcatatttttccactataactttcgataacttttttctttgtcatcgaaatctaataaacttggtatcattcgaaagcttaatatatagaagctttttctaagctattgcttcgcgattagacaattaccaaaaaagttatacaagaaaattgcaaaaaagtcaaaatttttgaattttttcttaataaatttttttcacgcttgaaaatcttttcgctttttgtaaggctagtagagcatgtgaagggctttcgaataatacccagattattggatttggatgccaaagaaaaaagctatagtggaaaaacatgctggggcccaaacgtgagggcccaactgacgggttccgacctcatttgattaattcaaacatgaaaataattaatttattgtttttcataaaatttaacaaaaataagtaaaagaaaaaaacatcatttcaataatacccaaaaaaaaaataataataataatgataataataataatttggagagaacgaaagaaggttatttgtaaaaaacacataacactgaacagtcataattgctcacagaccttaaatttaaaaataaaatttgaatatttgccaatttacttttgtccatttgtccgtttttgtccatttgtccttcctctttttcactgctgtcaaaatgcccattttggtcaaaaggctgcaaaaacaactcatattccaaggtaaattatttgaaatacaatatttattttgtgtttaatgtaccatttcacttttgtccatttgtccttcctctttttcgctggtgtcaaaatgtccattttgcttctcaaaatgccaatgttcagcatttccgatttcctccttttttttttaccgtattcacttgcattgtaccccccttttgctgtgatttgtctttctgttcacaatcctccgtatatttgatcactccaaacagtgcaaatgcacatggaattgcaattgcgacggcgaaaagtgtccaaaacagagaattgctgggggagggaatctcagggagggggcggtacggtatgaggggtacgttaccccccccccccccccctccccgccaaaaaatgggtaaaatttatttaggaaaatgaaataaaaagttcaattggccaaaagagctgtgcccatctccaaaggaatgccttcgccttttttacctcgtctcttcttctttccctgtgtcagtcttttgctgattggcattgatttttacgatggcattttccgtttcttttctttttccatttggctcaaattgtcgttcatcaacggaatatccgcgcaatcgcaacagttgcacgatggaaccattgccgagcaaatgaccttttgtggtaaggaaggaccgattaatgagtgagagtaataaagctatttgagagaggagagagagagaaaggaaagggagagagtgtaaagagggtgaggcgagagaggaagagtgggagggagggagagagagaggagagtgggggggggtgagagagagagagagagagaaacgatcggtcctgccaatttacttattccaaaagcgaagaaagtgcgcttctgtgaattctgttcaatcaactgaacgattctcgcaatccatcgttcgtttctgcggctaaatatgtccgaaatgagtcgtttgttcagctgtaagtgacggaaatacggactgaataagtcgtccgcccctttggtcgctcacttcgcttaatttctccgtttttgccttcgctcccggggaaaggaatgctcggccgattaagtcgtcctccgcttcgaactttccgcaattgtacagtccgatgctcgtcctcgttgaacttttcttcagcaattcgtcgtccgctttctccgtcatttgcaattcgtcgatgagatggcttatgccaaattccaactgaatgttcgtcctgaatggcctttttgggtggtgtcgccacctgctgacggccaagtgagggcaaataatcgcaaagttcgggcacgtgctccacaaatgccaattgcttcgcgcccttttccgcttcttcccttagtttcgagtccatttcaatttcacttccattcgctactgaagacaattcgcgattggacagcacatgaagcatggaaggcagaagccattcggccggcatttccgcccattccatgccgaaaagggaaggtcgttgtttgttgtgacggaaaactgcaaaataaa

SEQ ID NO: 15051 - DNA, 1506 bp, Heterodera glycines
  unsure (1)..(1506): unsure at all n locations
tttctaatgatcattttatttaatttatttattttttgctattcaaattgcccttttttcttacgcttttgccgaatgattcgcggaatgagtcgcggattcggtacagaatgcgtgccctccccggccgcgtttgtttgtgactcaacggcatttttcgccgttcgcgtcgctccatcgtcggcggcaggccaaaccgtttcaaatcatgtgacgacgacattgaggaggagcagcaggagatggaattgcgcgagtgggaaggcgtcaccccgcgactgatcagcgaccgaaacagcggcggcgctggcacggcgacggacggagttccattgccaagctgatcaaaggaagccgagggacggatcgcagcaacagcagcatcagaagcacaagttggagaaggacaaccagaggaatggccgatgggcagcgaaatggccgagttgcccagcgacgcctgaaccaccagcgaagggttttgttcctctgccgaatgtgccgtacatccatccccgctgctctctggaatttcctccccattttggttctgatacgtgctgaagatcgtggtcgcttccgccgctgtttctgctgctgcatctctcccacagttgctcggctcctccattttggtcgaggacagctccaaaatgtccatcagtgggacgtggttgagcaagttcagctgctggttgttgcagtgcgatttacatcgccatttggccgaattgcaaatgcgcaaggagggcacagtccgggcaatggaccgtttgaacagctggcggcgttcggcactcgtataagtgacagccggcggcaaattgtcattgttcggcaagcacaacggatgcttaaattgggataagtctcaattctagattctgacggagagcatgcgaccgcttttgcatgccttaaatgtatgtgccgaagtgcacggattgttggcggcaaaacggatgagtcggctggaaatgatcacatagcaaaagacgagcacagtaagtgggccgtagaacacgaggaactgcgaatttattgtacatatagaccaattaaaaaataatgggataaacaaatgaatttaaaaatcattgaagccaaagcgatggaaagggagcaaaatatgaaatttttaattttttaaaaatgcctttttttccaagaatggtgttgaaaattattcaaaacttttataatttctctcactaaaaacaaacttaattagattatactttttctggttttcgaattctgttcaaatttcatttcttttaccctttttaaatttatttttaaaattaaaaactctaccaaatggctgagttcgtaaatgttttggattaacggcttcaaaatgagtgttgttgaccaactgttgctgttctgctgacttccttccgccatttctgttgcatttttggacatatttttctgttccgacaaatatcgnctcgtagcggtcaatgctcccaatctgaaaaatttatttattataaaata

SEQ ID NO: 15052 - DNA, 2080 bp, Heterodera glycines
tctagagtcaataggatttaaaaaagttcaattaaatccataatcattcattttctcgaatattcgtgtcaattaattgtgcgctttgtcttacgtccgtgcattggacccatccgtgggacgttgtgtctttgaacggattgtacgttgtccacacgaacagctgaggcagtgagaagagcagagagaatgtccaggccaaagtcagcattagccggaccaaattgagctaaagcgacaagacactaattagcaaatacgacatttttgaacgataatttaaagtttgaagaaattgttaattatatttatgccagaaaagggcatatttgtctgtctaatttgtgaatataaataatccataataaggaatcagagatggccaaaatccaatgtatattggaataaaaaaacaattaattatttttttgttctcactttttgctgtcccaagtccatccgctgcgcggtcagcacagtgaagaggcggtcgagcgcgatgcaaatcacaatgttggaggagaggtacagcgtgaacatggacaacaaattgaacaggcggcacagcgcgtcgccgccccgccaatcgtaagtgatcagccagccgagcttgccgctggcgtggatgagcaggatcaggatgtcggacacgttcaggttcagcttcagcagcagaaaaccgctctaaagaaccgcagacttttttttgtagccaaccaattaattagcaataattaggcccatttcagaatttaaaaatccgtaataaaattgtttctgcactaagtccggtcaaaactcttttttctgtttgggcttcgcttttcccggcttttagtcttgaaattaggcccatgatttttgcaaaatgttcatttgtctgctcctttttcccaccatcactttgttgctcctccgggctcgccttcgctcaaccatcagtcgtttaagcacggaaatgttcagtgccaagccggcacagatcaccaggcccagataagcgatctccacgtagtcgctgaacaaatgctgcggtggcatcacttctgtgccgttgtcggcgtcggcaagcgaatcggtggtgccattttgagcaatgccttcattattcgacacatcatttaatggcatattttatagctaaaataatgcaaaaggaatggacaaaaatttgtcacaaaataaaagaacggaaaaagggaggaaaaaataaaaatattattaaacaagtcattaacaaggatgaaaatgtaaaaacaaaaaataaaatataaattcaaaaagaaaaaaccagttagaattaattatgtttgatgggaatttatttttgcaaattgttcccacgtgctccaaagtcgcttaacagtcaaaaatgtgaaacttaaaccaaataaaatcagcgaaaataattttgttaaaatctcaaaattatttaaaggataaagacaattaattgtgaatattttcacaaaataaagtgagccaatttgtctgctgtagttgttgataatgatgaagcaaaaagcgaaggcgaaggcgaagtttggcaatgaaaaggaaaagcgggcaaaaacacaaatgcgtgaccgccgtgccaatgattggggacaaacagtttaagcttaccttcccccccccccctcccgccccccgcgcggcctctcacgcggatttgggttttacgctttaagttgctacggcgaccccgcggctgcggtggctgctcttctgtcttctgtagctcctcacaaaactcaattccatcgtttccttcattattagccacttaagttttagcgggctgtccccccccccccccgggcgggggtgcttttgttgcattttttatggtggcaaattgcaccacagtttttgatgaaatatttgctatctttttttaataaatatttgccgtataacaattgcatggctctcactcttttgtcagctgattattacttggacaaaaatacttgaaaaacaaaaactctcacataaaaatgagtgaggagaaataaaatccaatcagagagacagacctattgacatatatttgagaacaaaataaaagaaattaaaa

SEQ ID NO: 15053 - DNA, 2093 bp, Heterodera glycines
aattccaatgcctactttctcttattatttgacaaaattgcttaattgtgattgaagaaaatgaatggctgttgaatgaccttcccatacccttcaatactaatcgcacattcacatcgtttgattttttgggttattcccaaaactcatcaatttatttgcctattttcctttttctttatatcggcacaatctgtccccctcgggacggcatttggcattactgatattgatctcggattgactttgacttcattttattcaaatatttggttcttttattcctttgatcatcaatatatttagctaattactctacgacataattattctgagctgtcgtcagaataagtggttttcgttcttctggtgtctttttttcattttacttgtaaattaaaaattaaacttctaacaaatactaggtccattcacgttctatttaaaaacatatcaaattgtaataatcattgtgaatatctgctcgttaaagtaaaaattagataatcgaattaaattctaaatttcaatatatgctctattttcttactcattttctacaactattatcggacctttctctgcacctcaaatcatgtagtctttcttttattttttctttaagagccgaaatttgcagtaataattccacaaaaaaaatttaaaaaaatttttgtttacagttttaaaatacaaatataaagccggattattttaagcttccgaccagaaacgtatcggattctttaatgtttttccagttctattaatcatatttctccaataattaagaaaaacttttaattaaaaggtattgttatacattattttgtctttaaattctttaatattaatggattaaccaaaattatctatttgctcttgtttaaaattatcattatttaatagaaaataatttatttaataaacctttaaataaaatattttgaattaacgaactaaaaattcttttattgtataattttaagcttatatcttcattatttaaatattattttataagtgctagtggggagcaaaagataagaaaattttttcttaatataagtttactaaattgaagtttgattttttcttttaatttaatcttgaacttaaaagtcaggttttcacaaaataaaatttctcttcgaagaatatgttttattttgtatttcactttttaccgaaagattggcgattacaggtttcgacgatcggtttatgtgccaaatattatttgaaattatactatttgttagttattcaaaacaatttaagatgatcaatttttttaagttttaattagttattaaattaacaccgattattattgattttgtgcgtttttatttattttttcaattaaaatattacgcaaaaaaccttttacaaatctaagcacttttcgcgggtttaaatcttggtccagacatgtaatttccatttttataccaattcttttattcctttaaaatatgtataacccgaagatatataaattatgcttatattagtctcttttttataattttgatgttaataagaagaaattttgcaattttgatctaattacttttgtattaggtataatattttatcatttctttgactcgttgactttaagtttcgcggaaacaagctccttttatagtccaaattgtcagatagttttttgatatttctttccatttaattattttaattaaaacattattgcttattttcattcatagattttttatcatatttaatatattcgtattaaaaatttagagtgaatttataagttatgacggtaatatatgagtagtataagggccaaactcttgttccaaattttctggccctccaccacccccccccaaaaaaaatgcagaattttgagcgtatttagccaattgcccgagaattctcaagagaaatgtaaaaaattttcatttttccccgtggaattacagcgcaaccgtacccccccccccctgaaaaattccggcccaaatttggccccaaatcaatttttcagatgtgtcaggctgcgataccttgatattaatttatttgaatgacttaccggacacttctggctatga

SEQ ID NO: 15054 - DNA, 958 bp, Heterodera glycines
cggacttcaccatgcagaaggagtcgacgcttcacttatctctgactttgattggaggagcacgcacgcgacgtcagcaatcacaagaggtggcttaatggggtttttctctttttgctcgccggaaggcgggcgttttgctcgccggaaggcgggcgttttgctcgccggaaggcgggcgtttgctcgccgtaaggcgggcgttttgctcgccggaaggcgggcgttttgctcgcgggaaagcgggcgctttgctcgccggaaggcgggcgttttgctcgcgggaaggcgggcgctttgctcgccggaaggcgggcgctttgctcgccggaaaaatcgtcatcgtttataccaacagcccctcaaaatttgaaaacgatttgacatgtgagaaatttccaccacttgccaaaatatccgagtccgactcacagactctgtttaaaacagccaaattgacaacagagtggtcgcagaaggaaacagtagaattatcgggcagctcggctgatttaacacaatggctcgaatacaccatgaaacctgattccactacatattaatacactatttaaacaattctttaattttcgtttaaatccaagccagaagcgacggttgtcacaatacgcggactattacagggccatagcacgcgctcgcagtgagaactcagctcggcaaaaacttcaacaagggagcggaattgcccttggtgctattcttgtgcctgttctcagcgttttagctcaacacttgcttgaaaaaataacagcataatgaagcacacaaagaaaatggtcatggttccggaaaccgaatacattgcgcttatgaacatagtgaagagtacgggtagccgaggcgatcctatacaagatgaaaaaacatcattagactcaaatataacataaaaatttgaatgataaaacaatccgaagctgatatttaaaagaaa

SEQ ID NO: 15055 - DNA, 954 bp, Heterodera glycines
attattattaatatttgatgtataaaatattgaaataaaataaaaaaagccatatttataataatatattatagatttttatgaaatttccattatatgggtgatagcaaattttatttacgttatttgtgggcgtatacatacgtatgctaatataatttgaaaaatgttgacactcgtaatgacactatgtagatttcaaggtcgaccaaacttgcacttttagtcagtcgattcaccacggatatttaattttctaataacataataaaatctattttcgttacataattttggatttaatgattatttattccaaaatgatgaggataaacattcccgagtagaatgttatatttgtttatcaatttaaccttattaatggattgcaaaatatgttatggcatattcattttacattgtttcaaagaattgttttgaataaaattcaatcaaactaccatttcaaaaaatgaataatgaatgaactctttgattattagtacctaagaagtaataatgttgaaaatctttgactttcttttttttaatgtctatttaataattatttgtcttatttgttatttaaaaatttaaataattaaaattttttatatttattgacctatcttaaaccgtatttcttattttgttgcagcttaatacgacttatctgaatatcgttctttaatttttaaaatttcattatttcaatatgtgtgttttcaatagtttcttaatcctttttagtatgattttgacttaaataataatttatttttgtaatgatggatccatatttaaatagtatattttatatttaatgatgaatgaacaattttttgttaaatataaatttatttgcattatattatttgatcagtttgaaaaaaatttcatttatataaatccgattcgctcctgtaaattatgattatgttgaaaatgtatgat

SEQ ID NO: 15056 - DNA, 1686 bp, Heterodera glycines
aaattcgattgctgtgctataagtaataaaatttatatcattggactagtttaatgcctttttataattacaaagttactgaattattttaaaatacggtaattgtccattctgaactcgttttgcatattcacaaatttaccaagttaaaatttaatttccattacggtacttatccattctgaactcgtttttcccaattcataaattttttaatttttgggaaagtattacaacccaatacgaattcactgatcggacagtacagaaaattggcagagagtgcgtgtgtgaaaagtgattgttagattgttaccaaaaaaggataagattgacaagtgaattgtggtccgagtgatcacgatcaagagaaaacagtaaaaaaattgtgcagaaaagtgagtgtgcccgctgaattgtgagtaatcacggcatcatttggcaaacaaattggtgttagacagagagtgtaccgtcccgactgatcagagagtgatcagcgtttatcatacaaaagaggccgagagggcgatacaattacgatacaattactgtgtaaaatcagtcagttccgaccttaagtacaccgcgggtgaaatcagtgaccaagtgatcggagaggcatttttgccgatcaaagtgtgattcattgatcagtaaggtacaaaaaaggggtttttacgcaacaattgttccgattcatataactttggcttaacattttaataactaaatcaaaataagtcacactcctgattaccttgaaaggcgtttcaagcaaaagccaataagtgatctcgagcgggtaagacggaagcttgagagagaccgaaagaaaaaaagtgaagaaaaattaggagaaaaccgaaatatggctgatgatgatttagaagataaatatgtggcattaaaggcaaaggtccaagacttagaagatcgtttggccaatcgggtcccgaattatcttcccccgggagttaaattccgaaatatgatgcgagcggtgattttttcaagtttttaaaagaatttaatgtgcttgcgacagcgagcaactggcatccgccggattgtgtccgctttttacctctgtttttggaaggggaagctaaggaaatttaccagaatatttcggcagataagaaaacaaattggaggacccttactagtgaaatagcggaactgaccaagaaacttgatggaccaatgtgggcgagaaaaatgctgaataagacgaaaatgggaataaatggatcagtaactgagtttgcgaataaaattcgtgagttagttgagcaggcaagcccggacccgaactatacagatgaggcaagagaaagtgagagcgtgcactattttttgaatggattaccaaccaaactaaaacggaaattatttgttatggaaaagcccgatagtttaattgaggcaattgcgcaagcaaaaaaggttatccaagtgaatgaggaaattgagaaagatgaaaaaggggatgaaatgaaacaacaaatagctgagctaacggaacaagtcaatgcgatttcgttccagagtaaagtgaataatgagagaaatggtcatgaaaatggtcgcgaattcgtgaatccgacgtggagaagggatgacagaaacacagaaagaggaaatttcagggggaatagagggaatattggagaagcacccaaa

SEQ ID NO: 15057 - DNA, 2762 bp, Heterodera glycines
ccaaatttatttccattgggacaaaatcggacttggaatggaaattttgaaataatacggggagatttgagaatttccgaccaaagaggggaaattttgggaatttccgagggaattcaagaggaagaggaagtgaaaggcaaaaatacaaaataaatgcgatttcggatgaggcagctcagccttcggcatccaactcccgaaggtccctgaccccgacaatgacatttttgacaatttcaatgattctgtgctcatttttcgggactatttctggtcaataccaattatgttctgatcgggttcccaccacacccatttggttaccaaacgtaacggaatgttcagtaccggagtgccaaaaagctgaagagagaaaagttacactttttttacctgtccgaatgccaaaacaattctcagtttataactgctatcagaaaatgatgaaaatttgtacgggaaattttctttttttctggaaagacataaaaattctggattcgtacgtgaagggagtaagtcaccgagcttgtcagggatttaaaaataacatgggacatacaatgaagagattgacagagaatttatggacaactgagaggccttcaaaagttgaatatgcatggattggtgaaagatgtgagacaacagtgaatgatttcattgaaaaaggacaaggcggaattctggatttttatttggtaacatcgtttggatataactttaatccgtacaacggatgggaagaaggacaaaaatggacatttatttgggaaattccggaaccaagtgaggcttattgggcaactcatttccctgtcggtgattttgtggcagaagtaacggagaacgcaattgtgttagaaagcgaacaaagcgtgttttattttgaaaaagaaaagggcgatgaaagagagggtattgttggcgtaccagacgaggcgtataaaatgtcaaatgacgttttcattctaatacacactccgagtccacaaaaagcaagagaaaaaagggaaacaaagcagaaaagtgaacctcagagaaaagagcgaccagcgaaacaggaagtgtttctgaaaatcaggccggatcaaaattcaaaatttgagaatttggacccagcgtccagacccaaaagcaattggacacggacaactttgggaccaaaaaggaacacaacggagctaataattttgagtaccccggttccccagtccacaagcacagtggggagtacgacaaaagtaaccatggcaattccgaccaaaattattacaacacggttccaacgactataaggcctaagacagaagtcaaaaaaccaattttcgagaaaattcaaataaaaaatgagcaaaaattcagtcagtatacaaggcagttgggaaaaaggtgaaacaattggtagctacgacaactaaagctccttttacaacgactaaaaaatcgaaaattgaaaacacactgaaaaaggcaacaccaaaaccaaaaattgtgggtttgaagagcacaacactgaaggttcttagcacagttagaccaagcactaagaaagtggtcagtgagctttttccaaagtcagctacaactccgagtacattttggtagtaaaaagcacaaataattccaaaaaattttctaagcatgcgctggttaaaaaaccggaggttgaattggaaaaggccacaacagcaagtctatttccaaagacaattaaacacaaacaatgaatgtgacagagattccagcacgtatgactccaattcctccaaccactcaaaaaattgtggaaaagttggaattgccgaaagagaaaggggaaaagaaatcagacagcattaaagctgaaaagaaaatgaaaagttattaattccatccacggcaattacggttgtgaagaaaattgaggacgaaaaagtaagagatgtgtcggaaaagacagtaaagaataaaaagagtgaggaagaatacagtcaggaagttgaagctaaggtcattgagagcttagctaatgatggcaatgaaatggaagaattcgaaaattcattcgaggatgaaagcgatgaggaagttagtgtggaattattcgatgagaatgaaatcttcgacatggaacgaagaaaaagaacgacagttacaacacctgacgcccggtggattaaaaaagttgagaaaagcaaagtgtgaaataaagcaggacaggaaaataagaatttgaatacgcgagtcaattatgcattgtatcgactaaatgaggagaaaagaaggcaatacgatcatatttataaacaagcgtgcgaaaatactaaatttcagctacaattggccaaagcggttttacaaattaatccaaatgagggagtcaaaaaatatttaatcgagacgatttagtggcacgatggaaaggagataatttggaagttggtttttgtgcgccggttataccagaaaaaatattctgggatagaaaaatggggagcgattgttacgaatggataccaattttcgcagaaaatacaacattttttattcggccgggtaccagagaattgagcattataggcaaaagaatggagtgtacagaaatggaaaaaaccaataatatgaacaatgcgacacaaaaggaaattgttcaaaaattaactgaaaatttgggaaacattaaaccgaaatacagaaacatacaaaatcctttggtcctgagagcgggagcctttttgaatcggacagcttacgtttagaagaagcgatgcgggaat

SEQ ID NO: 15058 - DNA, 1433 bp, Heterodera glycines
tttcattgcggagagtgaaaatattatctattatttattttttcaaaaggaggctttttgaacttaaattaggcaattaaaaattttcacttgacatccatgatttgagcattaaaacaaatatttttttttctaatgagcaaattaatttttgctttttttatattattttgcctaatttttgaataggttccgaaaacctggcattcattcctttttggtggttttgccaattttactgtttttcatttaaatgtcttattatgtattggccctttacaatgggcacttttaaattttatcccaatgtttcttcgtcgtttcgatgttttataattttgcattttttgccaaaaaaattcttaatgaatttttccactattttctttttcttttttctgctaaacttcaattcggttcaaccatgtggttggctgaaaaatgggcccccacggtgattcaaaggccaatttggacagactcggcaagttacaatggcctggtcagtaaatgaataattttgaattttatttaatctaaattatggtgacatgacaattcgtaccaaagcgtacttgcgccaatggtgtttcattaattttttaaaatttttatgcattattttgtatgagttgatgttgaccccatcttcgtggcatggcgcatgtgaaattgttatttggggacctctatatttaataattcattttaactcaaattgacaaagttttaaattaacttaattaatctcaatcattgaaaagcaagaatgattacattacaactgtcttagattaagatttgcttgtttttccttttgtacgggtgttaggaggttgctctgccaatggtcccatttcataccattagaacgcaacgatgaccgagcagcactttggcattaattgcgttgacctcgaattgccgatggacatttcacaattcaccgttaacgtctcagcaacactttttgatttatcgtgtgaagaattcctaaaaaaaccggaccttgacgaactgccggactattatcttcaagtctcaaagcggtggcaacttgatgcctgtgaaatggttccaacagtcatgagatgcaaaaagtagagtgattctctggttagccgacatttgtcgaccgaattttgcggatgattagtgaacaaaaaatgatgaattaataaataatttataattgaaatagaattttttaaaaattgtcatgaaaaaataaaacgttagcagcagggcactactgtattgctctgtgatggcagatttgctcgtttttataaaattatccaaaattgaaatcaaaatcagctttaaatttagcaaaattataaatgaaaaaactaaataaaaaggaaattaaaaaatatttttaacctaaaaaatatatttttaaaaatttaaaaattaatttattttttaag

SEQ ID NO: 15059 - DNA, 1690 bp, Heterodera glycines
  unsure (1)..(1690): unsure at all n locations
ccttcaattnnaggaattttggtaaatttataggcggtgcttagctcgtgacttttgccggctgtccccaaaacatcaattgtaacccgggccgaaacccaaaattacgccttttttgccaccatcccctgactggaaacaaattttcgtgcaagtgttttgacgaagtggaggactgtgcgccaatttccaatgcaaatttggaatgtgaagtgttaattgtaaaagaaaaaaaaataattttcataaatattatctgaaaggagttaaaatattaaaaataaataaataaattttaaatgagcgcaaaaaagtttttaattttcagctcaacggccattaccgtgaaatgaagggagagaacgagaacagcaattttgcctttgaatgcttggcaagtttttttaatcaactagggtgtgaatttattgacttatttttggttaaaacagcatttttgtcaaaaattatatcgaaaaaagaattgccaaaaaattttaaattaaataattttgaagaaattttttcaattacctaattgtttttgccataatttttaaatgtttgaaaacttccataattcagcaataaatcacataattaatcacttacttaattaatattaatcactcttactttccccccccccccaattaacagaaacgccaaggagactcatcgccattttgggcatattggaacgacaaaaacagcaatttgccaattcacattgacgatttgcaatgtttgcgttatgaggatgtgggcattgatggaccgccaaaagaaacgatggtcaattatttgctgatgaaacgcattcattacaaccgccattcgggtccatgaaaggcgaacgaaaaaacattgggcagagtgagtgccaaatttacattgaaaagataaatgccaaaatactgtttgtatggaaaaatttgtactacaaattaccaattaaaagtggcaataaaatgttaagaatacataaaacgggattttgattttaaaattaattttgcataaaattgcttcatatttattgcaaaaaaaaaaatcaatttttaaatcccacaaattcaaataactcatgctgaaaagtgagttttacgaaaattgcatttccaataaataaacttgagtagagcggtaccataattgccggtgttttttttggtaccgatatcgggacccacgcgcggtcatgaatcctgccgctacggtgctggcccttggaaagctcacgctacgggggcgcatcagagtgtatgtgcggtgtccctgcaaataatgctggacgtccttttttcgtaaatgcttgatactttttcgcgcctctttccacagcgcggtaacgcccgcgaacgccgcgggcgatgatgaactgttatacagcttgtcaagcgttgcgttgatcagctccattttttcgggcgaaattcctttttgatttttggtgccgtccgagtggttttgctctgtgacggtctctttggtggagccgtccatgaatacagaattgggtcctgctgaagcctttcttccaatatggccgctcctggtggtctaatggtggggcggcacgctcttctgtctattatatatcggatggccattcgcaaattgctatgcgccaacggcttgccgtttgcggtgttaattgtacatggtcagctgatttgatggaatggca

SEQ ID NO: 15060 - DNA, 2327 bp, Heterodera glycines
  unsure (1)..(2327): unsure at all n locations
cgtggtgtgacatttnggggatttgcaacttggggacccgacatttggggaccgaacgacatttggggatccgaaatttagggaacccgacatttggggatcccgacatttggggacccgacttttaaggacccgacatttggggaccgaacgacatttggggatcccgacatttggggacccgacttttaaggacccgacatttggggaccgaacgacatttggggatccgacacttagggaacccgacatttggggacccgacttttaaggacccgacatttggggaccgaacgacatttggggatcccgacatttggggacccgacttttaaggacccgacatttggggaccgaacgacatttggggatccgacacttagggaacccgacatttggggacccgacttttaaggacccgacatttggggaccgaacgacatttggggatccgacacttagggaacccgacatttggggacccgacttttaaggacccgacatttggggaccgaacgacattttgggattcgacacttagggaacccgacatctggggacccgacatttggggatttaactaaaacaaaaaaaaatatttaaaatttaattttatgcccaaaattagacaaaaatacgtctgctttagccagaattaattccattgcaagaaaaaattaaataatatttttaaaattaactctgtttccggactcaccgcgaggaggtagcaggattttgagcccatgctaaccacaacacaatagacaaatcacaatatgttttatgttcagtacacctctctatttttttttaaacgcctttcccaagggccacggaacagaaattcgtcaagggcattccaaaagttccagacgactttgctgtctaattgcgtacagcaacaaaatgccggaggtcatcttttctgttttttatctttcgggtgacactgtcgggtgcttttaattaagttttttgtgactcccttgtaatttaaatctgaggccgaatatttagatacatccaccactatttcacttaaaaaaatttcaaaaaatttgatcgtccataaataatttgtaattgatcaggggctcaccaaattttgcagggatacgtatcggaacactacaaatgcttactaatttttctagattttttaaacccggtgaaaattttttgcagacacccaccactttttcacttaaaaaaatttcaaaaaatttgatcgtccataaataatttgtaattgatcaggggctcaccaaattttgcagggatacgtatcggaacactacaaatgcttactaatttttctagattttttaaacccggtgaaaattttttgcagacacccaccactttttcacttaaaaaaattcaaaaaatttgatgaattaattttgctaaaaaataaaatagtgaagctttaaaaattaataaaaaattttaaattcagaattactggagttagcatcatagctgtgcttttccttgtctttttgatgccttcgcaaaatctggtgcgcttctgatcagttttttaaaaaaaagttaagcctaaaatttttcgcatatttaaaaacaattaaaaatttttagattttttattcatctccctttttgatagagaaagcatcagagagccttatttaacatgtaaataaaatttggtgcgtttaagagcactttctgaaaaaaataattatgaattaattttgcaaaaaattggaaaagtacgcaaaattgcaatgtctaaaatttttaaagaaacattatgggacagttaaataattatatgaataagcattattctcagctgttaccctgcaaaacctggtgcgcttctgagcactactcgaaaaatgagtaaattaattttcactaaaaagttaagcctaaactttttggcctgtttaaagaggaattaaaaattttaaaaaattttattcatcttcctttttgatagaaaaagcatcagagagccttatttaacatgtaaatagaatttggtgcgtttaagagcactttctgaaaaaataattatgaattaattttgcaaaaaataaataaattgtgaacctttaaaaattcataggaaatttaaattcataggtactactgctaaatcaacgcagagacgcctttccttgacctttttaggctcctgcaaaacctggtgcacttctgatcactactcgaaaaatgagtgattgaattttcactaaaaagttaagcctaaattttttggcctgttttttcttgcaaccaaggtactgactcggccgcttcgcggcctcgtgggggggcctccggcccccccc

SEQ ID NO: 15061 - DNA, 2019 bp, Heterodera glycines
tcccggtttccatggtttcgacctcagaattttttcttccacaattttcgttacttttgcaaatttattctgcttttcagggcatcattttttaaatgcattcactttggtatacggtaactttacactattgtattgaaatttgaatcatacataataaatggtgcacagtacacagacagcaattgactccggcacattttgacgtcgctccaacgggatggaatcaatgtcgagccctgtacaattgaacagacgttcatactccgaatggcgcaaaaagaacagttccatttctgtaaaataatacataaatgccgtaacttagaactccatcatatattttaataacagattttcttctgacgcattttgtgccaatgccaaaaattaattgtcataagccgaaaacatcaaactgaaaacaaattataaaaagagagacaacaataggaaattacttaaatccccgtccatttttttttaaaaaaaatttaatattttcgctcccatatttgggtggacttatgcaatggtttgatggttgtgctaatacgtatgttaaagatcctttttattatattttttcactaactttttgaaaagaattccctaatttcctactaaatccgaacataagatcgatgaaatttttttattcgaaaaaatgattgttttttgctaaactaagcagaaaaaatccatggaatagctaacatttatcttatgagaacccctatattccggtttgcgttaaaaatttaagtgatgcgaatcaaatgaaaaaaaaagtttcttaattagtgatgccgcatgggacggacacatgaaacgctgggccaaaacgcactttaaacgaacagaaaacaatttttggaaattgtcgaaattcgaaattgaaaattttaataaatataggtagtcatgaattaaaatcagaaaatcttaactctaaacttagccgaaaatcggacaacttaaggacaacatttgggagccccgtcaccttttagccatttaaatgttttaacaaaaaaaaatttgcgcgatttatgtctgtattagtgccaaatttgtgttcagcgttttgccaccatttttcagtcataaaattctcgaaaattttcaggtgcacgcctaaagaaacaaataacatattaagattttaaaaatttttctaaaatatgtaaaatgggtaattttgtactgcaaaatttgaatttcgcctaactattgtcgtgaaaaaatattaaattaaaatagaataacgtgaaaattcaatttcatttttgtttgacaaattaattaaaaagaatgatgaaaaaaatcacctgccaaactgattagtttattgacaaattaggaaaatgccttcgcacatgctgcttcaattaatttaattagttttgcacctccgactctcgggaggggggggggggggggggaagaaaagtcggggagaaattactaaattcattatttttaaaacaatctcattaagaattatgaaaacagatttagtaattgtcacaaataaagtttgctaaaaattaattaaaataaatattttttaagcaattttattggatataggccgaaagcttacgcactttggctcaaatatttagtttttttatgagactcctttttttattttaatttcttgggatttttaggttttttgaaaactattggcattttgtctaagcaattttaatcaatcgtttgactcaaaaacttcatctacccagtttttaatacataatggcacaacatttaatttggcgaatatttcaataaaataaaaatcggaggaaaaatgagaagacaattaacatcattaatcaaaaacaaattaaataaagaagtaaattctgagagaaatttaaaaacgattaagaaaagtgcttttattttctactaaatgagtccgagtggtgagttatgacgtgccaaacgttattttatctcaataaattgaattaattaaatatgtgagttgaagttaatttcggcatt

SEQ ID NO: 15062 - DNA, 1538 bp, Heterodera glycines
aaaaacgcatggtgaagtttggctgtacctgagaaggtatgcgctctctacattgcgaaacctgggcatgggccgaagccgactgagtgatcaagtaagtttttggattattatttttttagggtttgtcccagacccgaggcaccggggttttttttgccgtttttcttagccccaaaaaccgactgtctactcctgtcgataatatccttaacaaatgaacggcataaaatattcaagccgacctcattaaccctcattttccaacttcgggtttggcatatgactgaccctgattttttttttggcatttgtaaccctaccatgccgttctcaaatgatttcaaatgtcgttagccgaaataccgaagcgtctgggaaatgcttcatacaaaggggcggaatgcaacatgcttttttctcttttttggcatttttttcacggtctcaaataatttctaattacgttagccaaaatccggaaccccgaagaagcttcctacaaaagggcggaatgcacttaaattaaaattaaattttaatggtttttagatgctaattggtctacgtgaagtgtcggctaaacttcgttccgacatcaaacagaatggtccgtgcaacattgacttgagcaaactgatcagtgtgctcaacggttcctccattagcatgcttttgtttggccacccgcttgaagaggcaaataattagcgttttttctaaaacaaatagcccataatgttgctgattaattaattgattaattaacaatatataattattagagttggacagtaatagactccagcatattgaaaaaggcaaagaatttcaaaaaatccaggtccaggtctggatctaggtcacgacaagccttgctttttcctggatttttgtccaagaaatccaggtccagatttttttttaaatttttgtgtttaggaagacatggaagacttttggaaagtcaaagagcaaatcaccattcttttcaggatgttctcatggtaagtgaaaaaacatatttttgtacaatgggtagagaactcatgtcaaattttgaaatttttttgaaatcacaaacaaacatataccctaattaggaataagatcactaattacaaaaaactgttatttatttaaggtggacgacacaaattgttgcttcatcgccactttggtatggaaatatgactagacttgggaaattgaaatttttcaaatttctgcactgttttttcaacaaaattaatcaaaattagctatttttgggacaccatttttggcataaattttgcaattttcaggtggcttcgccatttcccacctttctcagcaacatttaaactgatcgatcaaacattgactgcagcatatgatttaattgacaaagaaattgccaaaattgtgaaacggcgccaatttgagtcgaatttatgtgccgtttcgttggtggacgactttttggatacaattcaaaacagcgatcagcgcaaaaagaatggcacaatgccattggcgcaggacaaacattttca

SEQ ID NO: 15063 - DNA, 2819 bp, Heterodera glycines
aaagtcgcatagacattaaacatgcacaaagatccgcgaataatgttttaaataagacaaaattttttaagtaaaaaatttttttaatgtacctatttagttgaaaacaaaatttatttctaaatttaaaaaatatggacacttaacaatttgtttttaagtgtatacaatttttaaatttactcatttattaaataatatttttaaaattatccctttttcaggggacaagtacactctgttggacaaccatgaccaaattcagtggcgcgtgcgcggcatggacgacgttgaggttgttcaaagaaaaattcagattttgttgtcctaataaaagttaattaaaaactttagttaaaaaatggattttttaaattactattttaatttcaatttaataaagtttttctgatttttttggttcttaataagtttaattaaaaaatggatttctagctttaattaaagatgaagacttgctggcgtttctttttaattataaatgagatagtgatcaatagtgatcagatttcgaatttgatgcttttgaggtggtgtcaactccgggaacaagcggcgccacgggtgccaccgctgtgtcacaactcattgaaggtactaacgcttgtctttgacacttcataaaattaatcgtaattgtgaccaaattgaaatttagaagacgaggaaaaatgtgcccgttgtgccacagcatcagccactgtacgaaggattgtaacaagcgttgaatccaaagaattattttattttcatttgtgcgtttgttttgatgtgttaagcataaaaatttttcattttttcgtgcctattaaagtgcctttcacgatttttggtgcctaaaaatttttgaaattcttttttttaaagggagcccactttggcgattttttgaaaaatttggttttttacaaaaatgtcttttttggcactcaaattcggtaatagtatggtttacaggtcccacaaaaaaaagaggcaaaaggggggttttatgcaattcttcaaagtcctttagggttctcgagggcgctgatcacgaatataatattcatttcgaccaatttcgaaccccgaacccgaattcgaacaatttttttgttacttttttttgacttaaaatcaacgtcaatattgaaaatttaaaaatgaagaacaaagcaatgtcaggcacccaacgcaatttgctgccgggttatatggacgaatacatgtggcgccaatttaatggaaaaaacaattgcggcctatgaaaacatttttgaacaaattgctcaattttatgttgtcaatgcttgagtttgtatgcatatttaaatgcacacggcgattcaattttgggctccaagtacaaataagtttattatttatttagtaatcagaacgccaaaactttgcaaaacttaaaatttattggggattttcccttaaaataaacttgaaatcgatagagggggtcaaagtatgggcctatgcaaattttaaagaaaatcccaactgtagaaaaaaaaattcaactagacaaagttttttctttttctctcattttgacgcactatttccatgtctctaacatataaaataacacatggttcatttttttgtcaataaacaattttttttaacttttgactaattaagaaatattcttcagaattttccctccaaaatgagcataaaatggttttatttggtctattattgaaaaagttataagctaaaaaaaaatcataaaatcaagggtaaaataaaatgtttaccttttattgtttgtatttgttcttttggcgttctgtttttattattttttaatttatttgctttaaaaaaatgaaatttatacacaaacacaaagaggatttgaacctgagacccactttttggtgactaactcacagaccactaagacgaaaaaaacaacttaattgtacttggagcccaaaattgggccgctgtgtacagaattgtgtgttatattccttatttgctaatctgaaacaaaaggaaaaaacttttcatagccctttaaaaagcaggagagccttaattaaaagaacttttatgaatgggtcaaacaattcgctttgaaattgcattgttttcccggctctagtgcactttatgagtccaatcgacttttatgagtccaatcaatgggttttatacaataactttgttcatgcacgaacaaaccctgtctttggtatcattcgaaaatacaaagtctaaataatgtaataatacgagaaaacaagaaaattctaacatttcaataaagacaaacgaaaatgatcagcaattacttaattaatcatatcttctttggtaagtgtctaaacgctgcaattttatatatttaagcttcgttagactgtgtgctttcgaatgataccaaaaaaataggtgttgttcaaatgaacaaagttattgtataaaaaccgagtattttcaattgattggactcataaagtgcactagagccgttttcccttccaaatatttctcaggtcgcacttcgaaaggccccacaaaacggcgccgtcggcttcaaacaggaagtgaacacaagcagaaatgccacattcaattgggctttaatttccccaaatcgttcgcaggtgaacaaatgggtcgtgctggtcaaattgctcatcggcgaaatccccgagcgcagtctcttccgcacggccgaacttcgccacgtgttggcgccgtatttgctgctgacccaaagttggttttatgcgcggcgaatggaaacgcacatttggacatttgagtccgggttgtctcataattgt

SEQ ID NO: 15064 - DNA, 869 bp, Heterodera glycines
ttcataattgacaaaaattttgccaaagtgatcgcgccattgccaattcaataattcactataattattccaaatgaaagtgatcacgcaattgccaattcaataattgacaaaaattttgccaaagtgatcacgcaattgccaattcaataattcactataattatgccaaatgaaagtgatcacgcaattgccaattcaataattgacaaaaattttgccaaagtgatcacgcaattgccaattcaataattcactataattatgccaaatgaaagtgatcacgcaattgccaattcaataattgacaaaaattttgccaaagtgatcacgcaattgccaattcaataattgacaaaaattttgccaaagtgatcacgcaattgccaattcaataattcactataattatgccaaatgaaagtaatcacgcaattgccaattcaataattcactataattatgccaaatgaaagtgatcacgcaattgccaattcaataattcactataattatgccaaatgaaagtgatcacgcaattgccaattcaataattcactataattatgccaaatgaaagtgatcacgcaattgccaattcaataattgacaaaaattttgccaaagtgatcgcgcaattgccaattcaataattcactataattattccaaatgaaagtgatcacgcaattgccaattcaataattgacaaaaattttgccaaagtgatcacgcaattgccaattcaataattcactataattatgccaaatgaaagtgatcacgcaattgccaattcaataattgacaaaattttgccaaagtgatgccgcaattgccaattcaataattcactataattatgccaa

SEQ ID NO: 15065 - DNA, 2802 bp, Heterodera glycines
aattcaataattgacaaaaattttgccaaagtgatcacgcaattgccaattcaataattgacaaaaattttgccaaagtgatcacgcaattgccaattcaataattcactataattatgccaaatgaaagtaatcacgcaattgccaattcaataattcactataattatgccaaatgaaagtaatcacgcaattgccaattcaataattcactataattatgccaaatgaaagtgatcacgcaattgccaattcaataattgacaaaaattttgccaaagtgatcacgcaattgccaattcaataattcactataattatgccaaatgaaagtgatcacgcaattgccaattcaataattgacaaaaattttgccaaagtgatcacgcaattgccaattcaataattcactataattatgccaaatgaaattgatcacgcaattgccaattcaataattgacaaaaattttgccaaagtgatcacgcaattgccaattcaataattcactataattatgccaaatgaaagtgatcacgcaattgccaattcaataattgacaaaaattttgccaaagtgatcacgcaattgccaattcaataattcactataattatgccaaatgaaagtgatcacgcaattgccaattcaataattcactataattatgccaaatgaaagtgatcacgcaattgccaattcaataattgacaaaaattttgccaaagtgatcacgcaattgccaattcaataattgacaaaaattttgccaaagtgatcacgcaattgccaattcaataattcactataattatgccaaatgaaagtaatcacgcaattgccaattcaataattcactataattatgccaaatgaaagtgatcacgcaattgccaattcaataatgactaaaattatgtctaaataaaagattccgctcaacatttgactataataatgcgaaatgaaagtgatcaattaattactaattcaatattttactagaattcagccccataaaaaggatctcctgcagatggtgaagcaactccccacatttattccttcatcctaattgtccatcctttctttctagtcgccaccaaattgtccccccccccaaaaaatgagtcattttggcgtttcactgctcccgattggcatagggctaatcataatgctcatactcctgataccatcatccacggatggcatgaaaattacactcagagtggaaatgggtgaacggtggatagtcaagcaaatgaaggacaatccttttttcacctttgaggtggagggcacggacagtgtggcaacattgaagaagaaaatcaaggataaaattaaagaatatactgggaggagcttttcactcgctctacaaacactgagactcaacaaatttggtcttgcgcttgaggacaccaaaacaatgcaagaatatggaattaaagacgaccaaaccatcattgtttgtacgttgggtgaatttcaaattgacgtaaagtatggcaagaaaaggcattccgttaatgtgaaagacacggacactgtggcaacattgaaggggaggatcgaaaacattaaagaatttggaaacattccgcacgaaaaacaaatattgataggagacggagttattgtgtttaagaatagtgaaacaatggacgaatgtcgcattaaaaaaggcgatactgttaccgtgtcgtgggagaaatttgaaatttcagtgaaatacgacgaaaaagaaccgatcaatgtagaggtcagaattgtcagaaaaaaaatttccaaaggccttattttagaaaaaaaaatatattgaaattaaaagttagggggatgttaaatatcaatttgagggttttttcgaaaataaaacagaaaattctgacaagcaacatatatatgtatctcaaaagcttagatttgagagttagccttatttccgcccaaaaaccacaaatgagtctaaacccgcatttgcgtatcttcggacaaatttaatattaaggtgaaatttggagagaaagagtggtccgttgaggtgaaggccactgattatttgtctcagttgaaggagaagatcaaagatttgactggaatttcaatagaacggcaaaaactgcacttaaaccgaagaatgctttttggccatactatgatgttcaatgacattgtaaaaggcgataccattttcttagaagatgtgtttgaaatttccgtaaaataccaattctccattccttatagtgtatttgatttttgcaaagttgaggtgaatgccggggacactgtgaaaattgtgaaggaaaagatcaaggcgatgatcgaagaaaactgggaacgctgtggaaaattagtggaaatggagctgagaaagaacgatagatttggtgaagttttggacaattacaacgaaacaattgagaaagctggcattaaaaaagaaggagatacaatttatgtgaagtgtgctttccctccgaaatcggcttaaatataaaaaattcgacctaaagatgttatgacgaacaattgaacaatttttttccgttgcaaaacgatcatccattatttcgttacacaaatgtcccccatttttggctatctgtctttcctccaatggttcgcttttattttctcaataattcaactcataacagttatttattattttgttgaagaatttttgtttaaaaaaattatttaccgtttattctcaaattatcaccccgggggaattatttttcaatctccttagaaaggtgggggggggggggaggggtaattatata

SEQ ID NO: 15066 - DNA, 888 bp, Heterodera glycines
cgtcgacaaatttttcctgcttaatcccctctcccaaatgggactcatcgctgtgcgtgacaaacgcgccgagcgcatcagcggatttaccagtacggcacttttccgccatttgcaaatgtttcaaatcttttcatcttttattaccgcgaattgtgtccataattaaacattcattttttaaaatattctccccgtttcctcaggttctgttcaatttctgctcgaatctctgcaggacatcagttccaccaattgtggtggtgaattctctctccaatctgtcctccaatgcgctcttcactctttccaggcttttcctttgccttttccctttttaaattcgttcgctttttagggtttgcccgcccattccagcaaagagtgcattcttttgattgccagcttaaggtgataattttgcttttgattgtgttaatttgcgtcttttttcgttccgtcgatgcgtcccctctccgccacactttcgagcagctcaaaatgcgttccgtccgctgctccatcgtttcatttggtgccgaagtgttcgcatttaaacgcctttgtgcgacaacggagggtaattttttttgaaaattttgcaatgatttgacactgccatataattgtaaggcaaatacagcgttgccctggacgaacagcatttggagcttctgcttgacgaacatgtccaaccgccgcccgtccaacgccgtccgggtcagcaggactcaatcgtccgcatgggctttccccaactccgccgcgtgaccgaaccgtccttttgtgcgtggtcagtggggggcggcgggggtatttttagcaaatttttgaagaaaccccgcgaaaagagacatgctaaaattaagaaaaaagcgataaaaactg

SEQ ID NO: 15067 - DNA, 1496 bp, Heterodera glycines
tgccaagaattgccccaataaaagtacggtagcaaaagtacagtaaccgcgtctctttcttcaatttttctggccatccgttgcttttctttctcttttgacttttcctttttcacctgccgaaagtcggccctgcagttggtggtgacgatgattttggtggccaatgcgattcgcattttgcgcgctcggctcgcggtcaaaacgagcgcaaattgggccagcgacagagtccacgcgccgagcaccgccgtctgaagcgtcggatcggcgcacactgcgcacgcgttgagcagcccgacgaactcgagaatgtccgtgacgacggccgcgtaggcgagcagaatttgggtgagctcttcgcggctgagctccgcgcgcggaagcagccaacgcgtgaggagaagcgcaaggaacagcgaatggccgagcaactgcttaccgacggtgtcctcgcgcgggttgggctgcagaccgaacgacggagcggcgggggccgcggcacagagggcggacacgttcaccggagaaggaggaagcggaaggtgggaaaacgctgccgtgggacacatcgacgcgtgcaccaaccaaagcgggggcacctaaggcgggggacgggcggtcaaaaagtggcgacttttacccgcccccttttttatggaaccgcggggccatatttcaagaaaaaatgcaaattcaaaaatcacacacagtggcgaacagatacagcagcacggcgggcgagaaccatttggggtcgtcgcccgcccggacgaccaccgcgtaaaacccttcgccgaccaaacagacggcgagcagtgcgaaggcccacactgagttgtccccttgcgtttcggctgctgcccaaatgcacagcagcgagtgggccatcagcagggcgcggacgaacagtgctcgtgcgatgttcaccagaatggcggaggcggacgcgttgccgaccgctgccgcggcggccatttcgcccagcgtggaagtgcggtgctgcggacggtcgccgccgggcgaagcgacgaacggaacgccgagaggagcggcgctcaaacttctgatgaggggctcatttgctaacaatgcggaacgtcagcgactctacgcactttctgtgtgttccgccgctccctttggacggtgccgccctttcggccgtcggtggaacgccgctgccgcccgtccgactctcgcgtcggggcgcaatttcatccgccaattggctcagcgacttgcggtgttcgcctgctgctgtctgctgtcgttgttggtggtggtccacgcggaaagagcccttccgctcgatgccgccacttccgcttcggctgccgcggcgtttgtctgccgcgccgccaccgccggcggagttcacctgctggtcgagactggtgcccgagaaatacttttccgcccaaaaatactgcaatttgaaacgataaaattgagaaagataagttgcaaatgtttaaaatcaccatttttggtca

SEQ ID NO: 15068 - DNA, 2880 bp, Heterodera glycines
ctataggcaccgccggttcctaaaaagttttttgaaaaagcgcgccgcaaaaaagtggtgtgaaaagcaataaatggtcgtgtaagaaaaaatttttgagtattttttgaattttattgcctagaatttataataaatttattataaacagggttcccagatcaaaaatttcaaaagcctcatttggcagacgaaaaagcctcattttttaaagtttattaaaacacgcttaaaattttcaaatgatttatttttgattgtccatgatcaatttgagcaattttttgttagaaataagcattttttgggattctaagcatgaaaaaccgaagtagatttttttgcggcgcttttttcaaaaaacttttggggcgcaaggtgggccggcggtgccgataggcgccgccgggagaaattttgtgatttttaatacgatttgttaacagatttgtcgacaaatatggccaaaaacttatgccaatttatcaaaattaatcaaaatttaaaaaatctgacgaattttccccaaaaatcttcgaaatttatcaaaaaaccacaaaaagcctcattttgaaaatttatcctcattgacctatcaaaaaaccacaaaatgaggctaaagcctcagatctgggaaccctgattataaatcttttagctttaaatattcaaaatttgtatttttatggcggccccacaaagtgtccaagccacgaaatgtccaaaagagtaaaaacccacgaaatgtccaaaatttttcaaaatttataaaaacaaaatgagtttaatttaggatttttagggttttcggggtcgctgaatacgaatataccctttatattaccccttgcctaaccttaggcccatctgaataataaaaaactcaaattcgagacttggacatttcgtgggctggacattttgtgggtcagcgatttttataaatcagtttttatcgaatatgaaaaaaatttaaaaaaaatgcgtatccgtatacggatccgtatttttcctggatacggatttttacggactacggattttccggatttttagtccgtaatccgtatgtgtgcctagtccgtaatcccgatcctgatccgtatcttctcaaaattccgatctctatttttaagtgaagaaaatgtttcaattcatgcaaatttttaaaatcaagctttttaatgccatgcgaatcatcatttatgcagggctcggatctgtccttatttataagatttgtccttatttggagggtccaaatcttacaaaataaaaatgtccttatttgtaagatttgtccttatttcgggctattgttcttatttcttaaatatattcaaaattttgaaattttatggcagaatgtcactattttatcaagaaaatataaggtttgcgcaaaatttggttattttttgacaaaaaactgttagcaaatcgcattaaaaattacaaaatttttcccggtggcgcctatcggcaccgccggaccatctccccacttgttccccaaaagtttttgaaaaaacgcaccgcaaaaaaaagtatttttaaagacaaaaaatcgccgcttggcttttaataaaaaaattggccttttttggtgaaaatctgttaacaaatcagaattaaattacaaaaaatttttcaggcggcgccggaccctctcccctcgcacttcccaaaagttttttggaaaaatacgccgcaaaaaattgttaaaaatctgatttttttatcccgaatgcactaaaattttatgatttgctaatttcctccccaaaattgttaaaatcattaatgggagaccaaaaatatactatttgatacatttttgatcgaataaattttaaaaataactgatttgaagcaatttttgcgaaatgttcttatttttgaccctaaaatcttattttttggccttgatgttcttattttgaaaaattttcgatccgagccctgcatttatgtgacagttacgtaataaattttacatttcacaataaattttttggccattaaagaaattgcagggcggtgactcattctcatcatttccctcccttcccatcgtttttattaatgtgaaaatacattttctaagtctcgagaaatcaatacaaattcttggaattactcaaaatgaaaaaatatctcccttcctacaaaattttaataagcgaatttcaaattagcgcatgttttgattttgacacagaaagtggcatttgttttcaaagtttcataatttaaaaattaaaattgcaattttatataagaaagattttgttggtttgcctcgcagaatcgatttccaaatttggaaaaagtaaatttaaaaatggtcgcactccgtgcacaatttgaggcgagcaatgatgtcggagttttctgtaaactcaccaatgcttattgtctggtgggcattgcttcttccgaaaatttttacaggtgtttgctaagaatagaacagccgtttttggcgatatattctttgaaaattgctgtttttaaaccgaaatgggcgtgtaaatccagaattattgcaacaaaatcggtgatgggatttggttacccattttattccggtggattgaaaatgaaaatttccttgtttttttagtattgtggaggctgagttggccgacgtcatcccggtcatccattgcacagttgcgggctgtcggattgttggccgtgtgacggccggtaatcggcacggactgttggtgccgaacgcgaccacggaccaggaattgcagcacatccgcaacagcttgcctgactcggtccaaattcggagggttgacgaacggttgtcagcgctgggcaatgtaattgcatggtctggttggttgctcctaaatttggatttaa

SEQ ID NO: 15069 - DNA, 855 bp, Heterodera glycines
atttaaaaaatgagaattcatgcgagattttctggaaataaagcttaattgggcctagttaaactgtaaaaaaaattttggggcgatttgaaagagaatagaaagaaccaggttcgatgaaattttgttaagccaaaaaaaatccaaacatttaaaaatctataaaaaatttaaaaatgagaattcatgcgagattttctggaaatcagcttaattgggcctagttaagctgtaaaaaaaatttggagcgatttgaatgagaatagaaagagccaggttcgatgaagttttggtaagccaaaaaaaatccaaatatttaaaaatctataaaaaatataaaaatgagaattcatgcgagattttctggaaataagcttaattgggcctagttaatctgtaaaaaaaatctggggcgatttgaaagagaatagaaagaaccaggttcgatgaagttttgttaagccaaaaaaaaatccaaacatttaaaaatatataaaaaatttaaaaatgacaattcatgcgagattttctggaaataagcttaatcccccccccccccccggaaatcagaattttctgaaaaaaaaatttttttttgaaacatcgccggcataattttatttttaaatatcgcgtttatgcaaaggaaacataaaataatgcaatcaattcaatttaaaaaaaaaacacgaaaatacacccctaaaaatagaggtttacaaaaacgaaaaaatacaccctaagaatcgactttttgagttgcccccccccccgaaacgaaggtcctggctacgcccttggcgtatgcaatttattgatgagaaataatttcgagtaaataaattagagcaattt

SEQ ID NO: 15070 - DNA, 2220 bp, Heterodera glycines
  unsure (1)..(2220): unsure at all n locations
tctgtcggcgaacgcgcgcacgcatcaaatgggcgacaaaagaattggccgaattgacttctctctgtgctcaaactttgactttcttcgctcgctgaattggatcggcgcattcgcagcagctttacggttggctaaatgacactttnaatttgccctttntaatttgcgctttatcttttgctttgcttttccctccctttctttggcactctctttggtttcctcactttctctttccatccgttcgttttcctttttgaatttgcttttctccctccctttctttggcactctctttgatcccccactttttttgtccctttgcttttgcaatgccatttctctttagcttgtcgaatttcgtcgcatcgaaatccaaattgaggttgttgaaacgctgactttggtggcacaacggcgacgtctgcgcaaaagcgcgaaagggcgggcggtcggtttttccaatctttgctttggtccttcgtttttggttgctaacaattcggcttttttcctcgctttaattttaccgccaatcattcacaatttatttgctattggaacttatgaaacaacattagttacattaattatgatcacttattgttaaagtaattattccttttgcagaactttacgcaacccaacgaatttgaagaccaaattggccatcaattaacctgtcaatcaatcgccactgatttggcccatttgcaaattgcgatcccttcgacttcgaatgtttttgccgcaattgaacagcatgaacttagcgttgttgaggcggcagaagacgtcactttggagcggattagctcgttgaaaagtcggctggccaaagttgacttggacacggcacaaacggggccaagcagtactcaaaaagtgggcaaaaagaacgacgaaacaattggcactttaattggccatttcaggtggatctgtgggcactgctgaagaagaaacgcaccattttggctagggatgagagttctgaagaggaggcgcgtgcctcactacgcgaaatggcactgatcgacgacgaattaggcgatgagctcaaaggcaatgccgaatttgaaaaattgagccgacaatggacgagcaaaaaagccgaattggatcgactgatgattctgaatgaccaactgaaacgaatttgtgggcgattggacgaagggcagggcgaagaagccaatgccgaagagttggagactgaattggacgcgttggcccggtcattggcaacgacggcactcgcccattcggacaatggcacttctgctgccggtgattaggaatggctttatccattggcattttgaagcttatcaggccagctgacttagcattctgccattggaaaagttgacagaacaatgtttgcatttttaagcatttccgctgcatcgtcaattcatccgccgagtcgaaacgatcaaaaagcgaattcatcgccgaatggcggaggagcaacgccaacaacggcacgcactcatgcacaaaatcgaggcgctgaaaatgagtcccgagggcgatttgccagttgcgttggaagtggccgaggtgggcaaaaagaaaattattttaataataattaaaatttatttgctgtaatttaaatatcctcagttagaaagcatagccaaaatttccaaaaattcctcgctgttccctttcgagcgaagccccccccccttaattagttgaattaattccctctaattagttgaattattccctctaattagttgaattaattgctcgttctctccctccgttatttccttttccctcgtgtgttttattatttccgactttcccttcaatctttatctgttctgtgtttacccccggggggcgaatgaactcaaaaattgtgtaaaattttattccgcgccgttagtcaaaatgcagccgaattgaacaagtgattcgcaaatcaatcattcaattcattatatttcgtgttcaatttgagaattctctcctcctttttgtttttttaaccgacacttttccaatttaaaatttcaaattgctttttccaatttaaattataaaattcacttttccaattggtccccctttttcaatctttcacttttgcaattgttttttcttatgtttttgtgtggtcgntgccctcagtttccctccatttgtgttatttctccattcattccgnttcgctttgccttctctgatcaactcttt

SEQ ID NO: 15071 - DNA, 1019 bp, Heterodera glycines
gaacgattggagcggacattggaggaaatcgaaagggacaacggcggatgggacgtcattttgagtggacaggtcgagggaatctttggatttggccccaccaatcactcgcccttcccttaaatgcttttcaggtcgaagctgtgctcggcgtgttggccaattggctgaagcagctcaatgaccaattgacaccggaacaaagccaattggacacactttttgctcaaaatggtgacaatttcatacaaagcgaatctgaaaggatgggacggagaatggacacagtcagagagaaaatcagcgaactgaagacagtgatggagcacagacaggtgaaagaatggagggagaaggcggaagacagagacggacagacaatgaggcaaataccgtactaagggagcggttgggttcagtgggcttactgtacttcttttatcgatcaaaataaatattttttcttctttttaactcatttcttttcctaattcccttatcattcctcgctttttgcagatgttccttatcaaaatgtgcgcttttaaagctctctttgaaaaatgtatggaaaaagcgcaaagtgaaaaacaaatcgaaggaaaagagacgaaaaaaacggtggaaattcaaaacaaaatgaatttaaatccgtttaaatccgttaagcaattggaattgaacgcgttaaaaacacaaatccttggcgcagtgcccgaactttttgaagcgcaaacaaatgcacggatatcggtccctgacattgacttgcaacgaatgctcgaccaaattttgggcgattcgattggacccgtgagaattttaaagcaaaaaatgttaaattattgtcaattaagtcgacttctcctctccctccgccgttgtcatctcgtgcaaatgaattgctgaactcatttatgactttggcctcgcaattgcacaattctcttgacctttcgttggagtcttttcagttcggcgcagtctctccctcccaattgccgacagaatttcggtat

SEQ ID NO: 15072 - DNA, 2253 bp, Heterodera glycines
  unsure (1)..(2253): unsure at all n locations
ggaattttataattagagacgcatacaagccgtatagaacaacccccggtggatgcctcagtattaataggggtaaatttggataagataattcgctaatttttaatattaaaacaactgacaaagtttgacgaaagaatgtcaaagcagagttcacaggtgttcatacgaggaatgttataattagagacgcatacaagccgtatagaacagacccacggtggatgcctcggtattaatagtggtaaatttggataagataattcgctaatttttaatattaaagcaattgacaaagtttgacgaaagaatgtcaaagcagagttcacaggtgttcatacgaggaatgttataattagagacgcatacaagccgtatagaacagacccacggtggatgcctcggtattaatagtggtaaatttggataagataattcgctaatttttaatattaaagcaattgacaaagtttgacgaaagaatgtcaaagcagagttcacaggtgttcatacgaggaatgttataattagagacgcatacaagccgtatagaacagacccacggtggatgcctcggtattaatagtgtaaatttggataagataattcgctaatttttaatattaaagcaattgacaaagtttgacgaaagaatgtcaaagcagagttcacaggtgttcatacgaggaatgttataattagagacgcatacaagccgtatagaacagacccacggtggatgcctcggtattaatagtggtaaatttggataagataattcgctaatttttaatattaaagcaattgacaaagtttgacgaaagaatgtcaaagcagagttcacaggtgttcatacgaggaatgttataattagagacgcatacaagccgtatagaacagacccacggtggatgcctcggtattaatagtggtaaatttggataagataattcgctaatttttaatattaaaagcaactgacaaagtttgacgaaagatgtcaaagcagagttcacaggggttcatttgaggaatgttataattagagacgcatacaagctctctgttaataattttttttaatgaactctcacctttcctcttttctcttcccctcacattcttttttctcaggctaatagtgaattaaagagatatttcataacactaacttagttaatatcaaaaaattattgctaacaacgcagaaattaatggcgccgaaatggttttgattaattttttaatggtagaaatctataaaaaatttaaaaaatatttacagaaagaaacatntaacaaaagttntaaaacagaaattttcacgaattattataaatggtttatttcaaacaaaaatattccataattgaatcaagcgttaaaaaaacacaaattaaaaaatttaacagtttttaaaaataaataaaattattttttgacgaaaactctgttgataattcattttaacacgaattattttaaaggatgtgaatatattatggatattcaatttctgttaattcataagtaattgttttatcgttgtgtcggaccagtgcagactcgtcataagaagtcaatgtcaaaactccagctgcaatgaaattaaaagggacttatttaaattcacgcatgcatttttttaataaaaatattataataacatagcctttttcaaaccctcattagtgtccgcattcgctgtaaattcatcgccgacttcaaatttgatcgaattgggaaaaacaaattgggttttgttgatcccatcggtacaaattgttccatccaatctttttataagattgtatgctgtcggcttgcgtgccacgcataagcggatacgaccttgtgttttaaaattattaaatcaatttactattagtaaggatggaaatttcaggcataaaaatcgcgaaattgctacctttaaattacaaaaaaaatcactcaatcaaaatttctatcaaacaaaaaaatttttagaaatttttgagaaatgtttccaattcctaatagttttttgttggtgttttttcaaaaaatccaaaaaatacgttcctaggtattaaatacaaaacaaaagtaataataaaaaatattaaaaatcattgtagacatcctaagcaaagtgtaaacctgtttttcgtgtttaactgtgcatattaagtacgtaaaaaatttaggcttttgccanaatattcatccctactannataagttttttaaaaggtttttcatanaaaacaa

SEQ ID NO: 15073 - DNA, 1663 bp, Heterodera glycines
  unsure (1)..(1663): unsure at all n locations
actgcgcaagaattgctcaagaaacgccngagatggatgaaagtgatgaagaggagggtgaagctggaaggagaacagaaagaagaacaatggagttttgagggattggggaggggcccaagaagaatgaacgaacgaacgaatgaatgtgttcaaagggacggatggaagaattatccaccgacagacggaagggatgaaggaaggagcagaggagggagaaaagagggacaaattatacacactcatccaaaaaagttggaggaagaaagcattgacgagagacgggaaggaagccatcaaatttggaaaagtatagaattggtccgttaaaaaaaagcaaattgcatcattaaatgtgactaaaaggattctattaatgaggaaatctgtgggaacatttagggacatcgcgtgaagtgagaagttagtcaaagcaaaagcattgggaagaaggaatctttggtagagagagacacgaaaaaacgtcagagagagagaggagaaagaatgagtcatcccaagttaaattcatttaattatgctaagtaagttagcaacttctgctcaagtttctaaagtcgtcgtccgaatttgaatcttaaagattcaaataatgaaagtcaaataaaagcatttattcgaagatgaggcaaaagcattcattctccatataaaataagctttgaggagagagtccaatggcgaatatttgcagtcaaacggattaaatgagcaggaaaacttttgatcggcttttggacgggtcggatttccaaaagatagatcaaaggagcacaagtgcacccatctgggcaataagtcaaaactgatctgatggaccacatctgcaccgatggaccaacaaattgagggcatatgtttaagggggggggggggatcagcagtgagcttttgggtatcccatgccgtcgggttgaatttggcaaaggattagttgccagaaaacgattacgggatttcatgatacagatggcaagcagtttgctgtttgagtttaaccgaattataaattgtataaattggcggcgttaaaccaaaataacgctttataaaggaaagccaaaaaaacaaaacaaaacaaaaattcaaagccctaaaaatttaaattgccttccaaaatgtgataaggtggaagattaggagtatcagcagttatcatctgctggtcatcagaggaagtcgcatcagttagaaggaattctttttctttatgtttagcagcgacataaaatgaattatcggattgatttagtcgaatgatcgcgctgaagaatgatagccaatgtacaagcacagaatccccctccccaccgccatcattctccgataaagttttcgcaaatattgcggagaattgaattgatgggggtgaaatgggaaatggtgggggggggagggtggcgctaggggggacattggctctgactgacggcgtccgtcgtccatcatcactttctccgcactccccatatattcactcatccttcatcatctcttcgcagtggacgataaataacattaggcccatcccaaggataaatgaatgggagggggaattgtcggcggaatgggcccacctgcccatccatcgccgcttctatcgccgcaaatgcatcttctaatgcttccatcatcaaaa

SEQ ID NO: 15074 - DNA, 3130 bp, Heterodera glycines
  unsure (1)..(3130): unsure at all n locations
gatactcaattcattagaggatcattccaaatttatatttttttaaatcttgggcaaatctattttttatttttttgcttgtgtgaggctttcctatttttattatnntaaataattaatgtatttactttttaagtctacatatacattgtgcataagcacatacaaataattgttaaaaaaataactttttttttgcttattctttatttggtgatgttatgagtgcactacaggaaattctggaaaaggtataaatattaaaaaataaattaattattctcctttaaatgcttcgctatttggggacaatatctgtatttttttagggttatgtcgaccccgaactccttgaacagttgggcgaggaacagaagcaaattttattcattaaaatgcgggaggaacaaattcgaaaatggcgtctttacgaagcggagatggaacagcgcgagaaggacgagggacggaaaagcggtggcaaaaggcggtcgcaagagagcgacggaaaggacggcggagttcgccgagtgcagtgaggggacaaaatgttgaaaataaatgggagaaaagagcatggaattgaacaccgaacaataaatttgacattttgcttccctgttgtttgtcttatttttaattctgacagatggctgaacggcaaagacggcgatgtttgggtttgggtgatgggagaacatccgaacgacatgagcatcgagcagattctggacaaagagtccgaggagaaagcgcgacgaatagccgagaaacaggtcattttcatttgccatcaacaaataaacgcacaaaatcccattttacaatcccttgaggattttcgtcagatttttgaaatccgatagtaattaatggtgggtggtaccgatatacgcctccataaaattttttagaaattcatggtgggttgggtcgatgaattaattattcaagctcttaaaaacttatttgaaaaggggcattaccccctgagtattggtctgcatttatttttttagataattcaaacacttcaaaaggccgacaatggagtaacacgcatttttttttgtacttattgataaaaggaaatattttagactatccaaaagcttcgtttgtctgacgacttgccgaatttgttggaacgcgaggaagcggagttgaaagcggaattggcatgtatggaactgaacggcacggagaagagcagcacgacaacagacgaaccaaaggtggcgagtgtgccgaaaatggcgaagcaaagcaattgccaaccatcgcaatcttaagccaaattcgcattctccctacgatgacgtcgtcgaaaaccatcgatttgacatccattttgagtccaacggtccttctgtccagccaaccaccagcagtgccgctggtgccacaaatcggccgccgacggacggcaaaattcgtcaaattgcgtcatttccccacctcaaacaatcaccctttttgagcaatggaagagaggaacagctcgaattctatggtgcatttggtcagtgatttatttgttggtgtttttccttttgcagataatgtcaattcattttgtccatttgaatcaaatggccgttcaccaaacaatttgaattataacgtaaaaaacggacgacaaacagacgaccggccaacgccaccgccggtgccggagaagccggcatttttaagacggacggtgtccaacacgatggtgatgaacagtagcaacgacgccaacaatagcagcaaaatcattggggtgagcactgcgaatgctttgcccgcgttaggaatgttcgctttcaatgtgctcttcatttttgacaaaatttaccattagaattttaaaaatttaaaaatcggtcttcaaaatttgcttttctgtttaccgttgcttttgatgactctttgattctctctgctttttcagtccatccgaacttatattcccgactctgaggtggagaagcgccaatcccaaatattcgaccagttgcgcgagcagcgtgaacggttcgattttgctttaattactgtatatcagtgaatgttgattttgaggttggaacgcgaggcggaggaggaggcgcggagggaacagacgcaatgggaggagcagcagagacgcgcgagggaagcggaggagtccatccggcggattgcccaaaaggcgcggtaggcctaactcgccgaacccaaccaactcggccactgtgcccttaagggagcagcaccggaagtgtctgcgcacctccgactctctgctgccgctgttccaacgcaacggctgtcaatttgccggaacggcgcagtcaatgcgcgaggctctgagggcactgccgaggccgccgaagccaaagagtcgccaaaacgtaaagggggcacaaataattcaattccatcggcacccaaattcccccttttcgggttcagctcttctcccccccatgtttccctccggaaaaatgtttaaacctagaaatttttacaagaaaaaacagaaaacttaaaggaaacgaatttctcaaaatctaacaacaaaatttcacaaattatctccaccttttggttgtgagaccacatgacacaaacttacattctcagatcatccaatggtttcgttcgtcggagttgggccaatgggcacaaaagaaaccgcctctttggttccatggtatgaaaaagtgcaattcactggcactaattgcaccatttgcttaaccattccctagggatcatctcccgcctcgattccgaatgtcttttggctggcaaatcgtctggtgcatttttaattcgcgtcactgaacgaatattcggctacaccgtttcgtatcggactgaaaacggaccgatcaaaaactttttgattgagcgaatttccgaaggctatcaatttatgggtgagaatttaaaaacaaaattcacaattatttttggtttcgtgcgatttctttgcacaaaatcggttttgtttaggtaccaatcagttagtgcacgcgtccctcgtcgatttggtcgcccaccaccaaaaagtgcccatcaccgccaaagggggcgaattgctgcgcgaagcggtgggccaacggacgacggacggacagcaggcggactatgcggaact

SEQ ID NO: 15075 - DNA, 3512 bp, Heterodera glycines
  unsure (1)..(3512): unsure at all n locations
caacctaaaaatcgacttttcaaaaaacctcttacgaattttaaagcccaaattaggtatgtagaaatttatcaaattaactgtttaaaaagatttntaatatattttcatatgttagtcgaaaaaacattttagcaaatgactgcacggagattggcatctgctgtttggcggccatctcctgattctgttttgaatccatcacatcctttggtaagttaaagaaatgcttaatttaagaataaaaaaattaattattcactttgtgcaatggcttaaatatattttaaatttaaaccctccttttgtctacccgctttttctccttaattaaatgaccactttttggtttcattttcaacatgtgaaaaccaaaaacatccattctcactttttggctctgattacttttttatcgtttagtttaaggtgagcgagagattttgtacgcatttgtagccacttttgcctttaattattaaaaattaatctcttcggcggctgtaccccaatttaattaattatatattctaatttttgtcctcctcacttttatcgaaacgaatgcctcctcttcttcaataaatatgctgaaatttagaatagcacgtattggcccggacgctctctcacgaatacaataattgcttactttgataagaattatacccaggtgagtgaacgaggggggaaaaagttcgaacttggttttggagattttaaatcgcataaaaagccttaaatgtgttttaggaggtgattttattcacgaaataaaatttcattttccaagtccatattttaaataagcatttctattttcaagtccttttcacaacaaataaattccccggcttccattcagcagcatcgtattttttcttagtgttcgtaagactcataaccccttttttggaaatcagttccttgtgccaatgtggcccggtcacttcaaaatatgttttatttttccattcacagttggagcgaaatagactcgtcggtgcggtcggacggaaaatggtactagaagaaaatcgagcacaagacgcaaaactatgggagaaaaaccaccccgaccccagatataagtgtaagcccgacatcgtccaagaggtggaaaattgataattaaattataaattatggttttgtccaaagcctgcgaatggtcagccaaagcctgcgaatggaaagccaaagcctgcgaatggtcagccaaagcctgcgaatggaaagccaaagcctgcgaatggtcagccaaagcctgcgaatggtcagccaaagcctgcgaatggtcagccaaagcctgcgaatggaaagccaaaggagttcattgagatcaagtcgattacggaggggagtaaaacgaaacccaagtagagaacattattttatgaatttttaaatttacgatcgaattatataagatgcggtcactctttttaggtataatttttttttacgtccattttgactgccatttcgatttacagcgaaaaaatttggattttccatattttttgtaaatattttggcttttttcatataaaattcagaaattctttaacaataatgatttttttgatgcgattatattttttatcgatttagctttgaaacgtggcattttctgtagtatattgaaacgtcatactgaaaaacataacgaagccttcctcgataatttttattttatttgacagacaaaattttttatataattattagagaccggtgggatcggaactcccgcgggattttacgggagtcccgctctcgactcctgttttttcggtgaatgggatttttaacgggagcgggatttttacgggattcccgtttgggactcccgtcccggaaaattttgaactcccgatcccgcttccggaaatttttacccaaaaaacgggagtaaaaatgcacttgtaagaattgagttttttttttggtaaaaataatgattttctttgaaaatctgttaaatatatagccaaaattttacaaatcatttagactatctggacctcagaagcaagctgtaaaggacgggaagcttaaatccgtaatcaagatgtaagcaaaaaataaaaaaatctgaatataaaaatttaataaaagtaggcacaaaatcagtttcaaaatctcgattttcactccgagatagcaattagcactaaataagtaccggaaatggttgcacatgatacttttatctttaatgaagctgcctatcgggatcgcaggcaccccaaaaaacctaaaaattttgctcaaaatcgaaaaaatttataattttagacaaaatctgttatagatctatccaaattttcaaaatttttcccggcggaacggcaccgccggacccccttctccctaaaagtctttagaaaaagcgcgccgcgaaaaaaagatgctttgaaaaattttgggaacaagggtccggcggtgtcagtaagcgccgccgcgaaaatttttcgaaaattagagaattagaatgcaatttattaactgattttcatcaaaaataaccaatttttgactttgagtcaaatttttttaagaaaaaataagtttggggacccggcgccggaggaaaaatttgaaattttgactatttttacagattttcactcaaaaattgttcattttaaaaatgtcttatcgtttttaattaattctatacaaaaatatttatgataaaaagaaataaaaaaagtacataaacttattattattaataataaaaatttttaagctaaaataataaaaaaaatttgactatatggtataaggcaaaaattgaaaaaccccgaccccgaaccatttggtcaaccctgaccccgaccccgaacttgctgaccccgacgactccgaaccccgacttttccgaccccgacggtcgggggcccaaccctaaatatcaccgtaaaaattgtttatgtcaatgtttagagtgccaaagaaaaatgtcgccactacgtccctatcacgaacagaacaacatggtttaaagggaaaagaaagatctctgttggacgctgctaaatggggaagaagggtgcttaaaggattgaatgttgtcggagtagtttcggactgtggcaaagtaattctcgtctgcaaagaaaaaggactatcggaagcagctgggaccactgttggaattgttgtcgaacggtatgtagtactgttgaacgcttttaaaaatggcaaaatgaaaatgggtcgggcacatttgtgttcgttccgccgttctttcttttagcatgttggaattgggaagggggggggggggggaaaatcgaaaaagaaaagtttctaaatcttcacttgagaattggcttactgtngtgttttttgtcattttcaatgaaatttataaatttggttatttaggtgaatttatgtgttattttgccattttttgcccttttatttataccgtacttacggtattttaaatccgcccctgtattagaacccccctctatattacaccccctttttga

SEQ ID NO: 15076 - DNA, 1142 bp, Heterodera glycines
  unsure (1)..(1142): unsure at all n locations
tgtaaagtctcaaaaaactttttgtttttgaaacaaatttttatcatttgcgttatatattttttcataaaatttcgaaggctttcggagcttttaataaattagcttctgaaaaaattaatatttttttgttattcagcagaactgcattcatagagagagttaattttgtacagtaatctataaaaatgtaaataatttttacggtattacaatttttaatttatttcttctcactctgtttgatcatatgcttcgatacacttggaatgacgaaaagcattgggatgagacatgttcctgtaataaaaaatttttgtgaaaaatatgaattttgaaaatcaaaaaaattcgaccataaatgaaaaaagagagaaaaacaatagaaaattatacaaaatttcaagaacgtcgtgaatggcacgcggaatgaccatcattggcacggacagataagcagcgaggcatggaaagcaaacttttttgaaatcggtgaaacggtcaaaatattaaattcataatgaataatttatattataaattattttgtaaacaattaggccaaggctttgacggcggcgaacattcgggcacataattgacgatttcaaatgttcaaatgaaaaacttgttgagatgaaatcgagttggtaagaattgattacttaagtaaataaataattaaatacattgtgtcccaaaagtttcttgacacatattttttctcataactttcttcagaataaaattagtgaaataaaacaacataaacaaacagagaacaaacatatcagggtacaataataatcacagtttttaaagctgcccatttcttataataaatttaatccataaaaatcagaaatttgaagaaatatttttgcctatttttaaaaaaaatgaaattaaagccttttttaatcttagaattagacaaaaattcaagaaaaaatatttaaaataataatattaaaaaaagaatttgtatttataaacaaaaaattaatttaaagacaaaaattataaatttaaaaataaataaaataaacttcaaataaaaaattatgaaaatgaattatattanaaaaacaaaaattattatttcattatttttgttcaagaacaaagacccacccatcggg

SEQ ID NO: 15077 - DNA, 1564 bp, Heterodera glycines
gttaattaaataataattcaataagaatacaaaaacagttagtaccatctgggagctgtattttaatttaaaatgatatgaatttccaaaaatttaaagtaatattttttatctaaaagtgtgggagcaagccgagagtgactcaaaaaagggaaccaaaaaatgacaaactgcgaaaaaagattactaagcatttggagcaaaattggatcaacaaaatatacgattcggtttgctgtcaaaatggacagaaaagattataactaaaacttattagtagggttataaattatatggacaaatgaaatatggacataaaatatggactaaaaactcaaaaatcagttttttgatccggaatacactgaaatttattatttacttatttcctccacaaaattgttaaaaccgataatgggagactaaaaatatataatatttaatagattttcgatcgaataaattgtaaaaataactgatttgaagcaattttttgcaaaatgttcttatttttgaccctaaaaacttattttttggccttggtgttcttattttgaaaaatttccgatctgcaccctgaactagagccttcgaaaattatttttttggtttcgcacaaccctgatccgaattataattatgaaacacatggaaatggtaaaaacaaaaaatgtttaaaattaaaatcttcaaatttttagaacccttaattgccgttcatccgaaaattcgtcagggaattgctgaggtggaaaaataaaatacattcaaatagcaaataaaattcagaagttttccattccatatgataattttttggatgtcaatgcttgtcacagtgacctcgaaattttttggccccaactgtttgataattaattacaaaagcgatggaagtggtaaattttgaaaattttaatgaattttatacaatgattagttaattattctattttaaaaggttgtcgttctgtgttcgcaaaacatcctattttctgcagtgaatccgccaccatttttttacttcgaaatgaaaaccataaatgtgaaaaagtatgttgaaatgcaacaatattgcatttcatgtgaacatttgttcagcagtgaatttttgtctgttgtggcattaatttggccactcggcggattattttcacaaagaatggactttgtttgggttggttatttttttattattaaattgttttttaacaagtctttgtctgaccttttttactatgaaatttcagttatgaaaaaagaatagtaagcgaaaaaaatcagaaatttgaagaaatatttttgcctattttaaaaaaatgaaattaaagcctttatttaaacttagaattaagacaaaaattcaagaaaaaatatttaaaataataatgattaaaaaagaatttgtatttataaacaaaaaattaatttaaagacaaaaattataaatttaaaaataaataaaataaacttcaaataaaaaattatgaaaatgaattatattaaaaaaacaaaaattattatttcattatttttgttcaagaacaaagaccaccccatcggg

SEQ ID NO: 15078 - DNA, 1378 bp, Heterodera glycines
ccgttttttagcttgataggacgcttcgcgacctcgaacggacgcttcgcgcccgttttttaaattttgttgggcttatacgggcgcttcgcgcccgttttttatattttttaagctcatacgggcgcttcgcgcccgttttttagcttgttaggccgcttcgcggcctcgaacggacgcttcgcgcccgttttttaaattttgttgggcttatacgggcgcttcgcgcccgttttttatattttttaagctcatacgggcgcttcgcgcccgttttttagcttgttaggcggcctcgcggcctcagtcgggcgcttcgcgcccgtttttcaatttttgttggccttggacgggcgcttagcgcccgttatttaaattttgttggttcagatgggcgcttcgcacccgttttttaaatccattgaactcatacgggcgcttcgcacccgtttttcaattttttggccttggacgggcgcttcgcgcccgtttttaaaatttagttgaactcagacgggcaatcacacagggattaagagatataaaagggattaaaagaggcacaacagtgattaaaagaagtaaaactatgataaagttcgaaatttataatatagaatatttattgaaattgaaaggaattaatttctcgaaaattcaaattaaataaaacagttattcatcagaaaataatttaaaataaattaataaaacaatttaaataaaaaaattaaataattcaaaataccccttgagatttttcaaatattcgcccaaattcccaagggccaaaaaaagtttgaaaatattttcgaatttttaaaaattctaaaatgtacaatgattgattatttattgtatattaatttgttgacaaattctaattaaaaaaaacaaataaattctttagtttatcaattttaaacaacagtgattaaaagacgtacaaaagtgattaaaagaagtacaaaagtgattaaaagaagtacaacagtgattaaaagaggtacaaaactgaattaaaagaggtacaacagtgattagaacaggttcaactgtgattagaagaggtacaacagtgattagaacatgttcaactgtgattagaagaggtgcaacagtgatcagaagaggtacaactgtgattaaaagaggtacaaactgtgcttaaaagacgtacaaaagtgattaaaagaggtacgagagtgatcagaagaggtacaatgattagaagaggtacacagtgatcagaagaggtacaaaattgttagaaaaggacaaaagtgattaaaagaaggacatcatggtttaaatgataagaaattgcatattggatgattataaattatcaaattaaaaaatccttttacttattaaa

SEQ ID NO: 15079 - DNA, 3573 bp, Heterodera glycines
cacaaagaagaacattgatatcccctgaataattcatggaattcggttttatttagtattagctccctccccaattcctgtgtttgtatgatttttgggtaatcaatcggccgagttctgtttactggtctcacctctgatgttgtgctttccttggggattttttgcttctccgccgaacaaagctaaagcaattgcctgcttcacttctgcatggccataaatgttgggcgcgacactgcagaatatttgttgagctatttgcggatgttttgccaattcgtggattgctttgatgtcctcgtcagtcagtgaatccgactcgatccgatcctttctcgttatgtgattggctatgatcactgtgttgaaaacgggaaaaccctggcgcgaatttaaggaaccatcataaccattggaataaacaccagtcaattcctaaacagaagcagatgagagataaagcgatgaccaaaatcacaatttcatcgccaggtttacacgagtcgcacaagtcgcccagcagaatcacttcctttgaacgggggagtcgcccggccgcaaccaaattcggactttcttggatgctcacgcgttgataattgtggtaaattgtctcttctgtgttcaattcgaatgggcctcgactttgacaagagggacaagtgctcggctttgtctcttcgtcctgacgctgaacaaacgggccgagaacataagagcaggacttgcagtcgtatttgacgatcccaagttgtggaagaattccggtggtaatggtcaccacaccggctgtctttatgagcatgttcaaatgcacttgacgcaacatgcgaatgtcttcctccatcggaaggtttttgatcctgactttcacctccgtagtgatgcgatgataccacggaaagattgacactaccacagtcgtggctgcgcgattcaaacattcgagtacctttaattctcaaaatattatgtcatacgttaaatcaaacttctgttggggcctcgggtaagaaataagtaatgtccggttctcccgattcgtgtgccaggtcattgtaatccacttcaagtgattcgcgattctcagccaccatgtgtttgattgactgtatgtaaaagttttgtttgttcaccgtatctttgaaaacgcgcaaaaatttgcagaatctaaaaaagcaaacattttttgtagcttaaatttgtcaaaatgcctcttctcaatctccttcgctataacttcgtcttttatgtgctctcgagttggtctcccgcgcgggttctcaatgatatcaatgcgaatgtcctcttctgccggctctccagctaatgaatgttcgtcggcagaggataaaccgcgttgcttcctccgtcgcattaagtgaattgcctcatcatcgccatcctcccaataaatctgataaaatttccattttatattaattttcgaatgcatcaaaccgcgtcatcaacggtcatttggtcgcgtcttgccatgtccaactctgcgcggcggcgagcatcgattgagagttcagtgatgtcagatgtgtcatcaattcccgactgagacagcgcatccaattcaggctgttcacgataatctctgagaaaggaagcagcaaattaggattatgattttcgtaattgcctcatcatatcatctccatataagtcttctccttccacgtcatcttctctctttaagttggtcacgttcatccccgtaaagttcagctattgcatcctcatcatcctcattgggatttgctgatttcttcctcgttttcactgtgaatgctgtcactgtcactcattgttaatttgattttttttcttaatcaaagaaaaatttttgattttttagttatggttgggggtttgaaattggtggaaatagatgtgagattcgttatcagaacccctgaaaacacctgagaacaacgcaaaattgcataaaccccctttaaatcttttttttatgggaccattaaaagtaagtatctaattgtctttttttctaaatcaaaaaatttaaatttaatttttggcgctacaagaaaaaacaaagttgtgaagaacgttcacgggaattttaaaagttgctgaccgaagtggtcgcgaatcgaacattcattttgaccaattatgtatctcaaatacgattcgcacaaaaccgaaatgaaaattcatctttaaagttttgtttaccaaaccaaaagggttttaaaaatttcactactacgaggctatggtagtggagtagtaaacaaaaccattaaaaacatttttatcatatcagacaaaatgagttcgacaggaataaaagtcattaaaacaaggcctaattatttgcttaactttcgtaaacgcaatctacatttttattttgatttacacagatgttcccgtctaatttgttgaagaatctcatttgccaagttccatttagacgatgctacggcacattgattcaaccaacaccttttatttgcgaaagaatgcaacatgatccaaaattgaaagaaaaagtggaaagagtccagaaagaatatgaggtatatacatttttggcaatcaaatttggttctgattggttttatgcgttgcatgccaaattatgccccccatggtttcattttgagtactagtacaaatatgggtactttttcactttacgccacataaaaaaataataatttttttgtatttttctggggttttcatgggcgctgatcacgaatatgacattcatttccacccatttcaaatcccggacccgaaatcgaacaaaagtcgaaaaataattttcaccaaaattcatatacacatattgtccaaaaacgattcaaatgcactaaatggccgtgaatctttattttttattatattctcttctatttgaatcggttttgggcaataaatgtgaattttggttaaaaaataattttcgcttttgttcgatttcgggtccgggatttgaaatgggtggaaaaatgaatgtcatattcgtgatcagcgcccatgaaaacctcagaaaaatacaaaaaaaattattatttttttatgtggcgtaaagtgaaaaagtaccattaaatctgcttttgaatattttgccaaagaaaataaactccaccttaaatccaatgaacaagggcagctccaccttgaccggaaagccctcaggcaaacgcgttttgcacagcccgcgcaatttggagaagcggggcagcagtggctcgaatactctcagcatgtcctgataaatttaaaattttattgcccattcaacaaagaacaataggaaacgaattttacaagcctggtcataagcctttttatacttatattaaaaaaatattaccaaaagaacgccgaagcgcaatggaaaagacgcactctgcaaaaaaaaagatcttatcaagccttatttgaatgataaattcacaaaaccattgcgacgatcccttcgaacttcttggcggttgtcgatgccttgaatggcttgccgagtgcttctttgccctaaaattgttgtaaaagtataattggcaatatcgaaaaattcat

SEQ ID NO: 15080 - DNA, 2338 bp, Heterodera glycines
atttcctccttcggatcggtatggaacgccatgtcaaagacttggatgcccgctttataatttccatccttaaaattttaaatgtttaaatatttcttgttttaaatcattgcccaccaaaacaaaggcatcgcccaatgccatcagacaatcgacgcaattggtgacaatgctattgacggacttaaaaccgattgaattgggagggaaaggacaaaacgacttggaggagttcaattgcggatggatagtcgccgattcggagatggacgagcccactttggagtttggcagcacttaacaaaagggcgtgagaatgccaaaaataaaaaacactcacacgcaattcggccgtcgcttcaaatagaggcgaaggcactgctgcgactttaacgggtcgccccgaattctccagtaaaaatgtgcataataaagggccaattcgcgcgatttttcgtcatttgccgtcagtttttgtgcaaggaaaagccccaaatggtgcaattgctcctcacttagtcgtgccaattgatactcggaaacgaacgaacggaattcctaagataattatgcctaatgaatgaattgccaaggcgaggaatacctttgtcgtgctcacttcgttggcttttctctcttcggttgtacccgtcaaatgggcacagtttggttcttctgacaatgattgttgagaattgcccaactcatcattcggaaacattcggctgagaaagtccattttcagtgtttctgtcgtcgaatgaatgctaaaagatttttctaattttttttttttttggtctttacattgattcttttccaatcacaaatttgggcataatgtcaatgggataagtgacaacaaaattctccgtttgcagttccatcggtttgctccgtacacagtcctcgtccgtttcccgcactttcttctcaatttcggggtcatcttccccatatcgctggtcaatgttagcctttgttgaaatgtaaacaaaatttatttacctaacctggcaaaaattgttcgtacttgtttatctctaatgaatgttctgatcgccgttaattcccgaatccattccaattggcccaaaaggtcgggaagggaatgaggctgacggatttgaaacggagaatcggactgaaagaaacaatttgagagaagtccaggcaaattatgatggatgggtactgaccacagaatcaatggcaccgctttgatggttggccaaaaagtgagtattggcaaaacaaacgtaaaggaaaaaattgggaaaaaataaaaaagcgaccaaagcgacggaaggggcaattgtgaagatcattggccccgaaattttttaattttatttttttatcttaaaattttttaacacttttctaggggtgttttgaggcgctgagcacgaatccggcctccatttcgaccaattccgaatccctaatccgaactcgaacatttttcgagaattaaattttaaaatttcttttaaaacatggttcttagtgttttcggtgccggaccgggtcagtttagtctggccgttttagtcagggggtcgttttagtctggttagctgttttcacccacaaattaattactttttataaaatatcattttttgtcgagcatatacatacatataactggaaagcgcaggctacaattcgtgcgcaagtcttgcagaacacaacaacaccaatgttagctgcttttccgaacaaagctgcgacaaaaaggtcaacttttcctaatttttatgccaaaatttgatttgttcatttattttaggttataaaacgtgttcgccgtgacgaatatgtgccaccttattttttcaaattacttcaaattagagtgccacgcagggctggacgtaattacggattacgtattacggaaattacggcctttttggagcttacgggttacggatttttgggatttttccgtaattttgatccgtaactggctttttagattatttttcgagacgatttcttgcaagattattttttataaaatgaatttttttttctatttttattaaaaggctacccatatttcgatttaatctgacttattcttggtatttgtagtattattaacatacataaaggggggggggggaggctagcaaaggggaaaagaggaaatgctaaaaatttgccatttttaacaaaattcgttaaaattctgaaaaaaattttcctcgtcggcgcttatcggcactgcccaccccaaaaattcctaattatttttaaatattagctccaaaatcttagtcatttttagacaaaatcttatagcaaattgcataaaatttttaaaaat

SEQ ID NO: 15081 - DNA, 552 bp, Heterodera glycines
tccacaaatcctatcccccaaaatcccacacaaaaaaacggggaataattgttatatatttgcgcatcatccgcccgtccgccccagcggattttgtggtcgtccgtctttcgcgcgcggatgggttggctcatggtcatcccccattgccctccaccgccaccaacgaagacaattttctttgtaattcgcaccctcctccgcgcccccttaaaatcgccgggggaaattttaaaaatttgggtgcaatttgttaacagattttcaacaaaaaaaaggttggtttttgcgattattaagctcaattggtaggattttcatttaaaaaatgataaaatatgtatcaatttaaaaaaaactatgaggaatcatattttctttataggaaacccacgagtatacaaaaaaaaaattgaaaataatgatcttcacaattgccacggaaggcattgaaagtggaaaaattaaaaatggaagagccaaaaaaacaaacaatgggctattcatttaaattaaagtgtatggcgctaaattttaaatttaacttaaaaa

SEQ ID NO: 15082 - DNA, 3846 bp, Heterodera glycines
  unsure (1)..(3846): unsure at all n locations
tttttaaattatgattttttgttcaaatttagattaggaaatcggaattgatcaaaataattgaaggattcgtgatcggggaccccaaaaacccccagagaataaatttttatgactatcacaaaaaaaattttgcaaaacaaaagggtccctccttttgaaaaaattttcaaaatctgtcactttgcatatagtgccaaatataatataatatttacaaaattcgcaaatatttaaaataaacaaagcccaaacttctgaacccaaaaacaaaaatgttcatttacatgaaattttcagccctaattattaattttttttttccaaaaatatttacctatatttattcatacatataagcaaataacattaatatggccatatcagacaatcaaaagcaatgctccaaacgaaataaaggtcgaaaaaacgaatgctgttttctgactgacgccgcccgatttcatcttttttggtccgccaatgtctgcagcagagagacgatcacgacgaaattttgctcgaaactggaaggaaataaaataaaatagcatttaaatttttactaatacgtcttcttccgctgatgtgggagtttgaacgactgtataaattaataaatgataattaaattggaattaacaaatggtccaaaatcctaacttgttttatcagctgcttttgcaaaagccgaacctctgctgttcagtgaatcaactaaaagcgttgaaaaaataaatattaatatttttgaaaatataaattaacataattttttgcaattacccggatagtttggcaacggtgaaacggcgtagggtaaaggcggaataataggataatttgttgccccaacaggtgggtaaataatgcctggatttcttggcatcgttgggtaatagtttggcattggaatgccaggatagtttggcatgggtgggaaaatggctggaaacttcggcggcatcccaatcggataaccaccggtgccggccaaataaggcggaatagggcaaggctctgttgcagaacaaccaccactgtgtgtgtacggaaagcatgatgacggtggacaattgcagttgttgtttggacaattgatgatcaatgaaagacagcatggactagatgaaagaaacctattaatattttagatttcgatgttttgagaatttatagaaatttcttatctgctaaaaaaactgattttaatttaattttctttaatattcctatataagaattttaataatgtgaagtgttccttacttgtacggatgtaatagcggatttgtaaccggtgtactgcttgatgttgtggttttgggggttttatccttggtggttgtagtcgtggttgtctcttctgtgggctttgttggtggtactgtggttgacgttgtatgctatgtatgaacaaaaattaaatttccaaaaaaatcattttttttaattaccgttccaccacaacatggcgggcagctcggccggcatggacaactgcgatactagaattggtttaagaattaaaaaaaaatagtagatgctttaaaaggcttaaaccccatgccaaatgacaaataaatttatacttgaaatattttcaattgataatccatcaatcaatgctccttattttgaagattcaaaactgaaaaccaccaagagattagaaaaacatcataaataagggattaatctcgcttttttaaattgttttttcgagcctgtgacaatattttttcaatttcttggtgtatattattcatttgccaattttttgttttctaagagattaaaatacataaaaacatacggcagaacaacagcaacattcacatgccgttggactcgttgtgccagcaaaaggcgcttgcggcactgttgggtaagaaggtggcacaggcggctgtggtggcccgattgggtagcttagcgatggcatagcttggccaacaggttcaatcgagtacgatgggggttgtgccggataggtggtgaagctggttgtagaggtggtaaaacgacgatgaatggaccgattctgagcagaatgttgctgctgatcaaatatgagtgaaggcaaaataattggcactgagtttggcagaatgtcatcgtcaattcgctaatttgtgagtttggcgaaagtaaaatttaaaaaaaatgtaaatttaaaattacctttgcatcggtagtatttccatgaataaggtccgatgcagccacagaaacttaaaaaagaaaaaaattaaatattttaatttattttatttttttaccgataatgaaaaggtgaagcaaaataattattaaaaacatttgtttaagttattaatctaaaacctaagaaaattgaccaaatgacatgactttataaattacacataagtgggtaatattagtcaaattaattaatttagtttatgggttcttgatccgtcatatccaagatgaaaatttccttattgaatcatatgtgtatacacaaacattaaatagtttttttttacacttgattttccaaaatagaagttaggtaatacaaatgtatgaacaaatgaaaattcagcgtatttatacagaattttcagtgtaataaaaaaaattatcaaagaaatgtaaaaaaaaaaaacgttttaaattggtatatttcaatggacatttgatgggtggtcaaaaaagccgccaaccgattggatgaaaaattgcattgttagttcacctcaaaataggcaaactattgtaatattagaaattttatttatacaatgcaatcagcagacagaggctgacgacaaatgtaacaattctttcaaagaaatggaaattttttacaatatttattttatgttgctgcttaaatttcttcaaaaaattttcattttaatatttgaatttatttaattattctggtagaaaattcttttatttattttttttttgatttaagtaaatttcaattaatttaattattaattcagttcctctacttttacgcaaaaaattaaacggttatttttatcgaagtactaactaattacgttttttaagttatgatctttgataaaataaaagtatttatccatccgtaaaatcatagagaaaatcacaaaaaaaaaacacagaaattaatcaatttcaccgaaaatcacaacagtttgaaccacgtataaataaagaattaagatttaaaaattaaaaaggaattgctaacaatttagcatcaataatagaaaaataaaacggatatattcaatttggtgctaaaaagataaaacggttcaaaaaccgttgttaattctgattgaaataacggaacgattgggattgctaacaccaatttaaaacaggcatgtacagatatattttttgactaaatgtacagagggataccaattatctttgaccagcaaatcctgggccaaattatttataaaatccaagttatatttggaaaatttacatatatctgttagattatatccatctcatctgcacaagcctgaattctttgaatgcgcacatttgaaggaataataaatgtgggtaatatcattgtgttttgcttaatcactcatatggcataaattataaatattttatactttctttttctacgggatcaataaattttgcgacgacaataaaaggtgagaatttgaataaaccctacaactatggaattanaaataaataaaataatgctattagngtattgattatttaaaaatggctgcttgatgttcggatcagaattgatgaggttcgatcacaaaaaaaatttccaagtggaaagcagcggggagaagagaggtgtacaatttgaagaaatccagacaacag

SEQ ID NO: 15083 - DNA, 1349 bp, Heterodera glycines
agcagcagttatactgaattcattgacgatgaagaaaaaaaaacaattcagcatatgttttagcattttggcataaaaacaatggcaaaaattcattttcgctgggacgtgaaacagacacacagattaattttcgaaggaacaacatatttgatcgaacacatactatacagtcatggtcataagtgttgtcccatcatgctttgaaaaaaataattgcgtataaaattgtcattttccaatttcaacagataagtagcataccattggatagcattttttatgggctttccaatgataccatatttgcatttgtgacataaacatttatttgatttattttaccatattcacaatttgatcaaaatataggtggtcaaaagtgttgtcccatttcatttttaaaatattgcttctctggatcagcattaaaaaaatctaaaaaaattcaggtaagcataactttggatgctgatcaaaaaaggtagcaacaccaagttgatcagatcactccttcatggtgatctgatcagcccattttggctgggaacgaggggtaaatttcaaaaaaaatttctagggggttgggaaaatttttctggaaattttgagtaggcccattttatagagcacaaaattctctacaatattcaaaaaaccgcatgtctctatgacttataccggctgaggtatgggcacttcaattttgacgtagtgtaaaatgcactattttcttaagaaatacagtactttttataggcaccgaaataaaagtcgacgtatctcagcgggcctaaatcgtagacccactattccaaaggcttgcggatcgacttttgcggaccgacattatcgtttttgggcaataaaggtgtattctggtgaaaattgaattttcgacttttgttcgagttcgggatttgaaattggtagaaatggatgtcatattcgtgaaccccgaatacccctagaagatttttatcattaaaaacaaaaaaaatttttatctggtccaaactgtatgtacatgtaccgaatgtttttcaaaaaacccgtaagaaattaaacagcattataccgcctaaacacaattcggagctacatattatatgagttttaaaaaaatttattttaataaatatatcgcattttgtaaaacagacagaacgaacatttgaaatgtacaatagtgacacacaagtcaataaatacatagcgaacaatacgaaggcaggcacaattaagtggcacagattctcttttttattggggaaacaatttatgaaatgattgatcaattctcttcgcgtggctttctctgcttgaattgcctctcacaacgatttggt

SEQ ID NO: 15084 - DNA, 2831 bp, Heterodera glycines
tttttaccccaaattcatttaagatttttttacagaagattaaaaatttttgaaaaaatcaagtacctgataaaaagtcatagacaaaatcaatgatttttcaaaatctgagttcagattcgtgatcagcgtatttttctactcagaaaaaatgctttttataattttactattttttcccatcgggaccacaattctgcacctttgcctttttttgactatatggcataaggcaaaaattgaaaaaccccgaccccgacgcttccaaccacgaaccccgaattttccaaccccgacgtcggggtcgcaaccctagtctaacccctagtatggtatggattcaggctatttttattcttttggactattcctgcctttttgacgttaaaggttcgagtaactgcacaaaaccaccaaacacaactacactaacaccaaaaataatttatcgctatttttaacattacagaaaatttcattgagtgataattaagatttaagtgagggaatgtgcacaagctcttcatcattggggtatttgatggccaatttcgaagacaattggcgcaattgttcttcagtgagaatgggcaattccgagtggaaatcactccttcttagtttcgcggtcggctccccactttcttccttctccaaaaggcgttcaatcgtttgctgacagttcggcattatttttgtgtctttttgctggctaataatgccttcagataacttaagcatttcgctttgaagctttttcagaataatggtgttcggttgaaactctcccgttgcttttccttcttgccatttttcatctgcagaggaatgtttgatttttttcgatttgtcatttgccgtggctttttgttcacctgaaatgccttgtaactttgtaacgctgtccttgcacttccgcgcttccttcagtttcatttgagcctcgtaaccgtacagacggagaagtgacccccacgttgaattctgagggatgaaagaacgacgccaattaatgcaagaaaaaatatttaactcttttttattccaaaatatttggagttattttcaaattccaattctgttcaactcacattcggatgcaatttcttcagcatcgcttgcgccgccttctgtttcccctcgcgtttgttggtggacacaacgcgcactctttcgctgttgttgccgccaacactcaacgcaaattcatgcctttgatggcggagacggcgcgtcgtcagttggattgttgtgttgccataagttgagcatcgtttcagatactcctgaaaaggcgttgcatggcttctcctttcaaactttcaacaatttacagtttcgattccctacttcggacacccacctgaaggataaggtacggtgaaggctgcccggcgcgtgccgacagttcgggaattcgcgtgtccgttatgctcaaaaggtcgaaaatgtgcagaggatcttccgaagccgtcgcattctcttcgcacttctctttgtttaattgagtattttcattgctaaattaaaagaattgtccaaagatggtaactaaatttggataattcggcattaccctctgctgctcactatggcaatgccttcctcatcaaaatcgattcctggcaccaattttagcagtgcgtttttggcagcgatcagtttggcatttttcttgcccgctccaaaaccttcaccaattgcgatcagctgatcgtttgagccattatcatttaattgtaattgatttctgtcgcttccttcatccaactgtttcttttgttcgtttggcgttggataaacgccaatttttgacgcactaaatcacttgtcaattggtcaaacgaagatgaagacggcccagcagcagttggagtgccggagctgaccaatttagcaacgcaatgggaagggagtggcactgctccttagatgatcaaacagtccgaatttgagataaatggacgataaaactgacctcgtctcgttgaagaagtaacgaaccgtacatttaagcaccttttgaacaaattcttaaaatattcactacaaaaaggcaataaatgaaggcatgaattaccatgtaaaatgctaactgaagttttgccctgggggtttaagtaaaaagtccgttggtagggttttgagtcggcttccaatgcgggcacagtgattagtttaacggaggagggaagagctgcaaatgcgaaacaatgaaattgtacgaaacagaccaacagaaattatggcagacccaaaaacatcatcaattggactcacatggccgcgcctctctggtgcttgcgccgttttgcgtcgattgattaagcgttctgcgagcttttttttgcttataaaaattgcgagcttcggaccatttccgaaagcgtaaaacgcaaatgtttttgaatttgaagcaattcttggcgtattcgtacaattgatcggcatttaattgcgaattgtggaggtcaacttcagtctaaaatatccagacttcgttagtgttccttttcaatataaattacattatttcaaataatttaattaaacattcaaatattctttggcctcagtttcgccttaataaggaattaccttaactttaacactcggtgcactcaatttgcataaaatattggcatctccttccactgtgcgcgaaaaaacagggatttttcgttaagttataagcttttacgttaaaaatgtatggaatggaataactcacctttagcttcttggttgtttttctgctgttcagttttctcaaactcgctttgaattttaagcggaaatagacaaggaatggcagattcaggaacccttaa

SEQ ID NO: 15085 - DNA, 3043 bp, Heterodera glycines
cgtctcttccgagtcggatgcattttcctgaatttctttgcttttccgtcttcccgtcccccatttccttacctgttcgtactttttccgcttctcctttttcctctttttgctgctgctactcactgcactgtgatagtgtccacaaatgtcctgcagtgatttgacaaatgaatcgaagaatggccgtttcaattgctcttcctccgccgtcgtctcgagttgtccgctttctttcagttgttcctttatctgctcccaatcggaatttggccctaccgccggagaaagcgaccgcagcaaatcccaaaaggccaattccgcccttttttgctgaaatttattggcccggtggtgaatatttcctcaaataaaaccttttttaattcgtcacgttcagcctcctttttcttcatcagaattctgtcacacaaatcttcaaatttcgattgtttatgtaaataaaaaaagatttaaccaaaatctaccattaaaacagagcttcacattcacagggtccaactgatcggaattcggcccctctttaacccattgtcggaatgcatcaaaagtcgttgactcgtcaattgtaattttcttaaattcgaggaactccttgatcgtttttctgtcctcgtggtatttcgtcctcaactcatcaacataaaatttgaaaaggtccagtgctgttgaaccattcgtaagaagcttaaatacaaaattatattttaaaacatttcttcggcgatttttcattattccctccccaatcgtttcatttacatttaaacttaaagaaaaaagtaccatattttcgaatcgctgatccgcagatatcattgggtagagttgagcccagctactggcgggagtcaccttttagtaacaaaataagtttttatggtgaaaaagtatcactccgtctcattttttcatttaaatgcctttatcggcctacaatcaagggcgtagccagacccttggcttcgggggggggggttgaacccaaaattcgatttttagggggtgtttttcttttttggaaatccgaattcgggagtatgttttacaggaattttaatagccgtttttcgcataaaatgacttgcgctcttacacataatcacaataagttatccgtataccaatgctctgtcgtgcaatccgtgcagcagttggatgaatgcttctctcgtcttcctttcctgccgcttaattcgcttagcttcgagttgcttttcctttacgtattgctcctcagaaagtttgatgtgcttttgaaatacaaccagagcatcttccttgtccatcccttaaaaggagacgttgactaattgtaagtgtcaatttcttcactctttttaccctgtagcgtcgtgtccttagcaaagcttggattttcgatcagaattcgctgtgcttcggcccacgtcgttctgtagtcgattttgtcaattccgtccagaatgtcgctcagtgcctgtcccccgaatgcctttcctttaaatatgttttacccccccccccccttcgtcacttttatgtttctctctttcaacgcctttttttgctctgtgtccttttttgccaatgcgattttcacgtcttcaaagatttctctcctctctggttcagtgacagctttccattgcaattccatggcgaaaatcccctcggctttatggtatctcagagtgggtttcattctctgatgagccatcagcctaaataattgcacaaatcaaaacaaccgccaaaagcactcctttatttaccatttttccaagccttcctttgccattttgatagcaaatcttcgctcgtcctttgggaatggccaattaaagtattaatccattggccattaattaccctctcttctttgtaccgctgtgtcttccatgcgttgaacacttgcttcttctcgcttactttggccagtattttgtagcgcggatcattctgaatgtattttgacgcctgttcccaattcatattcgtgttgattcgcttctcgttgcacttaaatgcttgttaaatgaatgtttgtccccttccattgctatggctttgccttgtcctgcagcatttccctgaatttttccacttgtcttttcttcagattgtattcagaatcgtcctcctcctcctttttttgtgtaatttctttcgcttcgatgggttcgtcgctcttcttcacaactaaggtctttaaagtcgcttccattgccttttcaatttcggaattcgatgaaagatgaaccaaatcgggctttgattcgttcgctgcatcgctttcttctttctttgtttttgtttctgaaaaaagataatatcgttctgaaaggaataaaatgactataaccgagctaaattttaacgacacttaaattgaatgttctgggattacatctatgacaatcattaagaatatgattttataaaggtttatttttgcaaaaaagcactaaagatcgaacaaatcaacaattgattaattcttggtcagataaagcattccataatggagtagatgtttggatctctaagctaaaagttgttgtgcttattagaacattcgcacaaaggaatttgtttgaacttattaaccatactctgatcaaattgatgatttcatgataagaacccttagaataggttttgtgctccagagcaaaaaaaaaagagaatggacttaactttgttcagcgcttcgggctttgaccatgttgtgacctttgtttgggtgttgtaataataaggctttccttccggtgttttgtactccttccatacagaaagctctttctaaacaatccaaagtatccttatgaatttcctcccatcaaatgacctcttccttggtctttaaatcgtccggcttggtccaggaagacacttttgttgccttattgtaatagtaacttctgccatcatctgcggtgtgttgggtacaaactgaagttccgttactcacaccggcggacgactcagctttcatttcatttcaaatattcggtgctatcagcatgagctgtggcgg

SEQ ID NO: 15086 - DNA, 3013 bp, Heterodera glycines
atgaaatgcccggaaagtgcatttggcaaagcaaagcattggggggggggattaagagaatagaaatgcactcgataatatgctgctgatatttatgatctttgttgattttttatttttattgttgggcagcaaaaatggagtttgggtttgaataattttttttcattgaaaataattgtaataatttgtaaaaaaattaaaaaatgtaaaagtgagaaaagccgcaaaaaatgtaaattaaaattaatggaatggactttgtgttagggcttcaaaatgccctgctgatttctcagatttgcaccgacttgggcattctagtgaatcgaaaatgccttttttaaactgattttatgtcgaatttgactcaatgaattgaaaaagttcatcaagaaaatagaaatatccaaaagcgatcgttgggtcaatagaacagaaaacggccaaaagacaattgggagaactgcttgtgcttgcagttgtgggcactgatcgcttcactgacgtcgacgacgattccctggaaacgcacctccatgaacaccgattggaccacctcctccccggcacagtccaagcgatggccaatgtgctgtccctggagatgaatgagtgcattatgttcagtgtggcgttctgtccgcgtcgtcctccaccacctgttcgatgtgctgcttgccaagcgcgagggattcgcggaatcgcgcgttgtaaatgcgcacttcgtagtccgtccattttcccgtgccaactacaaatattccttcgttggcacagcccgaatagctttgcgagttgctcgacgcactcagccgcacgcgaccgatcacttcgccttcgatgggactgaaatggcactttgaaatttcgatcgttcaataattgtgccatcacctgtaaattttgggactcattgtttgtctgttgtcactttgttcaggcgattcgcccgacgaattcggctcttcgggccgaacattcggacaaacgatttcccacccgcgcactccgttgaaacggcttaacaaacacgggagtcaacactgatgcttcttagtcagtcaatttcgcactattcgacctgtcaaatttaaatgggagtccctcgagggcatttgcgcgatttgtctcgcaaatttggccggtgcacatgcctaaaaccgaggggggtatttgacataatcggcttgcgtacagtcgatcagatgatgggttgggtcgatgggtttgtcctctcggaagagttccatgcgcacgaaattttcgtcgcccctcggcttgggccgcgtcccggcacattccaaatctcgtgccacgccaattctttggcccgcattcacttcgccaccaaaacgaaacagctggacggaactgatcagcgcgtgatagcctaatcagtagggagggcggggggagtgatcagccgatgattggctcacccttccagttgcccattattgacaattagcattgattgacccacggtgcccatcctgccattatccccaccctggcattgacactgttggctaaccctgccattggcctcggccgtcgatccgaactccctgatccggcacacattcgccctttgtcccctcctgcgctcggctccctcccatcggacgataagccgaaatttcgccatcgaaaggagcgcgcaccacggcgaattcggggcaactgaggtcgaccgcctcgacaaattggtcatttcgcctgacatttacaagtaaattttggggcggggcgggagagaatggcaccgcaaagcgcgaaaatggccacaaaaagagtcggaagggcaacgaatgatgcgattgatggcatgggaagagggggagggaccgccggcggcacaaacggcggacatacagccgagggcattggcaaagggacgatggaggaggaaaagcaaaagggagagagggaggaaaagcatggcaaaacgaaagtgagaaaaggaagaagataaatcgagggtgcaatggcaaatttcacaccggcaaaatttattaaagtcacatggcccgaaggattcttaagcaaaaattaaactttttttggcgaattgaatgacactaattgatacataagggcccaaaaattagcactttcccattcccaaaatcaacaaaataaaggaattgagataagaatcatttcattaatggtggtgtcccctttcatcttcgcaaaaccacaaatactaatataaatggggtccttattaggagatgggaaagaataatattagaacagaacaattggacttaatactgtattttctaaaaaaaatcaaaaattcattggataataataataattctgtcaaaagcaaataaaccgtacttttgagagcatgaaaaattaacaaataataatgttaaaaatgagggtcaacaagttgaacaaagggaattcattcattcagtgcataatgtacgtgttgtcctcgtccaagtcgcacaaatcgccatggaaactgatctgaatgcgaaagtccaagtcgcgtgggttgcggacgttcgggacaacgctaaaaacgccatggatttcctcgtttttcttcactgtcagcgattcgtaaaggtaaaagactgaaaaaaagaatttccggtaaaaatggaaagaatcaccaacctgtctgtttccaatgctaaaaacattgaaaataattcaattaaataaaatgttgttttgctgtgcccaactgaccgtgtatttgcagtccggagctgtgctgaacccaactcgtttgtgacatttggtgaattcgacggtgaagaaagtgaccaacgcttgcacataatcgtttcgaatgacacgcaaagaaaaagtggtctcaaaggcaaggtcggacacttggacggtgtacaagtcgacttcctaaagcaaaaagcatttcaaaattagcctttttaaagaaatctttttttttaatttttggtttttgtttatctgcagtggaggaaaatttttttttaagtttaaggcaagagagaattca

SEQ ID NO: 15087 - DNA, 2075 bp, Heterodera glycines
  unsure (1)..(2075): unsure at all n locations
atcatttttatggctttttcctaaatgccattcagcgtcctcgcaaactgcgcgtggatccgcacttgtgcgagcgtgcgcttgcgcaggacggcgacttccccgcctatatggacacggtcggcacacgcatttgtacatcgacaaaagtgagcagaggggtggggcaacgctaactccacgaactttttcactcaaccctccctcacatcgacacaccccaattttccattaaaatttttccaaggtattggccattttcaccgccggaaaccaaccattactaaaaatttttttaattttaaattcccaaaaattcgtcattttgattattgttagtaaaaaaaaaaattatgtcgagaaaatatttcgaaaatttaacggtaaaattcaaatttttactgtctttaagattgttgccaaagtggccagtgttctcacggatgagccctttcggttgccgaaacaatgcgtggttagcacatttccattgaattttttatccgtttttttaaatttttataataaattttatataacattttccggttagaactggtgtattattcattcgttttttgtatttttagcacttttctcgtctcattctcttcgcttattttcgcgaggcgtccgtcgcattttgtgagggcgaaacggcggcggacgcacaaaaagacgctttttgtccgctggtcagacggacgaaagcgtaagggtcaaaaaaaaaaattttttttttttgcaaagagacaaattgaagaaaagattccctttttcggagccaaatttggcacgtcaataaaagccaatgttttgaaatgaatgttaacggcgtcaatgctaacaattactagtagaatagttgggccatgtacaataaatcgaagacatttacgactttttttccgttttcgagtctaaaatacctatcaaaaagtactcaaaattctattgcataacgtaaatttttatgttatttgctccattttaagcgaaatccacaagcttcgcaaggagcgcgaagcgcaagccaaagagcggcgcacgcagcgccgtcgcgagcgcatcgagcaaagcaccgtttgggagcaattgacacgcacattcaccgtgggcattttcgtttgaacattttcaaaaattgatattttctaaatcaaaaaattctcgtctcttgtcagcttttttgaaaattattttttcgctgtgctttaggccggcagtggtgacgacgattcggacgaggacaatgcggcggagggagccgcggagcggtggaagatggagccgatcagtctgttccagcgggtgaccaccgcactgtccaccaaagcggtgaacatggtcagtcgggacaatggtggacactaatgagccactaatgggtgtggtaatgacgatgaaaattaagcaattaacttggtcgtttcgtccggtggtgccggcagacgcggaattttgcaaaattaacgaaattgaaatgaaaattgaaacaatttaaaaaactactaattggaattcaccatttgttgtccattggttttcattttccaggccgccatgctttacctaggcatcgatttgctgttgtgcatcgtcttcttggccgtccaaatggtcggtgcccattgggtgcaattgtctgacattttccggtatttttaaaacatttatgtatatttcctgggatctttaattttggggtacttaactgtttaatcttctactcattttttgaaaaaattatttttcatgaaattaaaaaaactactacctctttagcaatttcaaactttattttccgttttttcaaaattttaaaaattttttattttttagggattgccgattaccgatatttttgagggtcggatttccgattcagtcacgggattcatatttccaaaattttgtgggcctcggaatgccatcccttcttttcacctatgttncattttccgagcaacaaatgtcttgtaaccgcaccgatggggatggtccccnaaagtgaactgaactcaccccggtttttctgggttcctcagctttttaaccatctccccccatttcag

SEQ ID NO: 15088 - DNA, 1645 bp, Heterodera glycines
atttcctttttcctctcttccacagattcagtccagctccgagtcgttccgcgtgctctccttcctcgcccaatttgttggcattcccaagtccattcagacggcgccattcaaacatgtacagagatggcatagccaaataattaatgtagaacaattttcttttagtacattctgttgttttcgattatagggaaaccaaaggcattaaaaacgggtcaaacgattacttcaaagaaaaattaattcagtggttttccagtgctgccagaggggaaattcttgttttttaaaaattggttagaaaattttatacctaaattatcggactattttaatttcggttatacttttctcattcgaagttttgttcatttttcccttgcaattattttaggttctcttccgtttggtgtacaatttgaatttgccctgtgcgtttgagcgtcaactgagtgcactgctcgacgttcttcccccgccgctgttcaccgattatggcgcacaacggctgggcgccgcaattccgatgatcgacaaaaagtacataattaatcaaacagacaaaaacgaatttttatcttctaaatccttcgaggattaaaaaaaaactgaaaaaatcggaatttcaaaaaaaaaaaacttaaagaatattaggaaaatccattttgtatgaacttttcttatatctattcctggctaattaaaataaacccagtgaactgctccaactccttctctccgtccccaccggcagtcaggggccaaagggtggcaaccgctctgtcggtttcatcacctttctgcgctatgcgtttggtcaaacgcaacacgaacgcggcaccaacgcggaaaacattgaaattttgaaggaccgacggcgaacggtaatttggcaatggtaaggcacggaattgccacggcattttggacaaaaataaatatgtagccacaaaatgggaacggagggcctgcaatttggtccattaacaaatgccaaatgttctcttcaggcttccaatgccaagcgaagtgaacgccgccgcgttggttctgtttgcgatgaaactgttctttgggcttgacggggaagaagacaagcagcagtcgcgcgatggcacaaagtaaacaaactgaaaaacagagggtgcacttcctttctttaccttctatgaaaattttttgatttgtgggagggtaacggatacactacacccccccccccccgttccgaaatttttaaaatttatggtgaattactaacaaaatgtttttttttaatttttccaaaatcgctgaaaaatatttcaaaatatatttcttcaaacttttcgtataaataaatttcaaggacaaaatttttttaaaacttcgaggggggagaacgacgggggaaatgagctgctgccgagggcgactagggtcagaggcaaacgacctgctcccaaaaataaaaaagtttattttggaattaaacattttcagcgaagcgactcaatgcgccgacgatgacagtccgtcgccggtgttcagcttcgaccattggctgctgcaacttcagctgcgcatgcactgctggcagggcacaacggttcagaaggtgttggacaacacgtaagtggtggtggccatacatgcacaaggg

SEQ ID NO: 15089 - DNA, 2788 bp, Heterodera glycines
ccttttcccttcacaacatacgcatatttgctcaattcttccggcattttcaacacgcgaatccatcgtcccgttgccgtcgctgttggccaaatttgtccgttttggggtatttctctgtccacccattctctaaattggtccatcatcggccaaatcctcgcccgaatcactgccaccgcgtgttcatctccatcccccattctccgaacttccgcgacaatttccctggttttatggacatgcaacggacctttgacacgcaccgaacaattcgcgaacattcgtaaggcatcattcgacccattggaattgagcacgacgaaacggaaggactgatcggaagggaagggcagacggagcagttcaaacccagctggggcatcttcgctgagacgatcgatcagaaaagtgcgcagagagagagaagaggcaaaagtggaggatggaagagaaggcagagaggaagaagagactacagcagaagcagagggaggggagggacgaaagataaaaagataggcagaaaaaaggcaaaaactcacaaaaaaacaaacctggcattctgtattcgtctaaggatgtgccctcctttaatttttcttcttttctttctatctttcgtttaccacttccttcttcttttacttctcctcctctttctcctccttcccctcctcctctttccctttctcttcctccctcttcttcggcctctcctccttttcttcctctttctccttctcttcctatttccctttctcttcctccctcttcttcagttcctccttctccttttcttcctctttccctttctcttcctccctcttcttcggtccctcctccttctcttcctcctctttctcttccttctcccccgtttcttccgtttccgttttgctccttcctcccctcttttttgtttattttatcttccactactttcgcctcttctgtttcgtgttccttcttccgcccctcttttccccctcttccgcgtcccctcttttctcctccccctccctccgctccatttgcccccgccccgatcacttccaattccaccgtcgcttcgttcgccctcctcgtcatccccgccccgtccctcgccttcactcgcactttggccacttctccctctgccattggccttttcaagcgaaggttggcccaacatcgtggccactggcactgctgagagtccaatgcgaacatttcccctttctccgccgcccctttttcgttttgcgttttctccaacgaaaagcgacaaattccgccaattcctctgtcaatgtcaatcacttccaaacggcgcagaaggaaaccgggggaagagagctgtaaaaagcgaaaaagaaggctaatggacaagaaaactgctgccggggaaaggacttcggggacgatcacttcggcggggaaagggccgccgaagaagcggggagcattgtcattgacatcgaccaattgtacttggacagacgcgtggtcaccggtgccgtctctctcgaaaagcagagaaaatgagggggaagaggatgggggaaaagcatcggatgaattgggcgaggggaaagggggctaaagagggacaaagcatttcattaagtgatagaccaatccgtgcccaacacacgtccgcttccaacggtctgttcagcttcagggtgaaacaagtcccgttggtacgcacgacgctgaactgctcggcgttgtccgactttccgtttccatttccgtgccggaccaaatgaacgccggtcaactcagtcctgtcgtttcctttttgtttctcaatccgatctctgtccatttcagtttcggaacatattttgacgtccaattccttttcgactggccaatcttcgtccaggaaaagcactcggggatgtgccacgagttgggtttgctgttgctgcgcttggttttgggttaaatatgccaaaagacggaatggcactcacaaaagaggggaagacgggagagaagggccaaaaagaggcaaaaacggagcgacggacagatttgaatggggaaaaggaccatttgatgggattggttgagaagtgttcgcaattgtcaaatgaattgaaaagttcttccgacgagcgaatgaatggccacggaaagcgacggactgagccaatgggtggccaatgcttttccttggctctgcgcgaagcgacccccgcaaaatcggcccgtcccccccccttcgcttcgttttgtcctccgttatctcggatttgcattgtttgttctattcttctccgctggctaagctttaattaattcgttagagaaacaatcatttcgctaatcgaacaacaattatttcaatccctcaaaatgttgacaatcagcggaattattttattgttttaatccattcccacttaaattgtgcgtctatgcagtttaattgctcatttagccgggattatcctcttatcctcccgcgtggtgttcgtccgtcgtccttccattttcgttttgccatttcttccccaatctgtccaaatgttcctcttcttccttttcccctttcttctccaattccgtttcactcttcccaatttgcttaatttctcttcgttctccgactttttgatcgcaaatcgcattaatttgagttcggttggaagtgccgaacaaattaagcaaaacgaccaaaacaaaagctttattggcttgtggaacattgagcagatgtcccgctgcagcctcaaccgaagtgctgaactgacgtacaacggatacggatgcttgtcagatgggggaaatg

SEQ ID NO: 15090 - DNA, 1497 bp, Heterodera glycines
  unsure (1)..(1497): unsure at all n locations
gttggatcgcatgagtcaaatttcatgcctcaacagagtntggtgctggtccaggctgatcagttcttctgccagtcgcaagtgcactaaaagtgatcggttggcattggcattccgtcggtttgccattcattcgctgctcactcacattgttgcagttctgccgcactgacccccggcactgcccatggccaagacggactcgtccaatccgctgacattggccaccgccaattccaagtgccggcagttcagcgaaataagctgcagttggcgcacaatctgtgccgaaatggcaccgatgtgctcctctctctgagacttggacagttcaaaattctcctataaaaagggaaatggcaaatgaaaaaagggaaggaaaggaaaggaccagaaaagtgtccatttgttgctcccgtcctttcaactcacgaaatttgtcacttttgcccccggccaacatttcgaattcgttttgcatttcctgcaattcctcctgtgcctgtgccatccgttctttcgtctcttgcagtctcaaaatgccaaactgagtttcttcaatggcatttccccctccccccgcccggcccactgcgtttgcatctgcgcaatttcctcgttgtcgcgttggattcgctgtgcgaaatggtcgcgctgcgcctcgggcgtttccttcgcgttcaattcgcttacaatggccgccctccgctcgcgcagctcctgcagctgttcctccagcatcacttaagctccatcccattgtcatttaagctcccccccccccactggtctgctgtttcagcggtgagttggccaatgccatgtccaattgctctttcctccggccaatctcctcaaattgggcctgtctcttggccaattggtcggctaattgctccgcttcgctcgtcactcttccgaaattcctcctccaactcatttccctcaatttctttgtcccttttcctctttccccccaaatgccaaccatttcgttcattttcgtcgcattttccgctttgattcgtccaattcgttcttccaattcgctcgccgtttcttccttttgcttcctctccctgaacgttttctccactctgtccaccatttctgaacgttttccttttccccgtattatttttgctcaatttgccctgattcgttcgatttgcctccaaaatttcgccctccaatgcccttagattcgaatcggtgttttgtcggtcaataatctgtcggcatttgcttttgctttgctcatttgctaattacttgctaattaccgtgttgtaatccgcgagtgttccctgtaactgcttcaactcgttggcctgttcttctgctctgtgccaattgttctttttccctcctttttccttcttttaataatttacctttgttcgtatgccaataaattctcttttcctttttccgccttttccaattcaaagccaagcgaaacgacctcattctcaagtgcgtttaattggttgttca

SEQ ID NO: 15091 - DNA, 567 bp, Heterodera glycines
  unsure (1)..(567): unsure at all n locations
cacctttggatggcccaataattaattagttaattaatgttttatgtattttcaggcttcaaaatggcattcatttgcttggactgtttgcattgcttcttaaacggcattgttgctgcccattgcgcaaattgaacatttaattgccatagtaattaaaaagcattgaaaatgacaaaatacccaattcggcggcgaaaatttaaacaatttttcgatgctttataagaatttttggtcattttgtttgtccttttctctgttttttgtcacttttttttgcggaatttgtcgaaaagtgtgaatttaaccgcgtgggctgtgccttctttttcacaactcattcattactttcccaccaacaaaaattcactcattcgttcgtcaacgtcaaacaaacgacgaatctttctttttcggggggnggggggggggaaaaatcccatcaaacaattccattgattgaaaagtggcgtaggggaaaaaaacccccccccccccacaaaaacaccttcatcaaagtctccctctcccccataattttcaactcttagtcacattctattt

SEQ ID NO: 15092 - DNA, 1337 bp, Heterodera glycines
aacagattccccacccccccccccccccccagggcggcactgttcgagaatggcggtaccgagacgagaaaagtctcgaattgtgggagggtgggggtggcggcaccgatgaaccgtctgcggttgataagcgttaagataaagattagtgttaaaattaatgaataagtattatttaaaaagacagaaaattgaaaaataaattaaaatatttaagttgtaaatttactcctattttaatgccagaatccccagacatgtgttagtatttaaaaaatttctaaaaatttaattaggttcaagccaatgaactgcatctgttttttctctgacctgacttcaggcccagagaaccaggcacagaccgaactttataaagaaatatatttaaatgatacatatgaaaaagcattggtattaaaaatgaatttttgaataacgagaaaaagtattgcccgaaaattagtgctcaaaaatgtacatcatttaattctctccaatatgctaaattatgtttaaacgcaaaaattccacgtgaaaaagtgttgccaaggggaggcaatggagagaaaagaaagagaagaaaaagaaaaagagagaaaagcagaatgccaatgccaatgccaatgccaaatgcctacggggggagggcgaattggcagtgccattgccaatggttggatttttgtctactcattcatcactaagtattgtgactttacatcaaaaaaaaaataatgcacagaaaaattgaaattagaattgtccaaataaaaagattaagattaaaaaaacttaaagttatattttttaaatttttaatggttattttaatatttaaaagtggtttagggcctttttttttgatttttttttaatttttttttaaaaagattttttgataattttttttttaattttaaaaaaattggtttatattccagttcttttttttctttcgtgttgcgacacttgcgccgccaagcaaaaatggacatttgcgctgctaattgtaagtcaaaatttattttaaaaatttcaattttcaacgaattactcaaaccacaatgcaacaacaaagaagcaatttaaaaaaatgcaaaaaagtaatgaagatttaataagccgcattcatacatgtaaattttagtttactaaaaatttttggattattttaaaatctgaatgaacggtgtaaatgagttttgtagggcggcgcaaatgttggtacaccgttgtattaatggatgataattatttgatcgattcaattggcgtgccattccttcgtcccccacttttaatggcattcattttcgattcgcctgcactaatga

SEQ ID NO: 15093 - DNA, 943 bp, Heterodera glycines
ccgttcggcaccgctttaaaagccttcccattcaaaaccttcattgatacaccattaataatgaatgatcctacccttggtcgttctacaaatgacaacaaaattttttccagaatttacgcgttagcatgaaagatgtctgcccgaactcatcaccagcatttgatggtgccaccaatgttccgttgttggccaatacgcttaatccggccaccgccgacggcaccggcgcgtccagcacaatgggatgctcaatgtgccagtcgtaggtgcgcggagtgtacacgcggaaaatcggccaaacggtcagccattcgccgttgtccgtgttgcattggtggtaaacgcgcaggtaaaattcgggcctatcaaaagtataaaatttttttattttttagtaaaaaattcacgtccagacctttgcctgggtttttgcgtaccgcttatttgttagttaaatattgaaaaaactgagcaaataagcaaatttgttaaatatttaaatgctttatataatttgcttgaaaaatttaatttacttccataatattattttaagccaaaattatattataaatacaattattatgcttaactgctccgtttttattcaacaaaaatttgattaatatccaaatgacacccaatgtttaagctttgacaaattttcattaatttctgagggtcaatggcaactcgtataatgttgtaaaaggaaactcgtattttaaaaaaaccataagcctacggcctaagcctaaagcctaggccaaatcgaagcaattgtacgagttgccagttgtacgagttgtcatgacaccatttttgataccgattgatgctaaaccaatcatgatcagatgcgcaaccatccaacttccataagccagtcgggtcatccacctctgtgaatgtcgccttgtcgtctgagtccagcggattt

SEQ ID NO: 15094 - DNA, 2305 bp, Heterodera glycines
  unsure (1)..(2305): unsure at all n locations
ctttttcgcaaaattttccgatttggggtcaaaatcccaatttagctgatgggggccgttctaatagaggttttttggaaaaatgtcgaaatatgggcataagccaaaatatggaaaaatatggaaatatggacataaatcgccaaatatggaaaatatggatatagaaatccagcctagaagctttaaactaagttaaaaacatgtttttcgtgcgtttcaggcctcactcagtccaggaaaaaaatatggatttccatatattcaggccctagtcataagagattgattggaacatgtttttttgcggttttttagcgggcccaattctgcactttttcctggccgaacagccctacctaaaatcccaatagtcggcatcaacaatgctttttatttatcaatctctttttcacatttctccaccatttcttatgaaatttctttttcttttttttcctctaaaaatttttccactaaatttttctcgtaattttcatcaatttccaggtcccggtcccggttttgcccaaaagtccctgtcccgctctactctaatcttttttccacataatttccgctttcccagaaactttttcacatttgtttcatcaaattttgcttctttgttaattcatcttttttcatttgcatctcttttctctccttctcatctttttccgtttgttctttacgtcgtttctcttttaattcgttaatttcgtttgttttttcttcaatttcttttttgtcattttttggcatttttttgtttctttttgtcctccattagttcgccctccttttctccttccattggcttttaacaaaaacatttatcaaaaacaattacggtgaagtgtacgaattggcgctatactttttcgtcagtaaacattttcgtcagtgaacgatttcgtcagtgattttcgtcagtgaacgatttcgtcagtgattttcgtcagtgaacgatttcgtcagtgattttcgtcagtgaacgatttcgtcagtgattttcgtcagtggataatttcgtcagtgaacgttttcgtcagtgtactatttttatttatttcactgttttccattttttttcgtcagtgttccaattcggcagtgaatattttcgtcagtggctatttatatttcagtctcatttttttatatataattttctttgtgtaattttattttaatagttgagaatttgttttattcaaaaaatgggcttaagcaccataaaatgatatgatttaattatttcaccacaaaaaaaactaaatatttaaacgcctatttaatttcaaacaaattcgacagtggacgattttgtcagtgaattccttttttttaaaaatgcttaattcaattcaaaagtgcaaatggtatgcacaggcccgaagatattcaagcggatcacggtttccaatgtcctgtaaaagagcatttaaattgttgtcttgtctgacatatttcccctttcttgctgcgtgtggcccccttattccatcagcaggcgcaatctgataatcaataattcgctgagaccacatctcatcttcttcaatcattttccggacaaaaccgctgagtcgctgatttcctttaagatgggcattccaaatggcatgccagccttcaagctgtaaaaacttaaaaatccgatccatattcataaattataaaatttaattcgacaaaaaaataaccctgtagctcagctgttggattgagggttgacaccacaatgcaaaagtagttataaacgaggccaataggaacaaatgccaatgcttgcaatgacctacggtgaaataaggctactcataaacaaacaaattttacaagcgaatttttcccatttttataacagtgtttttgactatttataatattgtcctagccctgacctaatgcttcgttggaactcaatttcctgaaggtattgggtgtgtaggttttggagcctttggatgcggcggtaaattgcctgcccaaagtgaaaaaggcagccatttcggattgcatttggaaaaacaattcgagcagaatgaatggctgccgattcaaagtcactcattagcctttgcggcgaccaattgttgccaatgctgtctctgattgcctcaaagaaacgtacatatgttgccccctccttatttggcaatagcccataaacgcatgggactgaacaatggtcgatgattgcgctcattgtgtacaactgagcaaatccccgcgggcatgactttaacggttaaaaaacagtaattaaagaaaatgngtaatatttttacttcaaatg

SEQ ID NO: 15095 - DNA, 483 bp, Heterodera glycines
atttttccatttttgtattaattttctatttgtgcctaataattttgcaatttttctctcaattttgctttgatttttccattcaaattttcccgtttccccaacttttctttaattgcatcaaattttgaacaatttcgctcttttgctgatcagtttcattctttttataactctgatcacatttgagaattttttgatcatccgaattgtccatttgatcaatttgatcatttcccatttcatcaccgtttggttgaagaaaatgaataaattccaaattttcattttgctctttttgttcaatttttactgtttgctcactttcttttttgtccaatccgtcgccaaatatttcatcaaagtttggtcgaattttggcggattcaattttataaacaaagaaaattatggaaaatatgaaatgccataaaagcatttttgtggaaatcaaatttattgctgtaaatgattatatttaat

SEQ ID NO: 15096 - DNA, 3608 bp, Heterodera glycines
ctttggcatccatgatgatcagccacattgatccccaaaatggtccgcaaaagtcaatgtgtattcgtttccacgatctttccagtgattcccacctgtgcaatggcactttctgctcatccggcgcctcttcttggcaaactttgcaccttttttggattatttcgattttcttatcaatgcctggccaccccatctttttattggcatgaaaaattaaatttaaaaaaataatatggaaacctgtcacccttaatatttagtcaattcttaaagctgtctaaatgtatggttatgcgtgtactatagttttagtttgtgtttagaccagaataccatgcttatatcaactgaaaatatcaaaatccttctaattctatttaaatattaaatgatttcctgatttttcacatatgtttctgatttgaaggcaatctttttttgaaaacaaaaattttccgctcactggccagctttctctaccggggaatttcttgtgaatttttctatgtttttcaattcatcgacgaccctttttttgttttcataccacttttttttcgtggcgtgcttttttcaaaaaaatcgtttaacatgaagaaggggctagctatcctagaatctccaaaattttctgttttccgttgatatttttctttttttttctcttttggtttttttttgttatgaaatgttggtaaacttttcaaattgaaatgtaattaaattcatcatattaagaatgttaattaagactgtttaaatccgacaagagagccgattgtttttcagaccgtctttccaatatgtttttaattcccacttttgacttccgggacagtttgacctcaatgaaatgttggccggtgcaagcagcgccaatagcagtgaccaccggaattcggtcattattggattttattaattcacttttgaagctttaatgtaagcaattgaagcattcgaaaattggaagtctttgtatatttttatttgttttaaaaatgctagaagaaaaaagaaaaaagtaacaacaaacagaaaacaaattttaattgaaaagccttaataaattacactcataaattacaaaattgaaattgttaagcaatctcttttttcattcgataagcctgtttttgaaaatatgtcttgatttgcaagcaaacaatttaaatttatttttaaaaaataataattgagaaagatcagtcgtaaactgtgagaatttccatcccaaacaataaaataaaaaataaaaattttttttctagttttcatttggttaatatgtacaaatataatcttacaaaatgacagaagtaaccttttaaataacagaagcgattttttttatgtaatttcgttcattttacgaaatgttcaaaatgaaaattttcgagattttctctaaaatgacaaaatttctattctttttttcaagaaccaacgatcagttttctaaacaaattcccttttccatattgtctcagtgttgcgccgcatccaattcctaagtttttggcaattattttgaaacttcgccaagacataaagcaggcgcaaaaaaatataaaaatttttcaaaattctagaaaaatttgaagaaaatttttaaagcttttttaaaacctaggtattacttaaaacaaaatttgtagaattaagaaatttaaaaaaaacatgaaaaagttgcaatccccaatacaaattgtaaaccgtcaacaatagtcctttattgggtaataataaaggggtacaactggaggccccagcccagaacgtcctcgggaacagaggagcgcttgagggggtccctctcgcaaagttggatcggccaaatcccaaaagtgatcagagaagaacgacggggggaggataacaattgaagggaccgccccgtttcgccccagggacatttgttaatgatagattagggggaacaattaaatgtgttaaatgagtaaatgatcgtatctcagtttcttgaatttttttaatcactgtgatcaactggtagcaaattctcttttccatctggtcagagttgcacttccaattcccaattttttggcaattatttcgtcagtcacttttgggttggcttcttttatttcaaaataatgcttcaacttttttaatttgttctcttctgaatagaaaattattatatgcttaaaaagaaaaacccttacttttatgatcatttggcatcaattcctttttccattttaaaaatgttgcttcagaaatgcccaattctttcgcaaattctttctgtttgccttggccatataattctttaaattcatcaaatcgttcagtgaattctctctttttctcctcataaaaactctttcccatctttttaattatatttaattcttttttccatttgtatattttatgacgaccaattcctaataattttgcaatttttctctcaattttgttttggtctttccatttgtattttcctttttcttttaatttttctttaattgcttcaaatttcaaaattatttgtcttttttgttgatcatttgggtccgttccattttctccaccaatttgatcaatgcccgtagtttcattttgctccttttggtcgttttgttcaatttttattatcacaatttcttcactttcgtttttgtcccatctttggccaaatatttcttcaaaatttggttggattttgccggatttaattgcaaaaataaagaaaaatataataaataataaatgccacaaattcatttttacttttggaaattgaatttattgcattaaatgaatttatttaatgttttattcgcattaaatgttattacgcaattatttttcttttcaacaatattttaaaaattaatatgtgattcacgacgtaatttatacataatatggaaatcaattttttactcagattttttaagaaataattattgcaaaaaataataatttataaaataatttattttatggaaaaaataaattaaaaggaaagtgtagcaatttactcaaaatgatttttttttgggcacataattcaaaaaaataattaattgaccataattggcttcatatccaacaaatgttgtaaattgcttttttaattaattaaacaaataaaattaaaattttcctttaatttcaaaatattgcttcatctttttttaatttgtcataatttgaaggtttaattagcgctgaaaataataaataattttaaaaagttagaaattcgcttacttttattgtcttttggcaacaattcttttttccattttatcaatgtcagaaatgcccaattccttcacaaattctttttgtttgccttggctatataattctctaaattcatcaaatcgttcaatgaatttgcgctttttcatctcataaaaactctttttcattctgttctttttctttaaatttaatttgtttttccatttttgtattaattttctatttgtccccaataattgtgcaatttttctctcaattttgctttggtttttgttttcatattttcctttttgcttcaatttttttttgattgcatcaaattgtaaaattattctctcttttgctgatcatttatattc

SEQ ID NO: 15097 - DNA, 2045 bp, Heterodera glycines
  unsure (1)..(2045): unsure at all n locations
acacagcaacgccaaatcccaagcagttcatcactccattcggccaattcagtacttgcacagtctagaataaatttattgtcagtattgtgacgataaagaggaccaaattatggaaaatttgtgagggatggttcgatggcaatcaatggagtttcattttttttactttaaattaaaaagggattttttctctttaaaatcctaaaaaatattgtttgctaagttttcgctatttttcaagtttgttcaagatttttgaaaaaatcaaacaataagttttaattgaaaatttgcaaatttattttgtttttaaatattttttttgccgggagggatacacgtttatccacctaaaatcagttcaaatggtccctctgcgaccagttgttgctttgcatccttcgcgcgatagtccaccgcttttgcccccaattcttccaccaattgcatcctgaaaattgcgatggctcttgcattatttatagactcaaaactttttcgctgaacatgtggcgaccactttttcgactccccaacagcgcagcatttgaattgccattgtgccaacgccaccggcaccgccatggataagcacacgtaaatgttgcgccttatttgggtctattctgcctgtctgaatggtgattaactttttaaaattcatctccgccgttccgtggtcaccgtgacgagtgcagcccaagcagtacatgcgacgtacggcaaagcggcagactctgtgtggctgagtgacgccggtttgggggcgacagcgtttgtgaatgagagagcgaattcggagtgacatccttggcaatggggagggacgacagcgatgacctgcaaatggggatataacaaatctagtaaatttaaaataaactttcgaactgacttgatctccgacatccaaatcctttaccgcccgtcctttctccaccacttctccgctacaatcgcggcccaaaataagagggaattgatcggcttctcccattctcgaaaaagtttctccgattgtttgctgcgtttgtaagaaatccatcctttttggtagacctcggtcaactaaaagagaatttacaaatgccgcagaagcggtgtcatggcaactcgtacaaaaaaaatttctaagaattttcaactaaaacttagaattttcagattaaaaaaaatctaaatggattttttagtctagaaaaactttttaaaacacttaaattttcaaaaaatttaagaaaataaaaaaaaatcagctgaaaaattaaaaattaattttcaccaaaattcacatgtttgtccaaaaacgattcaaggcttcagtatgacgatatgtctgcttatcttatttttctttgggtggctcgaaatgggtcaaaacggatgccggattcgtaagtgttctatccgactgaggggggggggggggacaaaccatanntatacacaaatttccggggcgctaatctagacacgattctaactgccataatttttcggaactcggaattccgtgccatcccccagtttccggtaatcaatatattaacaattaagttttaaaaggaaagaaattaatacagaatttattacaagctgaataaataacgaacaataaaaatttttcaattcaatctagcatcgcttctacgcaaaagcaaacccctccgaacattcgcgactggccaaaagcagcattttgtgaagagtttcgtaatcagggtattcgggcaagtccagctggttgaagcacgtgtgggcggatgggagccgactgttggaacgcgtgtccttttgtatacttaagtgcgtgtttgttagagaggaatgaatttgtgtgctaatgcttacgtgaatttctgtacaccgttcattccctcgagatgcgcgaaaccctgcagcggaaccttcgaagtccctgtgacaaattgaagaaatttggccttgtcctcggcatcgaaagctttaagagcgcgccagaacctttaaatgtatggcaatagatatttaatttgttcaatttgttgcattaccattgaatt

SEQ ID NO: 15098 - DNA, 1362 bp, Heterodera glycines
atttctgtgttgaaattttcttgtattcgctaatttaaatctctttcgaaatcattagccaaggtacaagcaaaaaaatcgaccttcaagaaatcggtcccaatcccggattacactgctttactttgtgtatttgaaattttaggctgatagtgtgaaaaataaaaattggactaaaactttattttaaaaaaatgattggactcataaaatgttattagactcataaatatttgattggactcataaagtgcattagagcccgagttgccattgaccccgcagaagcagattagagttaagtggagaaatcatcgaaaaatcatttggcacttaccgaattcagtcaaacatttgattttgcttagcacttcatttccatagccttcgctcattcgcacgtcaattggatttactgaagcagcctaaaacgaaaaagtcgagacaaacacatgaaaaacgcatacaaacttgagaattagctattaattctaattccaaataaaaatcagccaccttaacacggatgatcacttggttgtcattttggatggttggcattggaacattgctgagaacaagcggtgcattgaatgcgttcactgcccatgctcgcatttgatttgcattggacggctgtgcttgtgctgctgcagttgcattccctgcaagcgaagcccgacaccgacgggcaaagcattggaaaatgcgcaaaaaagtgaaagacgaacgggcagaaaacatcagaataaaaaaccaagagcataacttcaaaatttaaatgaataattattgttttattaacttgaaccagcaaaacactgttcaccaaataaaatttatatcggtataaaaaacgataaatctttaactctgatgtaacgaaatttgatcgtttttgaaaatgtgtctaaattctttctcgagcaattcgtgtagcgtaactccatcatgcttatacacccaccggcctttgtcgctgaggtcgtacctcaaataaattttatgggattagcgtttaatgaatagtgagtgatacctttttggaccagaaactggcgatgaaagccaaatttgtttgttcggagtttgtttattgatcacataagtgcctattcgtgggctaaaattttcagcatttactttcgttaaataaacaattattggtacttgtcggttatctgcgtccagattttcaaaaaagtttaggtttttggctataacttttttcttttgcatccaaatccaacattgttggtatcattcgaaagatcttcagatgctctataagctttacaaaaaaacaaaaagattttttagcctggaataaattttattaagaaaaaaacttcaaaatttcga

SEQ ID NO: 15099 - DNA, 3037 bp, Heterodera glycines
tataaaaattgtgacataaaaataaaatatataaaatctttctattgtactatatcaatagtttaagaattaatttatattttaaggccgaaagaatcaataaacaaccatttggctgcttatctattttaatcctatttatcttcgcctttatctctttcatattacaaattattttcttcactttttgctttgtcgttatagtttattaattgaaaaaaaatcttccaagcttttaattcttatcataaattaaatgtatttttttcaggacagatacttagtttgggagtatttttttcgtaataaatcataaaaatttcgggccaggacgttttcgcgtggccattttcgcgtggttgcatataaaagagaattcataactcacattatattttaccaaaatttgtttcactcttttttctaacgagtttttattttataatttaatgagtttataaactaaattaaggctttttaaattatataatatggaccagcagcaaaaaattaaaacaaaacgaaacaaagttatgttagaacatgacggcgcactctataacgacatcaataacattcacctcccccaaaatgatcccaattatgccaatgccaatgtgaatcccgaaaacattatcaattttctcactggtgtttcccgaaaccatgaaatgcgaccttagtttgttctgaaatttgttattttttgttatatttttataaaattttaaatattttttccgtttgacgcacatccgaccaaactgacaaattactgtagaagatattagccgcaagaaataaaaaaattaaaaagttaagaaatttgtccgaatgcgggttcggattcgaaacatggatgttttgcacaaatccaaccaatttcagtcctaaacagctactcacgcgaaaacggccccgaccgattcttagagggtctaaaaattttagctctatttgtaataaattgtttgaaatttgccggaaattccctgagaaatttaatgatttttttaaaatcgttaatgggatttggggaacaagctgtgctcctgcaaaacccacgccacaacataaattttttgcctatgtaatcgaatgaatgcatttttctttcgaaaattgtgtagttttcaggattttgacggggatttacgacatccattagcaatattagcaccggcaaaattaaaaagtgtcgatttgctgctgttcctccctcttttcagcttcattctcttttcctcctctttctcccctccttcttgcttcgaatttttcctttttctctctttctcttccgtctctgctccttccccaatgctattttcatccttttcttcctctttctccattccttcttgcttcgaatttttcctttttctctctttctcttccgtctctcctccttccccaatgctattttcatccttttcctcctcttccctcgtttttccatttttgctaccaaaaatgttggatttggttgacaaagaaaatttctaaccttttgcaaatgaaagttggataaaaattatccgtccaattgattatttgattgattgatttgtgggtggggggataaggtaaaacgcccggcaaatggtaccatcaattgtagcaattttttcatatctttacttaaaatcaatcaaatttttaattccttatatcattcgatagttctagatgttttctattagcctacaaaatttcaaaaagtttcgttaagtttcaagaaagttatgagctaaaatgttgtaaaaaacttgggtttttgagcttctcaagttataacttttttgaaacttaacgaaactttttgaaattttataggctaataaaaaacggtttggcctttttatgtcaaaatgtttccgcgccttccgtttttgtcaatgatttttcgcctcccattggccattggcaacaatttaagacgaacaaaattcaaaaattgttgaataaaatgtgattttcgttagaatttttggttttccgcttttctcattatataaaaataaagtttccaaaatttggaggaattacagaaaaagttggtcgaaatggatcatcagcagaaagaacaacagaaaagcattgatcagatggaaaaggtgggaaaatgtgaaaaaaggaaaatgaagcaaattgatcagcacattttgaatttgattttcttttttgctaaaatgccgtaaaagatgctacagacgaacgctgatgccgaaaaggagaatgatgacaacatgaaaaataagaaaagcttgagaaaaatgtcatggcacaaattgatgtgaaagtgcagacgaaggaagttactgtcaaatagttaagggaaatgagcaatggttaattactgtacctaccgtaacattattattataattactgtcaaatattaataggatttgttccaatttaagttattactgaaaaggcaattttgattgaatcggtgaattgaagggacaacaaaaacaccaaaagcagcaaggggagaaggggacaaaaggcgagttgtaattacaataatcgatgtatccatctttcaaatatactaatgcgtttttttaaatgccaggtattacaataagcggattttttcaatttacaatgtattacaaacaagcagattttcaaaaatttttatgtttttcgctataacttttttctttggcatccaaatccaagattgttggtatcattcgaaagctcttcatatgctctattagccttactaaaattctttaaaagtaacactgcccaagtgtgcaaatggcctaatggctagtctccttgactgtcccttcttctttcccctggttcaatccctctacagaaattagattattttcaattttttttcttgtatactcgtgggtttcctataaagaaaatatgattactcatagtttttttaaattgatacatattttatccttttttaaatgaaaatcctaccaattgagcttaataatcgcaaaaaccaaccttttttgttgaaaatctgttaacaaattgcacccaaattttc

SEQ ID NO: 15100 - DNA, 877 bp, Heterodera glycines
ggggacctctagagctctttatatattttatatttttaattttagctttcttgtctcactgataaaatggtcctttgtttctgccattttcggattttccttttccgcattcttcggggatgccatcgccctttttctaccgatgacgccctattttgagttttctcttctgctattattccagttgttcccacaatgcattattctgaggaggatttaacaaattgattttgcttttcatgatagcaatgtttcttttccgatactaggcttttcctttatgcttactcccatttttgaggaattgcattgaccgacgtccaatcacgatgcactcccccgattggtccgtcaaaaccctccattgactatggaattcgtcgttcgactgtctctatgcctttggtgatcagaattgaggacggaatgccaaccatttttgtgcgtccctcgcgggcatttaatttccacagattgaatcgcttgcaagaattctggcaccgaaatgaagtgagcggaagaaaatggcattttcagagggaatttgattcaattggaatttaaggcactgagaagattgacccaaacggggaacagaccatgaaatgatcagcagagaaagaaaaagaaaagaaatcggatgatcagacaaattgaaaaggaaggacggaagacaaacggacaaaattgaccacacacatttaatttgatctctttcatgcaatttggaatatttaataataatgttaattaaacattaaaatttgttttcataaatccaaaataatttggtaataaaacacaaattacatcccttcattgactttgtgcataaattggtcattataacccctcattatcataatgcaaacatttt

SEQ ID NO: 15101 - DNA, 2826 bp, Heterodera glycines
  unsure (1)..(2826): unsure at all n locations
ctgagttgggcctganattcgggcctaaacattgggaggccttggagccgagtcggggatgacatttaatttcggaaagggtggctctttcaacgcacaaagtaacaatcacaatggaagccaatcaatccattacgattcaaaaatgccgtccaaattttcaggtggcggaggagtgctggtcggaggagacaaattcggcaccaactcaacattcggtgtggacaaaaaggggctggtggcggacacggacatgcatttgctggacaacaaaacattacatgtaaatgggggggggagagaaagagacaaacagtgccatcagtcaaatccatcatgttaatattgtaccttaaaaatatgattaagggcggattaggcaaggagaaaaacttcatcgacgatttggccgatttgatacggcaaagaaaagaggagaagcaacgacagaaggaacagagaatcgccgaaaggatttgaaaaaaacgatgaacgtggaaatgatccaaaaatgtaccaccaaagaacaaatggataaatttattactttacgacaataaaaattaatccataagggaaaaaagagcacaacacactaattgaacataattagccactttatgcccgaggcgatcattaattatgtatcattatcagaataattggtcatttgtttaaaataaacatgccatccaaagaagtcattccggtgactgctttcaaattgcccaatcttcagtttctttggccataattttgactttttcgttgttatttctttcttaatgtcagtattttttcttttttttgtatttatgaattcccgggacttaaagctttcgtctgataccaagaatgtaggtattgcaaaaataagaaaaaagttatggtcaagaaactgaagattgggcgcctaaagtgcattagagcccaaatttgtttttggttaatagatcacttcataattatttttaggataaaaatcgctctcgattttcgtttttcaccacgagaaaactgttttaacagaaaattttattacggatttatagatttttcaaattcatttatccctttatatttaaatttttaaaaattgacgtcaatttttttcctttctatatttgtctacatttacatatctttataaattttaagccattttctgctccctttctgtgtaacaatggattcgccgtcaagtgtgaaagcgggcttaaaaaaatcagtttttttagcgattaaggtcatttattttagtggcattctagtgggcgcgcaacttcaaaataaaaaaaaagtcaacgacaagacttattgttaatttgatttaggggacggatcgtttgttgcgagcgaacaacgcaaatgtgcgaccgcaactgcaaggagtggacaacgccaaagactgtttgacaccgtcgacaacaggcaataatcaaccgacacgagaacagccaaaactgatggacattgacgaaaggattgggatggacgacgaagacaacgacgacggggacagattcggagaagcagcagaggtattgggtggaggagacaacgctaaccgagttggtggtgagagagtcgtgggtaacagactgcggaaacggcgctccgtttcctgtgagccgacagcgaacagtccggccaaaatggcaccgcatcagccagccgatgaccaatccgctggttgtctgctgcaggtcactgaacaatgatcagaacagagtctccactagacaaaatttaaaatacattttcagtgtttttaaattcaggtttcacttttttttctgtctctcatttggctttttactctttgcttcagcgcacccaaagtgtcaatgccttcgctgttccctctgctcatcaacaaaatgccgtcgtcccaattgcctcttcctcgcgtatttcgtcgagaatgccctcctccgtctccatttgctcatatgccaattctgaagtcagcgcgcggaaacgttcgccctcgggcgacggcagtctttgttcaaaggctaaagcatcgcttctttttgtttgtttgaagttgactttttgtaggaggagcggagtttgtcgttaaccactccaaaaattagcatttccatttgcggaaaggctttgtatgcgtgcgcaagtggtcagtttttgagaattcatctccggcaaaaagagcggagtgattgagcaaatcctttaaattttaggtcggttggacgatttggcagctcttctcaaggaacatgtattactcccgttcaaattcatttacaattttctgtcattctcagcccgaattggtcaactaccaatacccgtactgctaccgttacagctgcctgcacatcgccgcaaaagccggcgactcggccattgtccgattccttgtcaaaaacggggcgaaactaaacgcaaaagatgtttgtttttgtctttataattaaggtacttttccgattattattagcacagcaacttttaatgacaaaaaatcccgaaatagttagctaaaataccgacaaaatactgccaaaatagtgacaaaatagtgaaaaaagtccaaaacagtgacaaataacgacataattttcagccaaaaagtaacccaaaataatttttattcactaattgcagctgcaaaagagtatgactgggatttttaagaccaataaacccaatatagatacatgaaaaaattttcaccattaaaaatttttaccaagaaatcagatttttgactatcttatttttcatttcataggaatatatgttgtaagataacaaatcttcaaatatagattacacgcactgaaaaataaccca

SEQ ID NO: 15102 - DNA, 1990 bp, Heterodera glycines
ccgtttggtgccattgccaaattttcccgcccgccggcggcgcctctttagtgcagcagggggtgaaatccgaccacttgtttaccactcacccgctcattttatgccattcttcgtcattgctttggcgtgccattttacaccctacccccaatttcccctttagcaaattgctttttccttgtcgcccctccgccgtttgctgcgctccgtccaactgagtacggccggcaaagtccttcttctgtttatttttgcgctgtttccgttgcttctcacaattgtgctgttgcaccaattgatggcaaaaaccaatgccaacaacaacaacttcaacaactccatttgttgttgtccccgtcgtcgtcgaagcggcggcttttcctcttcccccagcggcggtggcggtgacagccgccgaagagcaaaagcatttcgaacagccaatcgccgattcatcgtgtcgggagagggataaagagagactgatccgatcgatgaaagtgctaatgatgatgattatgatgatggggatgaggaagttgtaagaatgattgatgtttttgatgtgacgggccccgagaatggcgggagggaggagcagtgggggtgcgatgcttaagagagtggtgccgaagcaaatcgtttcacaaatacttcacaattggcgttccgtgaactcatcaacaaacttattttgactaaaataaatttcgattttcctttcttagaagcaattagtctgaaccgggaattttggcaaaaaccgggacctcgacctgaaaaggccgggattctccggccggtcccgaacaactcaaggtccaagtgttctcgatcatttagcaaaattcaatgaaaaaattgttaaattttaaatgactgagactttaagaaattttggttatttatcttttggaaccaataaaataatttttgaaatttactaactgtaaaatttagtaattgtaatgcatgtatgacgtcagcaaggtcatttaatttggcttttactctttttttgtcaaagaatacccatgctagggaattttaagcaacgtcttttcgcaagctaatgtacctaagcatccacaccacccatcactctgctcgagctgtttgtttgccctcctcatccatctcgctctctctcctctgtctgttcaatttgtcccctgagggggtatctttcattttcactcattttcttgacatttattagtgcacccgtcaagttccgtgtcctcccccccccctttttattattcaatttgtcccccccccgggcggcgccctttgaaagggccaacaaaaagtgggttggatgttgattaatgaaatttgctgttgacgcttcccgagactcttggcctctcgactctcgcgagtgtttacatttggggagtcatttgccccgtgtgaaattcgagtgtttatccgctaacgtcatttctgggtcccatcagtgcttttggcacttttcagcccacgcctaacccgctaatccgaaattggccggtcattttattgtgtcatttcagtatgggtgtctttttggcagtttgagtggccatttaaatatcaatggcctccgaggagctggaaaataaaaatgcatttacatatatgcaaaagtccaaggcataatcttgagaaatggatttaaatgaatttattgatagagtccagaatcgggatttcggtactgagtcgggatttttattcgaactcaaaaaaattcacaatgagaatcttgaaaatttctcaaaaatatctcccttataatcagtatggcttgccaaatattaacaaaatcggataattgtaaacaaattataatggaaatcccggtttgaaattcgaaaatcccgatttggtgctcagttggcaatacaaaatcccggttccaggctctagtatttttgattttgaatagttttttaattttgtgaaatcaaaaaacctttgactttgaaaggacacaatttct

SEQ ID NO: 15103 - DNA, 521 bp, Heterodera glycines
agagaaacatagaaccacactcagattgggagagagagagacatagagagacaccacccccgcccccccccttgcctacgctcttgatcagcagcaaggagagcgagcaccagaagcctgggttcaatttttcactttttaaagaaaactcaattaaaaaatgtcaccacatactttggcattcggaagctcattgtcagcatgtttagaagcttttgttaagcaatcaatccacaaaaaatttcaacaaccactaaatctcagattttttgaattttagttaaagttttttacgctatttaagttgatgaatgttttttaatttttttgcgtggctaaccgaaagaacagaattatgaaccaggcacttccggtttaatttttcctttaaacctaaaagttcaaatttgaatgggttttatttcctccattagccactttttgtttgccttcgtcctgggcacagcccgacaaaaaatttattggcattttttgttttacgtcagcacccccatcctttt

SEQ ID NO: 15104 - DNA, 3541 bp, Heterodera glycines
  unsure (1)..(3541): unsure at all n locations
gacagtaatccgtcatttggcttcagttacgtatttttgaattattgaataaatcaaaaaacagctaatgttgcatttttcacagggcaaataatgggcccaccgccaccgcgacagcaaacgccattcaacgaaatgtaccaaacaaatgcttcggccgttcataatcggcccaattcgttcactcgccttttaatgcatcgcgcaaaagccgctcctccaactaaacattccgcgagtgtcaaatcccttccaatacggtgcacaatcatcaaattggcacggaatgccattggaatcgccgccatcttcaaataggcacggaatgccattggaatcgccgccatcttcaaattggcacgggatgccattggaatcgccgccatctcttcagagtcttttgttgaatagcccaacttctgttgtgccgcggcactccgctcacaatacggttccatttgtgcctcattctgcagaacccaatattttaatttagctgttgtctccatcgctccaaacgcaaaataatccgcctttaacaattcgggaaggcaatgcgcaagcagcagaaaggcacagacaacagcaacaacaacatcaacaacaacaatcattggccaatgttgaccgaaaaatgaagcggccaatggacgatgaagcgggcgaggggccgagtgccatcgaaattcaaaatgtgcaaatggcacggtcagaaaatgacagcagaacggcaccgaaactgtttatcagaacgggtaattgtgattgttttaaaataattttaggatttttagtcaatgtttcaagtttctacatacagtcatggtcatatgtttaacaacactcaaaattttctaccaaatttgatttaaattgattataaaatctcaatatgactatattgtgtatatatgttttatatttcttgtagcattttttgtgggctttataatgataccattcactatcccctgtcaaaatgttattattagttacaaaccattttaccaactgcactccctttttggggtggtcatatgtttaacaacactacccatatattttttcatcagcattaaaaaaatctaaaaaaattcaggtaagcataaaaaggtagcaacaccaagttgatcagatcactccttcatggtgatctgatcagcccattttggctgggaacgaggggtaaatttcaaaaaaaatttctagggggttgggaaaatttttctggaaattttgagtaggcccatttttagagcacaaaatttgctaccgaattgcctttggaatagtgggtctacgatttaggcccgctgagatacgtcgacttttatttcggtgcctataaaaagtactgtatttcttaagaaaatagtgcattttacactacgtcaaaattgaagtgcccatacctcagccggtataagtcatagagacatgcggttttttgaatattgtagagaattttgtgctctataaaatgggcctactcaaaatttccagaaaaattttcccaaccccctagaaattttttttcaaatttacccctcgttcccagccaaaatgggctgatcagatcaccatgaaggagtgatctgatcaacttggtgttgctaccttttttgatcagcatccaaagttatgcttacctgaatttttttagatttttttaatgctgatccagagaagcaatataagaaaaagaagatgagtctaaacatatgaccaccgagaattggggctgcatttggattttgttttgtattatttgtgaacttaacaaatttgataatgaatggtaccattgaaagcccataaaaaatactacaaaaaccgtgaaatgtgtttcccgttttgcctgcaacttcagcttttattacgcatctaatcaatattcactctttgagtctaaacatatgaccatgactgtattttttccatattttggaatttttttccaaaaaacccctattagaacggcccccataaactaaattggccgttttggtccaaacgaccggaaattttccaaaaaattttaaattttaaactttcttaaaaattagtagatttatttcaaaaataatcaaaaaattgaagatttcgtttttttggtcagtttcctctaaaattgcttttttttttcttctaaaacgagttattataccgtatttactagaatttaatgaatttggagaaattttggaaaatttacccctcaattcggaaaatttataacatatttttgccatttttgtccatattttcgggttacggtactacttttttcacgctctgttccatgaaggagtggtctgatcaagttggggtaaaagacttttttgatcagcatcaaaagttaagctaacctgaatttttgcagatttttagagccaccaaatattgagctttcattgattaaatattatgtttccatacttagcaccgccaaaaattggatcactttggttgcgcacccgtaatccgatgatcggaacttttgccgtttttagtaaggtgatattagggtttgttttggtatagaaaagatactccatccaatcactcatttcttatgaatagtaaaatgattgacccaaccaaatttcccgccttttatagacacaaaaacaacgatgtgaagacaatttttatcaacgttttttgccctataaaagcgcttcttcccccgcatttgccattcattccacaacacttttattccaccaacttcattcttcacccacaacatcctcgtccctccgcttcaatagcaaatgctccgttcactgctcttcgctgccgtgttcgcttcactgctcatcaattgctacgaggcgcggacgatacgcctggccaacagtttcttatgtgccaagagcggtttcacagtcgaggaaggcctcacgcagcacgaggcgaacaacatgtgagtgacaaggggaattacacattttcgaataatatgactttccccccatttcagtcaagtcaaaggcgaagagatatcaaacacacagacggagccagtgcccattctgctggtgacagcgaatgtggagttcgacgtggtgttccacactaacagcaaggagtgcaaggagcaattcaaaatcaaagaggacagcaaaggatgcaagaaaaaaggcactctcgttggccatgtgagtttttcaagaaatggcgaaaatttggctttggaatgttttgtttgtttcagaatgattttccgaagacgcctcactgtggtgaaagttgcacagggtacgaagtcgtctgcaccgttgtcaaactggcttcagtcgaggaacaggaaacaggcggcattgttggactcaagcgatcggaattcgccagaatgttcggcggcgccaagtgcgagtgggaagcggtcattgtgagtggcactgatcagtcgtcttttttgtgtggttaaagcatccccattttcccgctgttcagaagcaggcgcgtatgctggttaacctgaaagatcttcatanaggggagtcctgtgggaaaaaagaagacaccaatcagc

SEQ ID NO: 15105 - DNA, 2394 bp, Heterodera glycines
atttcgtcacatctctcagcaccaattctccgatcttctcaaaaagtgtgaacatcctcagttcctcttcagcttcttctcccctgctgctgttttcttcctcttccaactccaaaaatgatactttattctctcgttggacttgctgcttcttttctgccgctttctcctctccctcttcctcctcttccttttcctcctcttccgtttcttcatctccattctcttccatttcgccatttcctttgtccccttcgtccgctttttctttcttcccactctcttccaattcctccatttcttttccactctctttttcccccgtgcaatttcctccttcttcctcctcctcttcttcatctgtttcatattcactctcctcttcttcctcctcctcctcttcttcttcctcccacttttgttctcccccctcccctttcatttgtgttttgtcataaatgtccaattttctctgccgttgcaatgtttccatggtcgcttaattaaatttctaaaatatataattacgttttgtctaatgaacgggtaaaagaaaaaaaacaataatagggggaagtgaagcgaaaatgaggcaaaatgtgccaaagaattgcggcaaaacccgagttgtcgcgactcgccttccgtttgcgctgcgttcgatgggtctttgcggtcggaattgacttctcccccggtttcccctcttttgaggtcgaatgaaccgccgcgaactatcggcagcagcaaaagcggtgggagggggaacaatgcctcccccgcgcactttccgcttgagccactcgtcgagcgattgtccgcccctcgccggggaggtccccccccccccgcattcagttcttatgtaaataaacaggcaaaagttcggcgagagatgcgcggctggtggtaggaatgggaatatcccgcggtcggtctcccctcccacatgcgcaagtgtgggactgaaacagacgggggaagggaatgatcgatcggatgagaggaaaatggacggaggaaaagcattgtaagtgggcggggagggaggggaggacgacgccattctcatcccttccctttgtttgttggaggtgagaatggcaacacaaaacgcagatttaataatccttttaatctgtggctgagcgtaggcgaaacccaaaagaaaaaaacacaatcatttgatgcgaaaaaaatcggtgatgaacgaattccgtgacaaattgaaaaaatgatcgaattggaggaacaagggactgagcacagattgcccatggacagcacaaacgtcgacttcgtaaacaaatttttaaaaaaatgctatttttgaatttggcagaacaaaaccgactcttttatgtttgggtctccaaaaataattagataaaaataaatttaggcagccaaatccatccacagacactctgaattcaatccaaaaaaagccaattgagtattatgataaaatctgacgtcaaaacgtggaaagagatctgaagacttaacaaacgaaggaagagaaaatgctgaaaatataaatttaatatgtagaatatgctaaagacatagtgtaattgagctcggtgagtgttttgtattgaaatggcaattttggaaaggcagagaaatcgtccgcgtcttcgtttttctctccgttctcttttccttctcgcgcaattcaatcgccgccctcctcagcttgtttcaaagcggtggccaaataacaagccaacgcctgcaaaatcaaaggcaatgtttgggagttgggggcgagccattccaagtgactgaccctcggggcgatgtccaaaaggtcgcgcatgatcaccttcttctccttcccgtcaccgtaacgcgccttaaacacgaatggcaccccgtcgatgtcgcatgactcgtggctgagtatttcgtccaccgctttttcttgcaatttggacgccagttcctcgatcgttttggcagctgtcgtaacatttgattctgcaagagaaaaacacaatagttcacgaaatggaatgaataacaaagggaattgacattcatcagacaagcgcacttaattcatattctaccgattttgttgttgccattagagttcgtttgaaatgatttgccggaggaaattccgttgagggaagcggtggacgtttttcgctttttggcaccgaccaatggttcgaccgacaatggctgcggagaaggcgcatgctttctgatgattttcacattcttcggaatggacgcacttttctgcttaaggggagggatctttttaatatgtttataaaaatggaggttttttgtgcgatttgttcctgtctttaacccacccctttcttatgcgattttggcaatgacggaatggacacggagccggaagcgacaacg

SEQ ID NO: 15106 - DNA, 1543 bp, Heterodera glycines
ttagaccctttgagtgcatttccttttcgcctttgtcgttgaaatacatttcgcgttgttcgtaacggtcgatggattcttggcataaacgctgaaaaaaggtggcataatttgactttcttcagaccaccgctgaccaaattatcttcgggctcccaagtgctcttctcaatcggataccccttccaataaacgcgatattccaccttatcaggacgcaatttgtccgtgcgtttgccccatctgaaaaaagagaaagtcgcgtaagaaacatgactttttgcaaatttatctcaatcagaatttttattgacgattttaaattttccttttccaaatttaaaaaaaccctcacatgtattccacttcgtatttgacttttttctccccactctttcctcttttgctttcgcttttcctcggcctcgcctttgacgttttcttattcgaattgttggctttgttgttgatcataaaaaaatccggctgtttgacgctcctaagcattttgttggttaaaactcaaaagataatatttttaatgacaaagacaataaaattcaccgatttgcagcaaaattcggatttgctcgccttatttcattatcactttccaattccattaaaaaaaacctccgtttccgaccacgggcattatactcatcgtcatattcgtcatcgttctccacgtcgacaaaaaaggaacgattttcttcgtccatttcttcaactgcagattctttgtaacagtaatcgtggtccgaaaaagaattgttgtgctcaatcttgatgtttaccgctttcggaaaagaactcattgcttacggctagtaagaaaaagagacgcaataagaaactcaaatggatggaaacccaattgtaactaaaaaatacgaacttactaacgaaagataaacaaacaaaaaagaaaggttgggcgaaaaacaccgcaaaaatcaccattggatttgctgatacgacagtgaagggaaatgggcgtaggttagaatccgctttttttttcttagttggtcaatttaaaaccagaagaaaatttaaacataaaatttaaaaaaataaaactttcaaaaagctggcataatgttttaattttatttttttgttttttgtattaagctaaagctcacaatcagctacaatttaagtttcccagttttgagtgtgttgtgccttcatatgtcggtcccgcacgttcggctatccgatcggtcgagtgaagcgaatttgcgaattggatccgcagatgatctctgtttcggcagatgccgttaaattgtctcgcgttggctgcactcagtttttcaaataagtcttggcagatttccatttaactttaagaaattacatgaaacacccatattttcaaaggcaaagctcagtgcataagtattattcttaaggagaaattcgtagctatgcttggccgttgtgcaggaaaatgggcattagataatggaaggacacccgttcaaatttgtgacgtcggtccgtaaagtttatttactcccagttattttatcat

SEQ ID NO: 15107 - DNA, 1746 bp, Heterodera glycines
  unsure (1)..(1746): unsure at all n locations
ctgacaaaaaattttattgtataaatccatttcattattatacttttatttgcatatttatttttcggccaaatcaaaggcgaagataaaaatgatttatttttagatattatttctgagtttagatttattgtttattaaataaacagaatataaaacttcttgtttctccgaaaaccaactcagatcggcggcgctatctccattattcttatataagacttttccatttttaataattaatttaattttatttcatgtcgtattaacgatggtgaagtggttgttgttaacacaagttgttattcttaaaaacacttaaaaaactatatttatataattattttatttttaaaataatatattaataaatatttactaaaattaaaaaactttttttttgtataattctttgtgttttggtttaaattttaattttaaacaatcttaacgatatttttatgaaaaattatttagaaaagaaaagattatttagtcttcgtttctgactatcattcttatttatttttattgtaacagttgaatgaatacattccatttttaattaaattttaagatgaggatttatttatttatttgtcatttaaattaatgtatttttaatttaaaaaaaataagggctcaaatctgttatttagtgattttaatttttattaataaaattaaatgaatacggaattttaaaatttatggtgattattatataaaaattttgatttggcctttgcgccgattaagatttaatattattaaaagttttcagaaatgactcattaatgaaaaaataaaagaaaatatagtattaaaaaacggtcattgaacttttcttaaccataaaaaattaaaattaattataattatttatttgtttccttttaaatgttttagtttttgtgttgtaattattaagaaaatttttattattgttttaaattattctaggcatttttaaatatgtaatttactttagtgaattagcaaacttttatttttttagtgagattggatgagtttgagtgcagtctcgcctaaggtgacaaaggagtttttttaattctatgcttgataaaatattagcataactattttgtgaatatatatatatatatatattcaatcagaataatttcttatttctttcgttttgtatgtatttgattcttcttgaatatatttgatttttattaaatcgtttatagataatattaacactttgttataatttttttatttcgcaaggttataatatattttgacatatagtgtttcaagtgcttctattcatacattttgaattttagtcgctagtttagctgaagataaaattttccgttttccattgggttaattaaaatttcttaaactataaaatttcacaaaactctttattaattatttacatttcattaaagatttataggatttttgaattttgcgtttttcgggcattttcgtattaattttattttatagaaattatttcttcgatatctaatctattaagttgtattaataatttttgtcgtctttatttttttcttgagttacaggatgtggctgtttggatttagtgcttcacaatcccgtattgtttctgtaaatgtattacaatgtttttgataagataaattaaggatatanttggtgattgtngaagttaatttcaatatttaaaaatttattatataatttttaataattaaatgaattanattgtttctcata

SEQ ID NO: 15108 - DNA, 1687 bp, Heterodera glycines
gagatctgaacgtttatgtgggataattagcaaaagattttcattataaactttatttcatttaccaatttttttttcaccctaaattttatgattttctgtaaattaattcaaacatggcaatttaaaaaaaaaaaattctatttttaattgtttaaatatttgaattacaagcaattttttagtgagtctattatttggaaaagcaccttataaatatcacgcgcttgaactacgccttccagcggcgtcgcacaaggctgtcaggtttggatgactttatttttctcattttgcaaaacgtattcatttggctatattttgaacgttgaccaaagttttattaatattctgttgaggaaacttgattgttattatgagataaagcaaatttttgaaaataactcaataatctacccatcggttcatctcaaaacgagaagacttgtgacacaacccaatagattttccattttgtaatactaaataaatgttatttaaaatttcatttctattattttttaataaaaaatttcctgttttccattaaccttaatatattacaccctttaaaacaatcgtttagtttttgaaggtttgcattatttttaattaattagacaatcttttgataaaacggaatttttttttattttgttaaatctttcagtttttaatacttaattgctacttaaatattaattataactgtttttaatttatattattttaaggaagtttcctggtttttaacttgcaaaaaaaaagttgaacatatttttatcttgttaaattgtcatttaatgataaatttttcattttttggatgtttcacagctgttgcaaacaacccttaattctttcaaagataattaatgcacgcatttaaataaaaacattttaatatctttattgagatttatcatagtaattatgtcttattacttttttagtttttaatcttattttatgcgattttttttaatttcattattggttatcaagtttcaatggcagaaaaattaaagatgtccatatgttcaaaactttatatattctttactgttttaattatatttacttatattttaaattttatttattcctctctttttgatgaaacaaaataaaaaaaatatatatataattatattatatgtttaatttctattcatatatatgaaactcttcgagcttcaattaagctgtgatttttacaacaaattttattaggtgatatatgttaattatcaaatatattaaatcatttaattaatctcggttcgataataatttttatatatttttaatttatttttactttttcttacaattatataaaacaattatcttatatattcctttttaattaatattgtcatatttatttttttgatatacgatgacgaagtttatgatgttccttattaataatttagatgaattgccttgaaaatttgttattttcgtattaattttttatttcaagtaaaaacggcaacgttttacatttttcaagctgataaataaattaatctatttaattgtaaactttttttaattttttattatttttttcttatgttatgctgaaaattttaatgattgtctttgttttaaatttgttttaatgcttattttttttgaaatgtcttttgaggcttttaacgaataaatttttattgaa

SEQ ID NO: 15109 - DNA, 1172 bp, Heterodera glycines
taaatttttattgaacatactatgatttgattttaaattatttggcaatttcaattgttaattttcttgtcatagtcaattacaagtttctattttattactaattaaattgtaattcataataagaatttttcatatttgtgcaatgtcttcataatttttatattagtgaaaataatatttttccaatcaatattttatttattgttcgcctgtccttttatttgtttctgtaaacttttgtttattcactgtggacgtgacggcgtaacaaattggcgacgcccgattctgattggatcaacttttggcttcaaaatttgcaagtttaaaacaatcggctattcatctttcatggaatagtattttggactttcttctgaaaagccgaaccggcattcgtcattaaagccagtcggctagcaattcgtcatctaagccaagtctggccaaattcttcgacaaagccgagacggcaaatcttcaaattcgttaagccgagtcggccaaagaacgagttcaaacccgagtcggttatcatcattcttcaataagactctcagctaggcgctgcagttatacttgctaggcgcaagtcaggcttaaatttgaaaaatgccagggcagcaagacccagcgattgaccagttggtcagattgctggcggaacagcaacaaatcgcgatacaacaagcggatcaaatcgcacagcttctcggcacaacaatgcagctgctggtgctgccgcccaacagcaaattgttcaagacacaattcaagctcttacagcgccgatctgttttgccgtctgcggtcactgattttggatttgacgacaccataaaaagctaaaaagccgttcagtcgtccccaatcgaatattcgttgcaattccttatataccattacctcaccactgtaggatgagtttttgccttttctctttaattaaaaaattctgagaactgaaatacagatgatgaccactaccaaatcgacaattgacaaaaaatatacccaaatatttgaacttgaaactttaattttctcaaattctttgaacactactaagttaaaaaattcactatccgtgtatgacgcatatttgggaagtatttctttcgagtcaaatagaagtttgtatattttcttctccttaatcagataaattt

SEQ ID NO: 15110 - DNA, 3540 bp, Heterodera glycines
attttgttactgtttttccattcatattttcctttttctttcaatttgtttttaattgcatcaaatttttgaacagtttctcttttttgttgatcggaaaaatcagttttttgctgatcattcagaaattcttttttccatttgaatattaaatatcggctaactcctaaatgctttccaattttcatctcaattttgcattgatatttctttttatatttccccttttgcttcaatttatttttaattgcatcaaatttttgaatgatttctcttttttgcttataatttgattcatttttctgataacttttcataatattccgcttgtcccaattgttcatttgatcaaatgggtcggtttcattttcttcaattacgtgatcagcataatgattgaattcaaagttttctttttgatagttttgttcattttttgactcgtttttgtccaacaatttttcttcgctatcatattgagtgtcccatccgttaccaaaaatttcgtcaaaagttggttggttttgtgcagtttcaattttataaggaaagaaaattattataattaaatgacataaaaacatttttaaaaaagaaacatttgtattaaaaaataatttttacaatttaaatacattaattaatcaataaatgccaatcaatgccaacaacacaaacattcattccatcatttctaagtattatgccaaaatagccttacaacagaacttaactgtgaatctgagcggattttagcgaattcaagaaaataactcgggagcggattctttggttttaactagggtaggtcgggactgggaactttgggcaaaaccgggaccgggacttttcgggttgaaaacccgggattttttggctgggaagaccgggaataaccccgggaatttcccggtcaaaactgttcaaaaccgggaccccggcactcagttgtactcagttgtccgtgttttggtcccggtccctacctagtcaatgaagaaaaagtcgtgtaaaatcccaaaaaatggttgtagataaaagctttctccacacaaatttagccccatcctgaatccaaactcacttcctttacatccctgtacgatgtactaattattcatccactctgaaaacttttgttcaaaaatttggtggccaaaagactatggtcagaacttacaaaaaaaaatttctcagagctaagctatgtgaaactcgatcgatttaccttaaacaaaacttctactggctaacttttataatgcgccaatttttttaccattgattaaaaaatttatcaaattaacaaagcataaagttattagcgtcgaattcaatgttggttatgaaagaaattatcggaaatcatatgacggaaatgaaacaattgttcaaacaaagtttattttataaagggagagaataaaaattttgccaactttcaaaaacagctaagcaatgtgaaagatgcggttcaaattttcaatataaaaaaggtcaaatgcatataaaaatctcacaattaatattggaaagaaacccaataaaacaaacggagaatgcggacccaaactattttttcaattgcaattgttctgatgatatgcgaagtcaactcattcccggtaaaatgaattttttttttaatttgaattttttaacgatttataatttaaggcattttcatcactattctcttcagcatttggtggaagtaaaaaagtagaaaatattgggactacaaatgatgaatcgcacagccgacagaagagacaagctgaaactgttgttagtgatgcagacacaatcacactaacaatatctggggaaaatttgacagtcacccaagagacattggcggacggaacggttgtgctaagaataactgggcaaaatacaaacgttgaaacaagtaaaaaaataaaaaataaataaatcgaaataatttaaatacaataataaggtaatgctgatgattccgcaatcgaaacagccactgaagagtcagcaactgcggcggaagacgcagcaaatgatgagtccgcaaccgaagcagccaatgaagagtcagcaactgcggcggaagacgcagcaaatgatgagtccgcaaccgaagcagccactgaagagtcagcaactgcggcggaagacgcagcaaatgatgagtccgcaaccgaagcagccactgaagagtcagcaactgcggcggaagacgcagcaaatgatgagtccgcaaccgaagcagccactgaagagtcagcaactgcagcggaagacgcagcaaatgatgagtccgcaaccgaagcagcaactgaagagtcagcaactgcagcggaagacgcagcaaatgatgagtccgcaaccgaagcagccattgaagtatcttcaacatcagttgccgcgtcccccactactaaagccactgcacctttgaaacccccagcgaaaaagccaggaaataaatctagtagcagcagcagttgttcgtctagcgaaagtgatgaaaagaagcaaggcccaaaacgtcgtcctactcctcctcataaagccaataaaaagaagggcaatcagaagcacaaaaaaggacgcaaccaccaaaagaaaggtcatggccatcacaagaagggtcatgggcggccccatcgccatcagcacaagttcgctaggcctgattttggatggtttcacgcatttcctcaatatttcagaggacttcgcttttggtaaaaagaaatgaacagaacaagatgaaattggcttggaaatcgaatttgaaccatatttaaaattatttttatattattgtaaattgtattgatgagaatattgaaacacattgttggaaaaatttttcttgaatgtgtttgaaagttataaatcatctgagaaaacaaactaaaaaaatatagcttgtggaaaagctgcgttttaaaattggaatttcctattatttctttgatgcgacacgcttaactccaaaaacatttaaaatagttcaaaaacacggcaaaaaattccaactttttttaaaacacggcaaaaaaaaatgtcaacttttaaagtttttccaagaaaaattctgaaaatatgttgaaatttcttgtccaaaaatgaccacatatcgaagaattaaagtcaattttaaaaaattgcacaatttctgtgtgaatagttgccgccgagggaaaaatttaaattttttattggaatttttttaggaattagctaaagtgttagaacatagaagttaaaaaatgggcaaattccttcacttataactaactatgttattaatttataatttatgaaatttaataaattaatttattattaatacacaagtgtcactgcggatctttttttttaaatttcggtcattatttgagtatgcatttttaatttttataacattttcataagaagtcttcgaaaaaagccagtttttattttcgtgcattctcagcgaaacaaagatgcaggaagaattcttttaaaatatatataataaatcccatccctactgatgaattgaagttttca

SEQ ID NO: 15111 - DNA, 3979 bp, Heterodera glycines
atttggccaagtcgtggccattcctatgcctttcttatttattatttgccgcttttcgctccgtcctgtgcagatttgttcggttaattgtttgactgcctcaagagactgttcgcatcgtccaacgtcgtaaatggccgctcgtccgggctcactttgtgggtcgccaactccgatcaaatacgccttgagaatgagagagaatcagtttcgaatttgcctcttccgttatgccattttcttacggattgcgccgcgtttttggccaatccgcagacggcatttgccacttgtcgcactgctaagcacaactgttcgttgtcattgcgacgtgcgtaatgtgccaatccgttcatcccttccaattcaattcacttgcattttgcctttccctttgccaaaaccaaccgtcgcccaaattgcgagcttcgtttgtcacttcggccaatgactcgtagtaactgttcccgttcaacggcacattcaatggactcgtcgttgcgccgtcgaacaaatgccggaccgaatgaatttgttggatggcttcttcgcactcgcgcagccacgcgctcgtcccttgcgattgtgccaattcgacaagtgccgaaattgtcacaacgaattggcgaacggaggacgaaagtgacttgaattggggatgagtatttatattcatttccaatggaacacctgagcaagtgacgcgttatttgggtcggtttgggcggtgcggagactaaaatgccgaaatttgttcaacaaattgagtttgatttgccccccccctccacctttccaacataattagtgccgattccttggcatctccgagtctttctgccatttcttggcccgtcgtgtcattcgcttgcgctgtcattttgctgactgtcgtatgaaatcgggcaaaattggtggtgaattcgttgatcccccgggcgttctcttcggtcgaattgtgcaaaagggtgggcaaacgattggccgattcggtcaatgcgacggcaaccgcgtggaattcatcggcggacggaggcggcaaaattggggaaagtttagccgattgttggatggttaacgcgttcagcttgtcaatctgtggatggaatgatagcatgatagccatgctggcaaattcggtgccaaaatcaccgctctgtccacaatgccattgtccggcagagaagcgagtgttttccgcaaagactcagtcactcgtcgagccgcttcttccaactgttgggccgtgctctgttcgcgaactctgcagagaacgtttcccgagtcgtggaccaccgaccgcgcgttcagaatcaaacggaaatgggaggaggtcgattcaacgcaaaagcgagcattcccagcccccaaacggctgaggactcacttgtccaccctctcgtcgccctctgcgagttcgccgcttccattggcatttgcttctgtcgctgcgacgtcttcaaccgaatcggcaaaatcactgagtgcttgtgccatttcgagcatcgctgtgcccatttggcgactttcgctggaatgtgtggcggagaccatttgggcgatcgtcgagttcaaaagacggcactgctggcgaaatgttcgcgtagtttgctgcggactgtccatcggcggggaggagggcgggagaagcggctgaccgagtcgaattcgttgcgacaattgctgaagctgggcatccaatgaacggatgagctcctccgaatggtccaattgggagccaaagtccaattgctgcacattattaagcactgtacgaagctcagcgacatttatctttaatcaattaaccaaatagttaattaattagggcaaacgcaatcgaaattggactaccgaaagctgctgacagttttggagcaaaaggccggcggagtgtttgtcgcgcacatgcgaaacggaagagcgactttcgtcgacgagtcgcgtcgcggggccaaccaccgcctgagagtcgtgaataaggccgaccttctgcaaggcacacaaatgctgcatttttgtgaattgatataactgacagctcggaactgtgcgcccgcttcgctcgccccctggtgctgtttgatgcgtttgatcagcggaggcacataacggctaacatcggcacactcgcgaacaagcgaatcgagcggttgctgggcgagaatgtgagggcgagcctatacagtaacaaatgggggatgaaggcatcggcagacgtactgtataggcactgaccgaattggcggcagcgacggtttgagtgatcgaagcggcggtctctttggacactttttcaagctgttggatggtttgttgaatttgtcgttcgccagtcgcctgattggtcacctgtgaaaaatgcaatttcacaacaaaaaatgccaaaatgggagttgagttatttctgatcagtgatcactcacacacccaaacggaacgccaaaacaatcaaattcaaaacaaacaaaaaaaatcgggactttttttttagccttacaatggtggaggaacacagcggcagctgaagagaataaaaatgagtcgaattgagcccgaatttggacaaaggaattggaaatttgaggggggggggggacaaacacagcaaaacgagaaaagcgaacaaaaaagcagaagacgaaggaacgacggaagcttaccaaaaggaggaggaaaagtgttgccgagacggcgaagaacgtcttgcggatgatgggcaaggaatggcatggaaaatgaagtgaaccaactaatcagcgatgggaggcgacgaaaaattgaaaaagggggggggggagagggagggacacaaaagtaattaagaaactaattaaaggagaaaagcagcaaaaatgaaatgccaaattggaatatttatatgtactaatatatcataaaataacaaggcaaaacattgcagtaacagaaaagcacagagagagaggaaaagcctatgataaaaaggagaaagcataatttacaaaaatgaaaatgctaatcagtagcagggcgaaaagaggctattgtcggaagataaaaagaaaaaatggctataaaagggataattagtgataaatgggcatggcaaaagtggcaaaggacactttgaaggatatgtgcaggggatgaaagagagggcgatcggtcaatgaaaagagtgtgggaaaagaggaggaagagaaagagacaaacaaagaaagagagagagaaagagaagacggcgcagacacaaagcggcgggaaaagttttgtgggaaaagagtgaggcggagattcgctgatcgctctgatcaatgatggtgatcagatcgtcctcccccaaccccattcaattcggctcaatctcaactgacactctctcctcagcccgccgctgtttccctccgatggcgttctggctaaatttgcctttgttcgttcctctgatcactgatcggctttttctcaccctcccatatattatgctttcaatcattttcccattgcaatgtcatgttttgcagctgcctcccacctgcacaaggtgttcggccgcgtttcgcagtgccacttgaggtccaacttcgccgggtcgactttggcactcgcgcgtcgcgtcgatcatcgaactcgtcgcttgggcaaccgaaccttaaaacgatgcaccgcgtaaagcattgcgctttcctcgcttacgagcagcgttcaacaatttgttgcgctgttccgccggactgagctgagcctcttgctccatgccctccacgagtaattgggacgaactgaacaaacgacggacggagtgatcagaggattgatcagtaccgaattgctgactcggagtcgcgcacaatggcccccggctgatggccttggtttgtgatgattcggttggatgattcgacgatttctgaaagttctctgaccaatgaccatcgggtgcccgtccgtttccgccccccccccccttctccacgccttccgtttgcttacgttc

SEQ ID NO: 15112 - DNA, 1778 bp, Heterodera glycines
agtaattttgctggtcaagcatgggggcgaacattgtaactgcggacgaattcgggaacaccgcgctgacgatcgctttagcaacgggacgagtgagttttctctttctcctccgtgggtcggaaacactgatcagggttgtgattttgccctataaaccgggcatttaccggattttcgagatctgtgcaaattttagcaagtgccacggttttggaatgctttgccgcagtactgaactcatgtgtccagttttttgagttttggccataacatccatggttttggtcccgattttttattttcgagaaagattcttcttaaatgatccccaaaatttcatccccgaaggcttaatgaagctaaaacagaaggaaacgacttttttagaaatgctccaaacagtcttttcgattatcgccattttatgttcgcttttgtgcagaatttttggaattttcggtagtttttgggttcgacattgccgatagccgatgtaggaaaatttttttgattttgcttaatttctctaattagaattttggaaatatgtgctaagacccaataaaaatatagaaatcgaaccccatttatgaaatttattatctcaaaaaatactctttttgaaatataaccgaacggaaaattattttttaattttttttccataaaatattttaatttagtaaataaaaatttctaagtgcaattaattttattttgcccattatatataaatttagaaagtgctgatgtcataaacattgctctggtcaaaactgaactttgacgcagttgttaagaaaagttgacgcaaaaatccgattcagttttcgccattttcctaatcttgttaaatttaaaaaacttatttaagtttgaattaaaattaaatgtttctggccattatggcgccgtgctccatatctttttttgaaactaatattttaaaattttacagactaattgagaagatagaattaaataatgtaataaaatattaaatgtcgacgcttaatttcccgatcaaaatgagctcagttcttttatttattcctttttacatgttgactaatctttgtcattttttttgaatgtataccgtatatgctctaattatagcccagtctctattaatcccgcagtctccaattatcccccagtctacgaggtgttttgaaaaataatccctctatcataatcccccagtctctaattatccccccttttctgaggaggttgaaaaataatcccccatgggctataattagagcatatacggtagcccaatctttggcgatgcaaaattaatggagcaaaatgtttaagcgacaaaaagtttgaaattaaaaaaaaatagctctatcggaaagagaataaaattctcaaccgaattgttaagcatgaatttatttcagattttctgacaaggcaatgaaatgttaaattttaaatcttttgaaatttttaaaaagtatgctgaacattgaggtggactagcgaatgacttattagaaaaaccacagggaaattgcactgtttggcgatatgtcggctaaaaaattgcaaaaatttatgaaaatggaaggattaaacccaacgacaatgaaaagtcaaaaaaaaatgaagaagtgccgagaaaaatgtaaaaatatttctcaagagttggaagaaagaatcgaattttatgagaattaattgccgtcctttggtcaattgaaagataatggcacaacaaacgaaaaaaccaattaattaatggacacaaattttaattc

SEQ ID NO: 15113 - DNA, 3323 bp, Heterodera glycines
  unsure (1)..(3323): unsure at all n locations
cgtattcctttggcttacanttgcccttcaaaatagtcaaggactccttgggcactcattcgctttttttgcatcaatgttagcatattttatacaagttaaattattcacagagaaacccacgaaaaatttttcatagttttaggtatttttaaaaaactgggcctagatttcttgttggactcggtctgtgtgaatcccctacccacttgaaaaaggggctggactgaatatggctcaagaaaacccaaaaaatggtctttaaatttagacattcttctaggacttaccactgataggaagacaatctctggcattttgtcccataacgtaagaatatcatggatcactgtcaaataattgtaccaccaatttcccgatggccaatattcatcatattttaagttttccatacattcataattgtctattggcagtgctaatcgtgttaattttgtacgatcaggcttaaattcgcctccttcaaatttcaattttgcgcttcgaaacaattcgccaattttctcatccaccttttctttatagccaaacgttttttgagggtcaattgtaaaatggtaagcccagctgaccaaatgtccatttttggagtgacctttatttaataaaatgatttaattaatagaatgatttaaattttaaaatttgattcacctcaacatcgccctctttgtcatataatagctaaaaataaaataaatttaaactttttataatatttattaatctctgacttcaagcagttcgggcgcggtaaatccgttattgtaactcgaaaattttttgtttacaattattccctttttttcttctttcaaataaagaacagacgcttaaaaaagaatttaaaaataataacatttgattaacaaaactgttgaatataaaaataaaattaaataattaataaattaccatcaaaatcggtcaatttgataactttttcctcccatttaattgtcttggccctctctttctcttccctctctctttctttcctctctttctcttccctctctctttctttcctctctttctcttccctctctctttctttcctctctttttcctccttggcttttttctcggcttcgttttttctgttaaacattttaaacaatggaaatatgttttgctttgatttttcgttttctgcttttttttcttccagctttggcaattcttcttcttcttctgttttttcaaatacaattaaattcttcggcttaaaattcaaatgaatcccaactaaaaacaaaaattagttttattggtttaaagagtctaattaatcatcacaatttctcaatttaattgttaaatgaagctttcatcataattaattaattaatgagttaattaattacttttgtgaaattccatcagcggtttcataatatgctttagcatcgttttaatctcttccctgactttactgacttctccttctaaatcaagggatatttccctgactttttcaagttcttcttctaaatctctctggccaagctccgaaatagtcacccattttcgctcttttttcattgagtttgattcatcaattgtaccactaaaatgtataaatacttgtgatttgttattcatttttaatttatttaaattaaatttgtttttgtttttttttaatttactagtcaattaatttgacaaagtgttcatttgccgcgtcaatttccttcaacttttttgagattattatgcttttttcataatgtagtctgccttctttatcgaaatattcgatttcgctcccataaattctgattaaaacgcattgtttttcgatgccttcttcattttcgccaatatatcctatgtaagtctaaagaatgttttgttcgaatttattcaaaattgactcatttgtttgtcggtaaatccgccaatatttatccccaattttcagatatgtgtaaaaatttttaaataatcataattttgttcttcactattgaaaaaccatgccaaaagcggtcaaattttcgtaagcatattgtaatcattttttcgaaaatgaataaagattttgggggattgaaccgaggcagagaatgaagaaagacttcagctcagacctaagctaaggcattaaattttaacaaaaattacactaaagtgcggtctctcagaaaatttgacttcctttggcttcgtccattgatccgattggtaattaaatgattgcatttgatcaattgaaatgccacggcatttaattatgccatccgaatgtgtttgatcaatttggaaataaaacagtaataagagcagtaacggtagaaaatcaaaagccattttttctgaaatattaaatattactttaatcctcgattttttgagcgatttagctatagaattctgaagctttggggaaaatttgattatttttgggaccaatcttaccaacaaatcttaccctaatttttgaaaaaattttcccggcggtgcctgtggcattgccgtcgtccctcccttacccataattttttttgagatttataagtcgactcttatgaggttattttatgtttttattgcaattcctagggatccgtagggaatttcggtggacgaaaagaggaaaagtgccgcataatttcatgggttaatatacatactgatgattatgccgcaccgaagctagttcaagctcaaaatttgaattttattcattttttagatttatctttggacaagagggttacgcaaaaataaattaaaaaattaactttaatttcaattaattaaaaaagtataatttgttaaatccaagatcacttcaaaatggacatacatatattcctttttacccataaatctagaggccggacttttgaaaaagaggggccgggattcaggctttggaagaacgagaaaggactatcggggtcaaaacccgggatgatggcatcattataagcatggtaagcaatgttattaattgagcgaaaatgccaacggctacaaaatgattaaatttggagggcaatcagaaagctacaaaagattatgaatgaataaatgtcaggattattggttgtttcaccgcttgcgaaggtacctcttttatggggcagaaatttagattatggcaaaatattgaattggcatttgaatgatcacttcaatttggcattgttctagtgaattattgaattggcaattgagtgatcactcaaattgagcataattgtagtgaattattgaattggcatttgaatgatcacttcaatttggcattgttttagtgaattattgaattgacaattgagtgatcactt

SEQ ID NO: 15114 - DNA, 1965 bp, Heterodera glycines
tttcaccctgaaactccaagggtcatttcgttgtgacattgaagtgaccccaggatcttcaggggcgagagtagacagaataaaagatatggtttattataaaattattttcattaaaacgtatataatttattttataattgattaattctcaaaatatatttttaattcctaactttgattaacaagaaattcaatagataaaaaacatgccatgaaatgaaagaaaatatgcttttctattattttggtgtacataaacggcatgaactttgctgatcaaatagcgaccgtgctcatccggtgcaattctgctgtccggatttccttcatcaatttggactgccaacttaaaaggcggattgataatttttattagagcccggtaaaaaattttccggaggcgggagcaggagttaaaacttttctgggacgggagtcccgatcggggatcccataaaaatcccgctgccgttacaatcccgttcaccaaaaaaaaacgggtgcgggaccggaaatctcgtaaaaatcccgcgggggtcccaatctccaggctctgattcttatttattatacagaatttcacgattcaattttttatatttcgcttttctaccggcttcggcttggtgcgtttgtttgcgcgttttctttgttgttttgccgtgttttttgcccgcttggatgatgttgaagtggcggtgaaagttgaacttctattcccatcatcaatgtcagactcggcaccaacaagttcaacagttgcaccaatgtcgagaaatgccgaattcgcgtcagggtcccagtcaatttgctcttcggtctcatcgatttggaaattttcgacaattgtgttacttttgttgtcctgaacaaatttccagctcaagatcatttgttgaaaagctatttgttaacagattttcaataaaatttctaagtcctagcaaatttttaagaaaaataaagaatttatggacgagcatgaaatttttggaattaaaaaaacaaattttagccgttctttctaccgtctattcctacgattcgaccaattttcctcacaaatcgggattgatcgatcataatttgattaatgaaaatctaaaaaaagccaatcgtattgcctatgagatttttttgcgtaaaatttcgtttaatttctttttcgatcgacatttttgctcaaattttctctggcctgaccccctcggccttaacaaaattaataatacgttgaaagattttttttgaaatcatttaaaattggacctaatctccaaaaaccagtagcgccttcgatctccctatacaaaatataattacttagttttattaatactttgagatttgacctgtcgtgtctacatgaatttgttaagatttaccaaattaatatattttttgttaattaattataattattctgtttttgatttaatatttaccattctgaaatcgtttggccaaatttcgttgatcccgccggaggtgcccttgactccttaattacgggcaaaatcattcttggtgatgccttggatgttgtcatggtgtgcctgaaaagatttatgtgtttagtaaaaattaattttcagaaaattctaaaatggcttattttctgaatgaaatttcaaaagcttatatattaaaaccactttggaaaaaaaattaacaaatatcaaagaatttagaaaaattatgacagccaaaaaaacaataccattgaaatttcttcgtaatccagaccgggaatgtgcttcagacctccgcaacgtgccagtctgcggatgacagtcttggtgatgcattggatgttatgccgaccagtctggaaaataggaacagacaacaggtattttgggaaaataaaaaaaacgaaaacgtcattttacatttaattacataaattatttatcataagtattaattgtctcgaaaaaagcaccaaaaaatcgcaaaaaa

SEQ ID NO: 15115 - DNA, 1439 bp, Heterodera glycines
ggggctgtcaattactagagcggaatttgggggagggggcagcaactcaacgccgttttcaactgcgtagaagaaaggatgaaaagtggtagcgtaggggaatttgaaattgaatatgaaaaagctgaaataacggatgcggaagggggaggagaggggactaggggtggggggaattgggggcccaattttgggggggaatttgggggcggaataagggtccttacactactaaggcacaacaaatcaaaaacggatgaacaaaaaattgaaattgttcaacaatttatagtaatgaaagatgaatataagccaaaaggaataaaatattcaagaaaagaatggcaccaaaattatgacgaaattggcaagaaaattggagttggttatgtaacaattgaaaaatggaagaaacaatttggaatgggtgaaagaataaatgagaaagaaaaaatggaaaaaatgaaaatgtaaaaataagtgatgaaaaaattgccaattgttgcaaattagtgggcagaatattcgaagatggaaaaaacaatttgtagaacaaaaaaggtaaccttagaaagaaatgggaatttttactgatttttatttgtttggagctgtttgacaaatttattcatataatttctctatttaaatttattgctttttaaaatgcataaatttgctgaaaaattagcccgaaaatggcgcatataaattatgaaacaatataaagaaggatttttttggaaattttcattaactctgacattttcggaataaaaaataatcaaagttcgcttttaaatgtgtaataaatccgagaccaaactgggaatcccttctgcttatcacatattcataacttctatacatttgtattttgcgcacattaattaaatactataaaagctgatcaatgatatttttggggattatcatacgcactaaaagcgatgattaatataataatttttaaatgaaataaatcttatattataattataattaaacactaacacttttaaaaaatatatttttaatgaaaaccattttaatgaaatagaaaaatattacctattaattttgccaaataataaaattgatctttttttttttgaagaaaacgtatttccggcaccttgtatatcacaataagtaacgtgttcttacaaaatttacttaccaaaaattttcattcattaattaatgcccatgaaattaaataactatagcgaggttaaaaatttttaaaaataatcctacagttttgttttgataaaaaatgcacgaaacatcatttttagccgaaaatatttcattttaacgtcccataaaaataaaatattgattattttcattgcccaattcttaggtgtgatgttcacctgacgccggaggacaggcattaatgtcaccccctcattaattatgatttttactaa

SEQ ID NO: 15116 - DNA, 1530 bp, Heterodera glycines
  unsure (1)..(1530): unsure at all n locations
tccacgctgcattgataaaaggcaacgcagattgaacacttgaaaaattattattaaatttgagcattttttgatcaaaaaatttttgaaaataaattcaaattttagaattaaagtgtctaaaaaattaatgtttttttgatatacaatgatgactagggttaataatatacttaaaaaactataaaatatttgattttgaaatttgcaagtataaacttttgtatattttcgaatttataattttaatcatctgacaaatgcaaatatattgaattttgaaaaatttccttctctttaagctcaaattttttcgagttttaagggtatattttttgaatttcctaaaaatcaatcataaggtgtattttgcatttttcttatcatattttatcaaaaaaacgaacgcatattctattacattcattggtaaatgccgatttccaaggaatccaagacgcaatgcccagatccaaggatatacttataatccgaggactaatgggagccctcttgcttaaaattgacaatcaaaaattaaaataatttaagacttttttaattcagcggaaaaaactatgaaacaagacgaactcctcgcaaattttctcagcagccctctaccaccattgccaccaagaaaaaattcatcaacgaatacccgaaagagcacatcgatcaatgatcagctgaatgatccgagttggatatatgatatcaaaattaactatggacaatcatcgcgcaacaaaacgtaccaaaatagaactaagctgaccaaacatgaaacgaactttcacaaacaatttggtcaaaatatttttaacagtaaggacggatcaactgaatctgaaaaacgatctaatcagcagacaaaaaaaaatccaattagcatatatggacgagaaggacaagaagtttccggcaaccaaagtgatcagaatactaaaaagacatcctctgataagcaaaggaacgaaaagaataaaggcatttcatttgctaagaatgtagtcaaatatttatctgggcattcatctgacacccagaaagatcaaaagccaaaaaatcgcaagaacgaagctggatcaactggaaagaatactaatcagtcgaatgatgtcccttctataaataaccagcgtgatcaaatttctcaaaaagcaaccaatgatttatatggacaaccatctgaaaccccaagttatcaaaagaaagcaaatcgcatgaacggagccggaccatcggagaagaaaagcgatcagaatgacaaaagcgagctgaatgaagggacaccatcagaaaatcaaattgacaaaaccaaaacaaatcgcctgttaaaagcaaaagaaattttgccctttcaacagaaagagtagatacatttattanggatgtgtgagaaatgaatttttaccgagaattgagaaatgacaccgagaaacaagaccgagaagtgaaaaactgagaatttctcgagtcgcgaacctagaatcttaatgaactaanttaaatgtattttttaaaagt

SEQ ID NO: 15117 - DNA, 1350 bp, Heterodera glycines
gatagcgacaaccgacgtatattgcgacaccttgggcgttggtcgtttatcttttgtcgttcgtaattgtgattggcccctgctggggtccagtggtgccgaaacacgctgccgggaacacaaatcgtctcacatcaaaacgagattttgtttcggtacgagtttaagagtggaattagcacgaacttagttagaatttcatttgtttcggccttcaacttttattgagcttattgtctctacatagaaatggataaatactataaaatgtcattagagtaagcagacagttaaagtgtcacgcaattttcattttgaatctgataaattatagcacaaaaaaaactcacacgctaaatttctctttttctccgttatccaaatgaaattgccatatcatattttataaaatattttactaaataaatctgtcaatgaaattaattttcgatttggtgcaaaaataatttcaaggacaaaatcaaaaaaaaattgttgcgatttggccaaaaatgctgattttattttttaaaattgtttattagatatttcatctatttgaaaatgagtttcttcgataatccaattgttctgaatggtggaaaggcattatttgcctttttgatgcttttctccaacggattgttggtgttcgtctcgtttaaagcaaagtattttgttaattatataaaattcgcataatttagataatagttaattcaaaattttccctttaaggttcctcaacagcacctgcaattggctgatcacagccaactcggcatgcattgccatctattcattcacttattttatccagttttggcattgtgttgatcagtccctccggcattcccctctggctttgttttctgctcgtctccgtcccgctgttcgccgtctgttgccaatacattttgttcccagtgatcgctttggacagattgatcggagccctttttccatttaagtaagtaataatataatttacaaatcttcaaacgtctagcgggggtttttttaacccctcgtaggaaggcacaaatttttggtcaaactttaagaaatacggtaatttaaattaattatccagacaaatgggcaaacgttataagcgccgtttcatgctatttgcattaattgcctcaatttcgtttgccatttttatgctggccgcctcaatcaacaaatccatcattcatttctctgaaaagtaatttcccatttatttctgtagttaaaaaatctttgataatgaaaaaataaaatgaattttaaaaatataaaaagtgatttattattatagaatttatgaaaatttaaatataataatttttttgtaatcttaaa

SEQ ID NO: 15118 - DNA, 1916 bp, Heterodera glycines
tggtaataatacgacaagaaaattttggaattattaaaaaatagatgataaaataactttctgaaattttttttgatcaaattttgagaataattcaaaaaatttttagaatttttagcaaaaaattttgcatttcgtgttttcgttttttagggcattccgttttcgtatttttcgtgtttcgtatttatttttcgattcgcaacaactctgtatcagtgttttatcaataaattttaaaatttaacgtaaaacaaggtcattttttggataaaatatgtgccaattttaaaaatcttacaggcgatttatatcggcatcgccgtgtcttaaaaatcctttgatttcttaaaaatagcaatttcgcggaatgttctgatttcgaccaggggtggagcgcgaccgcgggatgtttttttgcacgatccgcggccgcggcaaattgaatgcgcgctgtgcgaccgcggattcttttgcgcgatccgcggatttttctgtgcgctctccaccctgatttcgacccaatacgccattccaactggatgagttttgacggctttcgatcgtcaacgaatgccaacattggcacggaacggtttggcccaaagttgggcgacaaaagcgccgccgggctgctagagccgttccagcagaaggacactgagtacagcttcatatacaacgcccaaattgcctccggtctccaatcggcggaacaaagcgcggccagctcgcagcaaaaggcggtgacgcgcatccaatgcttggccaacattcacttcgcatccgaacggcatgcacagctgcgactggagcagtgccgggtgggccaacagaacgacaaaatgtcgcagcctcaagaagtgcagccaatggaagcatttgatgaggtgaacacgcaacaatggcatgacttagataatttaaaatgtagagcagacgaacattgcggagcagataaagcagcagctgctgaccccgtgccaattcagctacgcggacagagtgatcgaacgcgtgccgtgcccccaggacgcggaggagtggtcgaagaatcaaaaaagcggtgttgaagttccaggtgactgggcatctgatgccgaactgcttgaccaatatgggcgttcaaaaaattgttttccttataactcatgaaataattaccgtatttcctcgattatacgcccccccccctcgaatggaagccccccctcgaatataagccccccttggaggggggttgaacaatagaagccccccctcgagtagaagcccccttcgaatataagcccccctcaaaaaaaaattttttttcaaaacttttgaagtcagaaacgtgcaaaaactattgaacaatttgttttaataaaacattaacaaaaaaatattaggaaacttctgtatcaatttcttcgtcgctttttatggataattttataatatttatttgttattttaaatacttttaaaacacaaaaattttctgaaaaaaatagtatttttttaaaattcataaaatattttagaaagactaaatgtacaaacgggacccacgcgtttcggcgctcgcgtttcggcgccagctctttttccacgatagcttttttctttgacatccaaatacaacattgttggtatcactcgaaagctcttaacatgctctattagccttaccaaaagcgaaaagattttcaagcctggaaaaaattttattacgaaaaaacttcaaaaatttcgacttttcgcaattttcatgtataacttttttggaaattgtctaatagcgaagcaatagcttagaaaaatttctgttaataaattgcactggaaaagattttgatgaaaatcactaaaaaattttcaagcaaatatagaaatattatacccaatatattttttggtttgttaaaaatggg

SEQ ID NO: 15119 - DNA, 1177 bp, Heterodera glycines
aaatttggtcattttttgacaaaaatctgttaacaaatcgctttaaaaatcgaaaattttcccggcggcgcctatcggcaccgccggactctctcctctcgcccatttcccaaaagtttttttggaaaaatgcgccgcaaaaaatttttaaaaatctgatttttcacccgagtgcactgaaatttacgatttgctaatttcctcaacaaaatttttaaagatgataatcggacgaaaatctaatttttaatacatttttgattaaataaattgtaaaagtaactgatttgaagcaattttgcaaaatgttctgatttttgactttaaaatctggttttttgagcccgatgttctgatttcgaaaaattttcgatcgcacccctggtgtatacacatttaaatacatttcgcatataaaaaggtgaaaaaatttacattttaaatacatttcacatataaaaagatttaaaaaaatttatccaggaaatccaggtttttcatgcctggacctggatttctaaattgatctggacctggatttcctggacaaaaatccaggtccaggaaaaatccaggttgccgaaaaatggcctggacctggatccaggtccaggtcgagctctagaaattactgaattcctaaaaaaactcacgaaaaaatcataaaaaagccatcttttcgtcaagtcttcatatatgattgatggctgtcatgcatattttatttttttagcttttgtctcattttcgctttaatctcttctatttcctccttcaaattgccccattatccgccattaattaatgtcttctcccccctcgccaaaagcctcgctcattttggaggcacaggccgattttgcgttgaaattgctgcgcgaagtgtccacggacgaccgttcgtgcattgtttcgccgttttctgccgccgtcactttgtccatggtttacgcgggcgccaaggaaaagaccggcgaagaaatgggccaactgctggcaaatggtgggaagtttcgaaatttcataaactgctgttttagaattttggttttttgtttaaatttgggtcttgaattcgaatttggccggaataaatggcagattcgttatcaaaaacttagaaaacccccagaaacattatcctcctactttgaaaacaacaatttctgttcttttc

SEQ ID NO: 15120 - DNA, 2281 bp, Heterodera glycines
  unsure (1)..(2281): unsure at all n locations
aaaaggtaactcgcccggtgggactcgatcccacgaccccagcaatccgtgccgtgctctaaccaactgagctacgggcgctcttntagaggttctctcaggtcctgtatcccactttctcncacactccgttccttctggcatcacataattagtgcgtgaagttttacaaatagggtgacttttgtagtcattttaagtactttaagttttacaaatatgcgggtttaatattaatttttagtatatgcgtcatgttttagaaactttacaattgatcacataccagattttttacaatttgcaaattacaaacaagcaccaaattttacaatcaggctgattttattttttgtattaattttttagctgcttcaagttttacaaatagtcgaattttttctagttaggctttatgccattttttcctgcaaatttctagaacttagttacaaaaaccgaatttaaccaaaacacaaaattcatagcactaaaaattcttccttccccgattttcggtaccgcaaggggctgtccagtgccgcatgagcgacccggtggcgcggaattgtctgaaaaacaccacgcgccaactgagccaactgatcgctgacggagcgctggaagaatgccaatgcccgttgccatgctagtgggtacatttcaaagggggccgcccagaaaagtgggctcaccgactaattggcatttgcgtgccaattctcgcattttccgaaattcaaaaaattcccgagtcacatccattttaatgtcattgatcagactgatcactaattgccttcccccatttcttcagtgagacaggctatgaggtgacttactcagcagcaaattggccctcgggtaccaccaaattactggagtgcgaaagcaacgacgctctttgcatggagaagtatcggatcaacgcggcaatgatgcaggtggcttaggggatgaatcgagggggggggggatcggagacggggacacaattattgtttggcaatttttacaggtgttctatgaggaattgaactaccaaacattgaccgaaagcccggcatacagtgtaattaacacccgtccttgggggagctggacgtaataaaacattctactgatggaaaaccaacccgtaatataccatgattagggctctaaaaaaaccaaaatttccgtaatctgtcattacgcgtccagctctgttctctgcactctgttttgtaagcatcccctattataaaaacagatgaccagtttgatcgccgatctcggaggtctcagcggactttggattggcatctctgtggtcagcattttggaggtggtccaactgatttggttctgcatgcaatacatccacaagaagaagtcggtttcaaccaaagaaggaactgacaaattccagctttttttactcaattattttgtgattttaagaacgcccgaactgttggcaatggtgcgcagtgcgcggcaacgctcatctgctggccacacagacaaatcgccgtccggcagctcttcgtcgccacctcgtgcccggactgagtcggtcggcgcctactcactcaaatcgttgcattccgtgcgcagcgatttgcggcccggcattcgcattacacaggtgcgaaacggcgccaatcggcggcatgttcaaacaccaatccgaatcaccccaattaggagcggttaaaaccgtaaaatttgcaggaacgtcgcccatctcatagcactggttcatcaacgccttacttggcgcccgaagtggaattgccctgtacatgtttgtacggtgcgcgaggccaaattgtgtttatgaagccgctctgccctttccacgggtaagagttactgtatatacagtattaacttaggtgtcccataacggcaaatgcttatgtggccgtgccattttaacatttttgcatattttgtttattgtcagttacatggtgcgacgaatcatgcgcccacactctgatgaggaggaggaggatgagatatttgacgaggaaggcgatggggaagaggaggaggaagcggaagatgacgccggcggcgaccatccgcaacggcgattactcaacccggaagagatcaaagcgctggagcacgaggcggacatggaacatggacaagcggacggcggtgcggcgacggtgccgcacgataacggcaagccccgaccatccgtgccctcctccggtgccacccgacgcgcatcggcgcgtcgcggaacggtcaaatcatcacgacgctcatccagcagttcgtc

SEQ ID NO: 15121 - DNA, 678 bp, Heterodera glycines
taccggatgaagagccaagcgcgtgtacacgaaggcagtctgaggactgcagaaggtggacgccgatctccgaagacgacggacgcttctgacccgttttcgtcatttttgaggccttttgatccgcaattcttaattttcaactcatttccatttttttatgttgtccaccacttattagcattttgacgacggataaaaaacatttatccctaagttattcaccgtttcgacctcaattttcgacccaaaaataatttaaaaaagagttggacatttcgacccctcaccaaatcatactgtttttggcaaaaaatcgtcataaatttttgtcaaactgaattatatctatcattcttggtaacattcatcaatatagccctccgtttaaggaggttctctattttcaaaaaaaaattcaaaaaaaacaaacaaaaatgataagtagggcccggattcttagttttttaactattttttctgcggttttatttcaacgagaaatgcacgaaaaacacatttttagctcggaaattcttcgttttaacgccactattcatcactaggaatcactattttggagctttgccactaaaaaaaaattattttggaagttggccactaaaataattttttgccactattttggcgtttcgtcattatttttgccactatttt

SEQ ID NO: 15122 - DNA, 1533 bp, Heterodera glycines
  unsure (1)..(1533): unsure at all n locations
tcataaatattttcgtcatttttttgcgaacattccttctatgttaatgagaattttttcgaaatttggcaaacttctaggtgtttttgatacaacgaacaacaataaaaaatatgcatttttaagttttaaaccccattttttggttgtttattgtactttttaggtttatttaagcaaatattaaatatgcacaccttttttgggatttttgggggtttacaacatatattttggcattttttatccatattttggtccatatttggccatttttggcctttttagtccatatttcgggcttttttagtccatatttaatgtccatatttcgcgttttttagtccatataatttacaaccctacttataaattaaaaaaaaataataagcgaaacgaaccggcgcttatccaatcttaatttaattagccaaggttatgcttaattaatcccagttaaacgcttcaattagttaattaatccctgctagtccccggttaaactctcattttcttcctccaatttcgttacgctggtcctcaatatgtccagattcttctcaaaccctttgatgacttttcccatgtcgtcaacaaaacattcagcgtttgcctttatttgcttcattttctccaagtcatcctccaacgcattaaacttttcacaatatcccttataaattagagagattaatcaatttataaaaaataaataaaaatgcacaaaaataattctgattttttctccttatttaactaacaaatacttattatttgttaaaaaatatttaaaaatttaataatccataaaaaatcaaattccttaaatttattcaacaaaaaagggcaacgtttcttataataatcacatttaaataatgaaattaattttctaactcacataacagccccccttcccaccgccgtttcccccttttgcgggcacaatttgcgtgaaaaaaatatccaacggcaaaaacaaaagggcaaaaggggcggaggaaaaaaggagcagcaaaaaaagcatttcgaattattaacggaatttaaaaatatataataatatggaaaatggtttacaatattatttctataattttagcgtttcatcaaattaatggaaatatttttttatttgtcaatatcgatttaaatgtgaatcgataaatgaataaaaatgctaaattttacgattcaaagaataaaaagaataaataatttaaaccatgcttaaatttaataataacttttttttgtaattctttttattacagattttataaaacaaaaggtaaatacagtatatttcactaaaattgatttaaaacgatctaaagcaatctaaaaatagggtaggggccaggtccggggccaggtatggggtccaaccgggtcctgaaaaaaaaattanaatttcactttcaataattaaattcttanagattttaggttttccaaattacttgagaattttagttttgttttattgtcatgactcaagaaattttgtaggtattttaaaaatataaataa

SEQ ID NO: 15123 - DNA, 2907 bp, Heterodera glycines
aggagcggtaaataaggcaatttaaaaataaatattaaagcaaacgcccccaattctatttttctattcattcctaacatttttagaccgtttttaacaaattttaacttttgggactgtaagacaattttcccaacaaatattcgaattttcaagtcacagtccaaatttttgaaaaaataaaatccggactattcatttcttgtaagatggaaaataagcactggtaagaaatgtgttagcccatttttatctaatttgttaatactattaaaaactttcgataaatgattacctaatcttatgaaaaaaagataacctttaagcaattagcagacattgaaaagcaagttctcagattttaatatttccaattcatatgttttgttcgaatataatcaaaccaaaatagaaaatcaggaagaaacatttgtctttcggtcaaacttcggcatttattcccttggcctttcaattgccttcttcgtcgtgcttcatcaaatcttaaagaattggatcacaattttgtggatttttggcagtcatttaacacatttcccaaaaaatgaaaaaataaatgcaaaaaaatactcaaggtaagcgcattgttcgcttcaagttcactgagcatttgagcgcaccaaacactgacatcaaattcttttgacttaacaaaaatgaaccattatttgcataaaatttcaattccgttaacatttcgttcgtcttattatttgatttctttgtggattaacagaatttttccaaacccaaaaattgccccttttttttggataattctataataaattacactcaaatttaaatcttttctataaattaaaaaatgagtgcgtggcgtaaaaagtgttgtgaagaatcaaaaaaaaggatcacccgactttctcaacccaactttgggggatctcagcccttctgaacccactttttgcttcaaaagtgccctccattggtccaaaataattcgacgatgcattttcaattcgccgtaccattcgttgattagtttgcacactccgatttgattgagcctacacaaaaaacaaacaaataacttaaggtttcgcttaaaatgaaatttaaaaattcttccgaattttccgctcactttttgcgatggtttctcttcgtttcacgcaatcgaacgcgcaaagcacgcaaatggtcagtgtaatcgcgccgaagacgttcagcggaccaaacggtggccgtcggaaacatttgggacggaatgtcgcgcggtacgaaatcggaccgaaaaggaaaggacaaacggtgccaaaacggagaaataaatgacaattgggcaaattaaactattttaaaagcatttcactaattaaaggggccaaattcactttattcggtcggcaagccttttgacttcgttgaatcgctcgtccatttctttcattcgcttcttaaagctgaaaaattgaaattgttcatatgacgttggattaaatattgcggccttgtgcttaagaaaggggctcaaaaatataaaaccttttggcattcgttttttgttttgtttaagtgaacatttagtgcatataaatgcctatggcacgatttttttagactttttaaagcatatttcggccaattaggcaaggtttcataagaaaaattcagtgagtttgtattttattagaaaattttaatttcaaaaaatatgagtgttttcaaatttattggcatttttctgaaatgattcttaaaacacattccgggataaaaaaggatggtgccataatttaggattttttaactggggagttcccgctggaatttactttttttttttttttggggggggggggtgcttactccgtgtaccatagccccgcatttccactgggacttgcttttcaatgaattggtgcatgttaacgacgctgttcaacagttcggtcatcacttggcctgccgtttcatatgttgccaaacgctgcaccaaattggcaccaacgaaaaaggaaagttcggcacgagaatcttgaatacgctgaaatttggaatggttatgcaaatacggaaacaaattaatagaaaataatgagattatgatcacaaacaaattgaaggcctttcccctttataaactctgagtaaattttcaaaatttagtgaattgaatattttggacggcacacgcatagcgacggcacctccaaattagaattttggttataagtatcctaaaaaggaccagcagcagtttggggaaaatctgcttcaaaatttttaattctaacggcgttttttatgtcaaaagaacagagaaaaggccgtcgattttgtcgttttttctggacatgagaggcccgactcgaagaaatggcgtgggagaggcaaacccgacggtttttgtatataataaaggaaaatgggtccctaatgatttttaaattaattttaagaaaataaaaacaaataatccgaacctctctttttgtgccatggatagtacaataaatttgccataaaaacgaattctcaccttattaagatatgtgtcttgctggtgcgcttccgaatgctcaagtgaatgatgttccttaattaatgagacaattaaggaacccaattggactaattaccatgccaaactatgaacaaatatgcaaaagtgacagctcacctcttcaatgcttttcagtgttggagagacgagcgggtgataaactttcataattttgtcgatacaattttcggaaaagacctaaaaaataaataaaatcataaaaaataaggtttcccttttcaccttccacccttttttttgtttttgcacgagagaatcgcaatttttggcaattgctttagaaagtaaaagcagacgagcggcatgttcaaagggaagcgcagaaagcagctaaa

SEQ ID NO: 15124 - DNA, 1550 bp, Heterodera glycines
agtcattctgaagaatcggagttcttcagtcctttgttgttttaacaactcttggagctgttcccgagcctgcttgtaagccgacgcagctgggtgattttcttggataacttgttccaaaatttcaaagctgatgaccctgcacaaactcttcatcgtttgtgattttttcaccagtaaaggtgggattttttcgtcgctgctccatggcttcgactggatccagaatgtataactgaccgaagccaggaatctgggttgtgccagcctgcatgctgcttatacggcgatggaattctccattgagaattactgccatcggtccgcctgcaggacttggcttattgccagccgaaacactcgcaaattggagcaaattattgtaccgcgacatattcctaacaaactccttcccttcgcggggttgtttgtcgcacacgatgagctcttcaagctcttttgggtgcgggttaagctttggcaaaacaacccttccttgtcgacagcaaaggctgctgttctcatgcgggaagagtagtgctccacaatgagagcactttttgtcgccaagctttccagaatcggaatattccggataatgcttagctgctgcagcagcacagcaccagcccttgtggataagatgacaccgtttagtgaaaggtgtaacctggctgagtgtatttgccgatgtgcgccgctttggtgcgggtgaaggcgaacggctaatcgaagcagattgccgcctgccaatgcgcgctgatcgccttggaggcgtcttcggtctgacaaatattgcatcgtcggcctgcgcaattggctcttgcggtgcgcaagactccgacaccaaaccaagtgtgtcagcttggttttcacctgccacttgggcttgggtgagaacggcattgacagcatttacactcatatgaggttcgatgatcataatgtcatttttatcatcaacttccattgactcagcggccttggatgtcgactgcgcttcatccgtatgtcgatagacaattgggcaaggagttggcaccccttcccttggatgatatggcacattatcagagccatacagctcgttaatgtgccacaaaatacgcttcttttcataatttatgaataaacttggtagaacaaatgttcgattgttcataagccaggattcagcatacaggcaaacgaagtacccgcagctatttccatcgtgttgtaccgtgagattttcggcattaagaatcccggtcaacactgtcgacggcaaaatgtcacaaatgatctttttaattttatccgtcagttgcggatccaacctgccatatggggtaggcaaagaatcggcaaaatgagtgccaaattgcacatcatggacaatgagagcccaatgtccagggaaatgtactggcaaaagtataacttctgccggaacattagggtcgtacccaaatgtcatatttttgtaaggcatgactctgtccaggccattgctccataccattgggtcaacaacgaccacttttcgttgtgatatggttgccaagtat

SEQ ID NO: 15125 - DNA, 1380 bp, Heterodera glycines
  unsure (1)..(1380): unsure at all n locations
tattttaaatacatttttaaaagttttttttttgacatttcgacacggctaatttgcgcatatgcccaaaatagagtcgagtccaaaaagttggctggaagtgtcaaaaatgactcaagaaaagggccacgaatgttcaattttgctgaaccgggacgcaaatgtccgggacaccaaaaactgtactattgtttgggtctggattcgggacgagaaaaaaaaatgtcgggaatcggtctgcatatataatttgaacccaattttgggtatagacccgggcaaatatctgtacaaatttattttaaaaatcaattttttttcaaatttccctaccaccacggtaaaaatgggaaaaaaacatgtacaataatatttttcctttgccaaccttccgccggcaattcccatcgcacggcatgttgtttgtacgcaattgcaacaacaatcattctttttaattattaaaacaaaattagaaaaataattgaaaaattggccatcagagccacctgtgtgccaacaaccaatggcaccattggtggctggcgcaacaattgcggcggtggggcaatgaaagtgggtagtgccggaattggctctggcagcggcacttgcggggccggtgtttgcacaggacagggttctgattttttgggactttcaaggtcattgtcttgaaattgagaattttagacagaaaatcaaaaaacctgaaaatctttataagaaaattaaaaaaaaaaattttttgaaatcattttagcggtttttggaaaattttttgaaaaagcactaattcagcataaaattttaaaaatcgctaaaaaaaaaatcaatttttttttctttaaattttataagaaaattttctaaataaaaattttggaggggaggggtaactgcgcgtaatacatccgatgaaaacatgcataaaacttgcctggtctcgggcacaccggtggaggtgggcactgttgtggtggtgggcaaatgaatgttggcggtctgggaggaggctttatggagcaattttaaaattccaaaaactgcccccccccccctcattgctctaacccttggcaatctcattgggaccggaattgccacggggcatggcggcattggtggacattgaagcagttgttgttgtgccaggggtggcactatcacctgctgtgccgccggcattggtgccgccagcggcggtgttggcaccgaaacgcatgcgcacgggcgacaaatcttttttatggcaaaatcatttgtttgttaccaatttgataactttgaaacttgatcaacttttctctcgagtagctattcccaagtttncaattcaattaccgcctgctgctgctcattggtttgtgatgcttcggc

SEQ ID NO: 15126 - DNA, 1848 bp, Heterodera glycines
  unsure (1)..(1848): unsure at all n locations
tcaggcaaaatcagaaaaacaataattagcatcaattnatgataatttgttggcattttctatttaaaattatttatagattaagtatgtgttttttgagctgcttcatgtaagcgttttttgattggcactgcgattgagacatttttatttgtgctctgatcactttgattgggtttgtttatgtgatctgatcggacgatcattttagtgggtggcgaaggttttcttcccattttttctcctttctgaagtggtttctgcttgtagcattaagtgtttgttatgctcaaggccatcgtcatcatctcaatcacatggagattacgcatacaaatttgggcaaacaaaaattgctcataaaccctcgggcaaaatggaaattttttgagcgagtaatggttagaattgtccctaccaagattttttttcttgaaaaatttctaactgaattttttttttaatttttggtggcagggggggtgagggaacgacctgctccgaccaataaatacaggcatgtaaaacattttttttcaaaaccggaagtcctgttttttggactaaaacccctctaaatggcaacgaattttttttttgttgtaattttctcaaatttcagccgcctcactctggccctaggctttacacggtttgtgcgtcgcttccggcgcatcgtccgaagggcatttttcatggcaacaacagtggtgccactttttgaatggttcactcggcgccgtttggccattcttgtcggcattttaataatgtaaaaaacgaataaaattttccctaaatttccctaaattttcaagttgttcactattcattctgctattcgaggaatatgtggaggacagttttgcacaagcggacaaattgtttcggcgtcagccgagcaatgtaaaaaacgaaaaattttccaaaaaaaaaatccgaatttccaagctcccacacccaatttgtccgagcaatggcggcgttggcgcaaacaccagcaaaagtgccatttttgccacactaacccagcattgccaacgctgcaacgattttgagcttaaagcgctccaatctggtgccgaaaaatccaaaaatttttaaaaaatattttaaagggcattgtcgtccaacgggatattttgatgtgtactcgtgcccagcagtggcggagtacaaagtggacaatggcacaaaatcacatcacacgatcatttataagtgagaaaataatgtttttaatccaaattggacgcaaaactcgagtgaaaaaaaaatagaaaacgtcatttctcaataaaaaaaatttcaagagttcgtgtctcccccccctccccccccccacgaaatgaaattttttttttacaaaaaattgtgtatttttgaaaaaaaatttctcatcgatttgtttttttaacaaattttttaaaattaaacgcctcgtagaccggggggaggggggtaattgaagattgggggataattagataatatacggtatgtctattgccgctatttaaaaatttttttttttgttttgttatcgcttcactttttgctcaactgatttttttcttacaaattttaggccctgcttgaccatgtcccgggaccaggagagtgacagcttttatatgttttgtatggcatcaatggccagtgctgtgctgtccgcgctgtacgttcgctggcgtcgtgaactgattgaacggcgtgcatttggctcttcggcacattcatacgcccgattggccaccgctgtggggagcaattgaatttgtttttgttttttgtggaaaacgcaaaaattcctccgatggcacttttgcacaatgantaaattaatga

SEQ ID NO: 15127 - DNA, 979 bp, Heterodera glycines
gtatcagttcccccccgagaaaaatttaaaaaacgggacaattttgtgcggggtatcatccttcccatacgacggacgattgagacaagggtcacattttcaaaagacagcccaattatccgtccgatggtgacttttttttattgcttttcaaaaattttttcgtcatttgaaagcatttcaaaacttggatttcaaaatttttctcttaaatattgtaagtaaaaaaaaaatgttttttttaaaataaaacagaagtaaataaaaacggggaaaagagctgttgccgcttttcccgccttcaaatttacattttttcaaaccttaaaaaattgtcatgaatgctctaaaaaaattttttgaaattttcttacaaaaattttttatgatttttttttttgaaaaattttttgttagacggttccgtccgcgcccgtcattatggacccgcaccagcagcaatatcaccagccggcactcattcaatcaccgccacaacaacaagagtacacttctcctaaaaattgattttttttttactcgtttttattttttgtgttgtgtaatctccgctctcaggtatatatagtataaatgattttggtggcaaaagatttttttttttcgccgaatttttttatgtttatctagtctttttatgtatgtaatatggtaaattaccgatggtgccaccctttttaacaacaaatttttcgtcctgaaaagtaagacaattttccaagggcttatcgggatcgctatgatcttgaatacaaaatccgtttcagacatttttgaatcccgaacattaattccgacagaaacttgaaaactaaattttttttattttaaaaatcgaaccgcctgatgaagatttcccacaagaaaaatcgtcatcgtttataccaacagcccctcaaacttttgaaaacgatttgtcatgtgagaaatctccaccacctacaaaaatatccgagtc

SEQ ID NO: 15128 - DNA, 591 bp, Heterodera glycines
ttatttcagggactggaaaaactgacaagtccatccattttttgtttttcttttttaaaggttactttgtttgtttaaatgtcctctcatttgctgtcgatgaaattatgtactctagcgaagtttctttatctttttcaaataggtaaaaccaatttagcatagaaaatttgataaaatgacaaaccaatgcaaatttgaagcggattagagatttgaaagacattatgcaaatttgaagaaaaagtggaaaaacaaaaaaatgacccaacattaacgtggagggcgcggggggggggagatggacagtgagagagagagagagaaagagagagagagagagagagagagggagtgcgattgaacgggtttttagtcggtaagtttgttggatgcctagtccgaagtcccggtccgtattttcgcaaatgccgatctctaattaaaacccaataaattttattaattagtcactgcttctcgtccattcaaaatatctttattgtaaaataaataaataaatctttggtcaaatgtctgtcgtcgcttttacacccgaaattcgttgctcttttccgcttcccccgcttc

SEQ ID NO: 15129 - DNA, 1446 bp, Heterodera glycines
cgtataaatataaaatctctacaaaaatatttatttaatcttgttcaataattttaataataacttttaacgaaggctttgaacggagcaaactacagaatttagtcgcagattaatgcttcttcaacaaaatgggcacccaaattcattttaaagtttttttaaaggcataatgccaaaattaatcatttatgaacttcaaattttttaaaccaaatttcccgtgggtcaattgagctaaaaattttgcttaacgaaatttttggaaattactcattcaggctaatagagaacacataatgctgtcgacagattcattcagtttgaatattatgaaaagagataatcagaaaatacggccgtcacccagcatttccaccgacaaaaattcatctttgtttaacttcatatttataatgcgtaaaacaaaatataagaccaaaatgaatggtcaagatcgagtccgttatccaaaaaatacggctgttaattcgcctttttgactttaagcatttgacatgagtttctctgtttggttgtatttgcttttgtttgatcattatggcaattttaaccatttatttgtcttttcagcatatcaaatattataatggacttaagtgctggtgatgaacagttgaagcggaactttagctgcaaaatttgttttgaggtaaataaaaaaagcttacaaagactaactctgtaattccaaaaattttttttgaaagtgactcgaattttcacattttaatattttgactccggtaataccggagaattggtgtcccggcgaaaaataaattaaaaaattttttttaagtcgttaaaacatatttatgggggttttctgggtcgctgatcgcgaatctgacatagttttgactaatttcgaatctcggacccgaacaaaagtagagattcaaaattctcacaaaatcaattttttaatttcgacttttggtccgaattcgagacctcgactccaaattattttgtcagataacataaaatacctttttttaatatattaaaaccaagagggagttcaaccaaactctctttcaatttctttaaaaacaatccgattatctctttttcctttagcccttctccaaggatcgtcgttatcccatttcgctaaattgcggtcacaccttttgcgctcgttgcgtcaggcagctcagcagcttcggcacttcaattgcttgtggtctctgtcgccgaggcacttactccgactttcgtcaactcggcaagaacgtcacactgctaggttttgtgcttttttattggaagaattcaaatttggttgccatcgggtgaagtattctgggggactttcaaaagtcgctttaacctgttggtagtcatttcgaccaatcccaaccatggatttgatcattttcgagaaagtttttagatttgcttgagaatgccaacctt

SEQ ID NO: 15130 - DNA, 2704 bp, Heterodera glycines
  unsure (1)..(2704): unsure at all n locations
gtctttttttcaattagcccatacaaattgcgcaatttaaattataccgctactgatttttgaggggcattatcttgtgattgtaatgtgatgtgatgggataaacggcgggacgaggcgattgagacggatgcattttttgtgtggtggacggaattttcaatatttttggaggtcacatcatcatagtgaatcgtaattgaggcagtcatcttagtttaatttaaaattgcttagtttactccgtccgatacattccatacaataggtgtactcgtatgtaaagcataaaactatggtaaattgcaagcccatcgtagccttgtgaaaataatttttgattggcgggggaaggaggatcaccgcatatgaggacattttttttttaattttaagagcactttttattacatcttcgaatacaggcatggtcataagtgttgtcccatcatgctttgaaaaaaataattgcgtataaaattgtcattttccaatttcaacagataagtagcataccattggatagcattttttatgggctttccaatgataccatatttgcatttgtgacataacatttatttgatttattttaccatattcacaatttgatcaaaatataggtggtcaaaagtgttgtcccatttcatttttaaaatattgcttcccctatggtttttcaccgggcaagtaaattctgaaaaaatgcctacaatttcacttaaaaagcacatttttacttaaaaaaccatagaaaattaatttccaagttctatttataaaaataattctttctcgaataaatttctaatttttttctccccctgtgtaaaaattcatgatttttttttcttaatgtggacgctgaagatgttctcgaatggacaagctccgacggaattgtcccaccttaaaaagtaattttgttaaaaaaaataaataaaatcgaaatttaattggaaatttttaaacatataccaaatatggtcaaaaaaaattttatgagcgaaaatactggaaatttcgttttcaaaaaatttttaagttcgattaattgtgcatgttagaaaatttgatcggcatttcctggaactaattttggtggaattccaccgacattttagcacaatttaaacaaccaattttggcaaaaaaaagttaattgaaagtttggcacaaagtctctgagcatttcggcatccacccaaaattaccgtgtcaaagctaaagtcgaaagctttcagaatttccatcttttgttccttaatctgttgaaaaattggatcaaaattgtacagctcgggctgatcaaccattctcaaatcatccatggccaattgttctttttgtttcaccaattcattgattttaactcgtggaataatgccgataatttgcatttgtgccatcaaacttgtgcaaatttgcatgaatttttgacgtcggaccgttgctaaattgatgaccagctaaggaccgaattttaatttttaaataaaaattatcaacttttttttcttttgtgattttaaatttaaaaattttttaaaattatttttgatattaaatgatccaatttttaatccttttaagcatttaatttgaccttttaagggtcgaatttaaatttaaattaaaatttttttttcagtttttagtttatttgattttaatgttttttttcgaattaaatttgccaatttaaaaaaatggcgattttgttcgagccgactccgaccgaatacaaccgtcgtcaatgtccgaccatctccaggccaaaacgggtgaagctagccctaaatagggtcattaaagctctccatatggcaatggctgagcccgctggccctaaatggtcccgcaatcactccgtccccgtccgaaacgttcagagggacaacgctcgccgctaaccataggcaagcgctagcgtactcagcgagcagcccggtgcacttggctagccacaagtccgcagcagcgactagcgagcgggaaacggcgccggcgagcaaatcgcatatttggcgttgtgttattgttcgttttatatatagtgggataataatgaatcttttttggatggggtgtaaaatgcgtgagggaagacagacaattgggtggggtattttcattgggcgctcgtttctttgtcagcggcaaagagaaaatatgccatgctatttcgcccttttcattttcactaattgtcacctaattacatgtaattcattaacttaaataaattcagtaaacagattctttgaaaaacatgtggcgaaaattgttagtttaagggattataaaaatgaaacaaaaaaagttaaaaaaaaaacaatttttcaactcccaatatcgctgcaaattgaaatattaagaattaaaaaataaaatatccatctgaaatatttctttttggtccaaaattgcctaatttggttgaatttttggcgtcggatttttgctaaattgggctaaaaccaaaatcaaaaaaaaaatttcatcattaattaatttaaaaatttttattcttgaaaaaatggaaattttgctatttcgctactaattgacatttataggacaaaaattacacaataggtacggacttaattgccgattgatttaaaggcnntcttnnatntnnttaattttaattcaagaccctttacgaaagattcaaaaaaaaattaaaaaaattggcgtt

SEQ ID NO: 15131 - DNA, 1204 bp, Heterodera glycines
agcaaattggcatattttgcgtaatgttatcttatttttatattaatggaaagcatttggaatgctttttggaatggggtgtaaaaggggcgaggtaagacagacagttgggtgcactattctcacttgaccatcgtttcttcgtcagaggcaatgagagaatatggccatatttttgctctttttgttttatgaattgtaattttgcctaattaaatgcaattcattatttttgattgtttgttttttaggggtttgaatttataattaatagaactggtcgagcatttttatttttatgaaaaaatttagaattaaaattaaataacgtaaattaaagagtttttccaaaacaggtgactaaaattattattaaaaatattttattaaatgaatgtaaaacataaaatataaaaaacagaatttttaaatttcaaaattttttaattttctgccgttgatttgcatctaataatcaatcaaaaaaattgattaaaattcataaaaatactgataaattcacgaagttatcaagcaaattaatgattttttggaaaaatacagtcatttttctatttttaaagaccttttaaaactttaattttccagtttcttatgtcaaacattttttttgagattttatttatcttacattaatctaagcccttgttaattaattagcaaaaatattcataatattccccaaacttacacctaaaaatgcgtaaatattcggatgccgtgttgtccccgaacttgcctgtctggctctgcaaattggcaagttcgtttgcggcatttgccaccaattgttccaattgttgcgcaatgctctggcgcaactgtttggacttttgttgcgcaacactggccaaatttttcaaatttttacgaacattttcttgaattgggttcgacaaattttcaatgattttaagaagttccttggattcattgagaaaatcgcgtgcaaatgccataaatccgtcgccatcaattggctgtgttgaataaacgtgaattttggcttccatttcaccttccataatgctcagctttatgcggacagcaatttcttggcactttactaatgagtgaatttttcattaattagtggaacaaaaatcattaaaacgtatctgttggatagccctaacaataagagttctctatcagtctgcaaatttcaaaaacttcgtaagtt

SEQ ID NO: 15132 - DNA, 2223 bp, Heterodera glycines
aaaaaatttagcctattaaaatatttagaaatttttttatactgtatatttttgaaaaattttccgatttcttgcaccgcaaaaaagtgggtttgaagaaaaaaatagtcaaatttatgaacgttaataatttaatttccgatcaactttttaccgtcggatccaatcgaaaaatcttagtcgacccatcagccccttttaatgcatctaatgcatcccgacagcccctaaaaatttatttctcagcattttttgatttttggaaattttttgaatttaattgaaattttttcgaattttccaaaatcccgcaatcccgcaaattttaaatgcgggatttgcgggattacgtcccgcaaaaaattttgagtcccagtcccgcagcgggacccgcaaattttaaatttccggtctctaataaccactatatcacacaatacaaaataaacaaaaagaaatttatagggatgcgatttttagttaaatacctaaaattttgcgcatttaatacgcacagataagcacgaaaaaagcattttccacttggttttgggtgtctacgatgacttttataatacctatttttacctattttggagtttttctacctattatacctatttaaggattttcagaaaattccttaacaaaaatgcaataaaatcaaaaaatacacccctaagaattggaaaatttttcccaaaaatttatttgtttttttatgtaacaaaatttttaatttaaaatgtcaatattttctaagaacatattaaaaatatttaaattattcgtttacaaagaaatagaaccaaaattttccccttttgtttgcttttttccactaaaaatcgttaataaaaaattttatttacctattttggaatttttgtacctatttaatacctattgagattttttttttacctatttaagtacctattctgggatttttcttacctaaaaatcgcatccctagaaatttactttatttaataaaatttggcaaaatggttaaaaaaattcaaatttcttataacttttttgccttttgccccacaaaaattccattcttaggggtgtatatttaaccccgacccccatcggggttaagggtcggggttgtggcatcgatcaggacgagggtgacaatgataatgatgtttggtgcatcatcaagcaaaatgacaaatcaatgtgaaaaaccaactaggtaaataggctaatgccgccttactttgcacttcaaatgtctttttaacttgcaaaaaaagaaagtctacacggttttatcagaaaaagaacaaataagttaaataagtatgtccaacagcaacaacacaacaatatgtgaagaggacggagctttttttatttctccgcacactgatacagcatttgttgggccttcctcactcactaaacaagtcaagaaaaatgattcaatgtttaagcagcaattacggtcaattgaagcttaccgcattcatagtgagacggccagtaaacgtttcactcgcctcctcctgtccatcaacaaacacagtgatgacgcggaaactgtactcgatggtgtgaacaagtgaaagaggcagaaagttgtggcagtatttgctttgtccagtgaaaggaatggactgaaaagaattgattgtagtgattaaaattcttatagaaatataaatttgctaaattttcagtgcggtgcctgcccatcagtaaatcaacttaaatttttaaagtttgagtgcagtagagagagagcagcataaccgatgtttggctcgggtaaaatattcaacgggaggatttctcgaaagatttttgaagaaaactggaattcgcgattttcccgatctcaaaaatccaggacattagctgaacctccctcaccccacataacaatttaaaaaacccaattaataaccttcgacacattaatccaacggcccttgtccatacgttgcacaaagtaatgtttaacaggacgcgcctcctgctcaggcgtccaatagatttcgatagcactcggaccgccttcggcccagacctttgaaaagaataggaagtttaatctgtaataataagagcgaaataaatttgtgactgattgtcagtcagttccgaaaataaactgttgctcaaaatgaacctataaatcaaaaattatgccaaattcgaggcttgaaagcagagataatgtttaaaagaagttttgtaaatggg

SEQ ID NO: 15133 - DNA, 3231 bp, Heterodera glycines
tctttcctttccctcctccccttccccatttgttagacctctccctctctttctctgtccccttccccatttgtaagacccctctctttcctttccctcctccccttccccatttgttagacccctccctctctttctctgtcccctcctcgctctctcccttccccgtcttttcagtctttcccttcagagtgatcaattgactctcgaatattacggtcgcctcaactttttcccccgggagaacatcagtgtcaccatccctttgatgcccaccgaaaattggttcgacgcgcgtacgaggcgaaacgttgacaaagtgacaaagccaaaaaagacaaaatgacattctttggctaaggccgtttttatgcgcgcgttggccgacgttaagggcattttggtgcgggcgcggtacagtcagtaccaattgcagtcgagcatctacggatttcacatggaaactgcttgggactcggcaactgcggagacagacaaaaatttggcaacggtggcactttcggatcaaaaaaggcatcccgtggaggtgaaaaaggaattgtgaaaattgtacaaaactcaaaagaggggaaaggcattcggtcgagaccaatctcgacaattgcgagcagaagaagcgaacaactgacaattaatacataaacaaaggtatgcgcatgtcctgaacactttggagggaacagctgcgaaaagtgtgagaaaggctatcgaagggtgaacggccaaatttacgacggaatgtgccaaaagtgcgagtgccaaggacattcagacaggcaacgggcgccaaaccaggcgttgacttttgattttggcattttcagctgcgaccccttcacggggcattgcctgcactgccaagtgagtctttccaatgatcggggagttaatgagccaattatcagcacaacaccaccggtctcaactgcgagcattgtttgagcggcttttacggcaatccgtcgctgggcccccttttgggtcagtgccgcccctgcgcttgtccaaccgttgcgcattcgcattcggccgagtgcacactgagccaattggtcatggaccaagtcgcagcagtggggcaggacgactacgtttgtactgcttgcgaaacgggctatgacgggaacaaatgtgaaaggtgaatttgagaggagtaaagagattggcaattgccaaatgatgctctaaggccatgaatgacccttttgagttgtgccgacggcttcttcggcgacccttttgccgacaattcgtccctcgcgtgccatccgtgtgaatgcaacgataacattgacccggccgccatcggaaactgcgaccgtcgcacgggaaaatgcctgcgttgtgttggccataccacgggggaccaatgcgaacaatgcctgcctgaccattggggctccgcgcttctccactcgtgccgtccctgtcggtgccatcataagggggcattttcctcgcaatgctcaaatgaaacgggcaaatgcgaatgtcgggagggatacgcaggcgaacggtgggacggagaacgttttttagtttcactagggaccattttggtaatcattctgccaaaggtgcgatcggtgtgttttgggccacggcgacgtggaaaacggctgcccgaaatgcctttgcaattccaccggttcgcttggcattgcgtgcgacgaattctcgggccaatgcgcgtgcaaaaagggcgtctacggcaaaaggtgggctgatgatcatcgactgatcaaattatgcgctgctgatccgctgatttgtttcgtttggccaggtgcgatttgtgtgtgccgtcttacttcaatttcggcccggagggatgcgaattttgtcattgcaacaaatttggcgctttcccggacaaggaatgccacaatatgacaggcgagtgccaatgccagccgaaacgtggaggggctgaaatgcgagcgatgtgtcaagggcttcttcaatctaacatctggggacgggtgccaggttgtgaccaagagcacttgtcggaatgagaacaccattaacctttgtccttgattagtcgtgcgaatgcgactcgcaagggtcgctggaggggcaaagttgcgacacggtgacgggacagtgcggctgtagggcgggcgtgacggggcgcaagtgcgacaagtgcgagcccaaccattacggcttcgattcgtcgggatgcaaacgtttgtgctggtgcttgtccttggcccatgcgacgaacccccgtcttttagtgtgccgtgtttgtcctgcccctggccaagtttgcgacgctgtcactggcgactgcgtctgtccgccgaacacgcggggcgaaatgtgcgagcagtgcacacagaacgcgtggaattaccacccgtaccgcggctgtgaattgtgccaatgcgacggaatcggcgccgactcgcaattgtgcgactcgcaaacgtaggcattggcaatgccaaaatggcactgctggacccaaacgttgttaaggggccagtgcaaatgcaaggttggctatgtggggcaccgttgcgaccattgcgaacccggccatcattcgttccccgactgtcgcccgtgcgaatgcgacacggccggcacggagtccagcgagtgcaggggaaacacatgcttatgcagcaacgaaggacaatgcaagtgcaagaagaatgtggcgggacaaaagtgcgaccgatgccgcgagaacgcattcaggcaaagcattgataacgaaattagcattggcaaagccaaaccaatttctgttcagtttggaggcttggaacccaaatgggtgcaccgaatgtttctgttccaacaaatccgccatttgccatcagagtgcgcgcgtgtggcaccaaatttacgcgcctgaccgaagtgtgctgttcgagtcgccctttgaaatgttcgatcgacggcatcgcctgcacattctcaagtgggtggagggggtcgagaaatgatttaataatttgttaattgcttatgccctcccccacccctcagagagttgccctcccattacaattcgtaccccactgaccacactcccctctattggccactgccgcaaggcttcaaaggggacaaaaccggctcttacaatggattccttcgcttccgaattcgaaacgacgacaacttccggggacggccaaatgttctgccggacgcgcactctttcagaatttatccgcaagtgctgct

SEQ ID NO: 15134 - DNA, 869 bp, Heterodera glycines
ccccccgttttttgccgtttgacgattgcggacgctgcctcgcttgcaaggcaaccgaggccgaggtggacataatggtgaccaaagagggggtcacattgtggtgcactcgtatcaacaaaccccaatttgtgccgttcgatgtcgtctacgacctgccagggcactgctttttccgcgtgaagaacaaagcgagggtgttcaatgtcccctacggagacctgccctccggaacgtgtgccaaaagcaaaccgacagaccaccaacaacaacaacaacaggatctgaagcgcaaggcaaaggtagcacttgacctcgtggaggctggactaatggccgatgctatgcaggacggcacacggtggaagaaggccaaaacagctatcaacgtgcttggcaatctcctattggctgaatcactggactccaccaacagcaattccactgatgccccgacgcaggcaaatgaagccgctgacatcaaagaagaagaggaaaatgtgcagggagaagaagaaaacaaagaagacattggagacattgataaaactcttgacgacttctttaacagccttaatgcttcaacctcaaatgtgcctatttaagtgaataatttaacacacatcattttctcaaaaatattaaacacacaagcattcaccaataaagatatttgttttaaattgccatttggcctaatcatttcggggccttcatcatcgggcaaaactgaatttttactgaaattcattgccgaatcggaccaattaatcacaccaaagcccgtgtccatgctctactgttttggtgaaatgaatgcagcggtgcctgtgcttcaaaaggcgggagtcgacaaaaaggctcaccat

SEQ ID NO: 15135 - DNA, 2736 bp, Heterodera glycines
agatgatgattatatgtgggagagtgggtttgcgttgccagcgccatcacaatactatggcgatttgcctgtgctgccagacaacgcggacgaaattgaggagatggacaccgcacagcgcaggattgcaagcagaagaaaattaaaaaaggatgaagcagaagatgatgatgatgatgatgctttgcatcacaaaaaatacaggatttatcagcgttcacctccacggctcccttccccacctcgagcgaaaccaaaaccaccaccacgccaaccgaccacaaagagagagcaacagaagccaaaaaagttggaactaaaaccaccaaaaatagagccaaaatttgaacccgattcacgaccatcgacatcaaaagtcgcgcctcggtcgaaaaaagagcctgagttccagcttgacccacggccatccacatccaggcaggctggacacttgcctcccccagcacccaaaattgtaacaaaacatgagccgacaaagagacccgtgccataccgtatcccgaaaagagaacccaaaattgttgaagaaacgccacagaggcaacagcaaccccttcctgctgctgtcgtcgaagaaatgcctcctgttcctccgcctaggagggggaccaaacgccgccaccccgtaaatggtgagaatgatggtgaggtgcgcataagaaaacgcgtgaggcaagcgaggagggtgcgagtacagtactcacccgagccgggtccatcaacatctgcacaaagtgatgaacaacaacaacatcgagaactgtttgccatcccgtcaaatcagctggagagcgggccgccctaccattaagccacctggagcggccatatttgaagagaggcttaggcaagatccaattttgtattcatggacggctcctccaaagaaaacagcacagagcacaaccaccaggacggcaccgaaaatcaagaaggaatttcgcccgaaaaagtggagttgatcaactccacgcttgacaagctgtacaacgacccatcctccccagcggcgtttgcaggtgttacagcgctgtggaaagaggcgcgaaaaaagttgaaaaatttacggaaaaaggatgtgcagcattatttggaggggcaccgcacctacactctgatgcgcccccgaagggtgcgctttccaagagccaaaactgttgcggctgggttcatgaccgatgttcaagtggatttggccgattttcaggcgctttcgcgccacaatcggggtcaccgatacctgcttgttgcggttgatgtgctgtccaaacgcctgtttgttgtaccgctgaaaaacaagagagccgaggagatgttggaggcattcagacaactcatcgaccaaatgccaatggtcccacatcgcatcttctccgacaaaggcaccgaattcaagaaccgattgttgaaggaattctttgatgagcaggaaattgagaagcatgagccagtgcattcatccgtcaaggcatcggttgctgagcgggccatccggaatgtgaagcagcgactgtaccggtattttgctgaaaaggagacgctgaattgggtggatgcagtacagaaaattgtgaacggaattaacagcgctccaactcgtgttcacgagatgcgccccattgatgttgacttttcaaatgcgcagaaagtgtggaagcgattgtacggacaccctgcccttcaaaagcggacgccacgcttccgtaaagatgaatttgtgcgcatgagcagagagaaagggcaatttgagaagagatatttaccaaattatggagacgaaatcctggagattgatgatgtgctgaaagcggtgcgcccaattcggtacaaactgcgggatgagcacggtgagaaattcaagggcagcttttatgagcaggagctggcgcgcgtaagaaaagatgcagacacaagctaccgcatcgagaaggtgtacagaaagaggaaaagagcggatggatccacagagatgcttgtcaaatttataggatatcccaatcgggaatggattaatgagtctcagcttgtataaaagcatgtgcatttttcattttgttgtgataataaacaagcatgtcaaacagtttctttgtgtttttgcccaacaatgtaacggattacccggacaatcagcccaacaaatttcgtgtccgactcccaaagcctttgcattttaacggctcgtgggtgtgtggactgcacagtatcagttacccctattcgtggtccaccatcgatacattggatgagcagtggattgacattcatttcacagaccgaagcactatcgatgatgaccgacagcgagtaatccgagtgccggtgcccaaggcatcggttaacagggttgaccagctcagagactttttggcagtcacattgcggaaccgtagcggagcaaagctgttgcaactcccacgtgaggtggaagaggatcgaaatcggactaaaccccttcactctccaccaccactaaagagaaacaaaagggatgcgtcaccgataccacctccaccaccagacgagagtgtaaaaatcgaagactctcccccattgtacgatggaaatgatgaggacctgattgaggactctcccccattgtacgatggaaatgatgaaggggtgattgaggagtcaccgccccattatgaagaaacaccaaaagaaactgtgaaaaaacgccaaaagtgtcgacaccaccgcctgtctcaagcc

SEQ ID NO: 15136 - DNA, 2371 bp, Heterodera glycines
ataccatacacttatgcatatttaagtacaaaaaatcattagtgtaatttaaaaaaaaattgtaaaataattttaattcaaatagtgtagtggtgtgtccaaacatttaattgcccaacaacggcaggaattgatttaattaacactttatcagtcgccaaactgttgccctcttgcgcctgtaccaacccgcacttgctttttgatccgaaaagaaatccgggctaccactgccgccccccttgtaagaccaactcgacatgcaatacgacgcttagtggatgtacgacaggctttttagcggtaagaaatattgttgtggaatttatgtttacaaaaaagcgaaataaaaaatgcaaaaatatttttaaagaatgttgatcaaggtaaaaacccaactcgtactaggccactcgttctgtttttcggcaaaaaaatggtcataacttttgtcaaaatcgacaaaattaaacattcttggtaccattcgatagtccttaatgttttctatctatctgcaaaatataagaaaattttattgcttttcaaaaaagttatgaccaaaaatcgtaaaaaaaatttttcgtccataactttttttcaaacttgatcaaattttttgaaacttggtgggtagatagagaattttaaaggctattgattgataccaagaaaggatgtttaatttggttgcctttgacaaaagttatgacgattttttttgtcgaaaaacagtacgagttggggtagtacgagttaggtttttaccattcactattcattttgtaattcatctcacacgcttttttatcttatgtcccaaatactgttgcatactgtatttatggggaatgaagagatacaaaggatcttccggtaatcccttatattcaggactaaaaaatttttaagttacacaaatccttacattctttttttatttcttccaatttgttttcatgaattattcttataaggttggccgaatcgctgacatcttgctccaaatttttgcgattttcttgacacttccaactttcgacgaatgcatcggctgccaaagccatcattttccaatttttacaaactttaaataattcttcgatggaatttttatcaatttcttgcgacttattttcgtcgttctctttgcattcccattttgtcatcattttgcgccaaaaccaaagtttctcgcaatttcaatgccttggccatgtcggcatcctccgttgtgccatcgtcgacgatcacttccatttttggctgattaatgtgatcaattttaagctgctgatcctgatcagcattttgtactttttcaagcaatggctcctttatgtttgggtccattccaaacacaacagaaccaattatgcccatggcgatcattaaagcgagcattggaagtaaatttgggaggattaatagaagacgcattttagctaaaataaagagaatattttttttataaaaaaaaagtaataagaaaatagataagtagctgctaataattccttcatattctcttttctgaaatttgtccacgtgtaataaacgtataagcataatcaatacattgtatagaatattaagcatgggtattgcatattcatataataattaaattatacatatacatacaataacataacggatgcccccacaaactataaaatacataatatatacagggtgcgaaaaggttctcgtattttttgaaaaacttcttattgtacccaaaaatttcactgtttctcttctgagtcttcaccattatcgtatttagcgacctttttttactccttctaccattacgttttactttgttttgataaagataacttttctaaagaccctgaaacaaagtcaaattgctctaaaaaggacctaaactgcaaattaacgaaaatctaattttgattttctgaaattttgtgaaatattatcgcctagtagcctagcaatggctcctttatgtttgggtccattccaaacacaacagaaccaattatgcccatggcgatcattaaagcgagcattggaagtaaatttgggaggattaatagaagacgcattttagctaaaataaagagaatattttttttataaaaaaaagtaataagaaaatagataagtagctgctaataattccttcatattctcttttctgaaatttgtccacgtgtaataaacgtataagcataatcaatacattgtatagaatattaagcatgggtattgcatattcatataataattaaattatacatatacatacaataacataacggatgcccccacaaactataaaatacataatatatacagggtgcgaaaaggttctcgtattttttgaaaacttcttatt

SEQ ID NO: 15137 - DNA, 2067 bp, Heterodera glycines
  unsure (1)..(2067): unsure at all n locations
tataaattgggctgtgatggctcaganaggcataccaaatcggcttcttcttctgctcacttccctcnttatttggtaaattaaatattcaatcgcttttccctcattttgacttttaatttgtcccattttcagtgcttccctttgtccaaatgaccctcattagcaaatgttcgcttctcctccttttcgtcgcgcccttttccccatgcgtttttctccggctttgagtgagttcattacaaattttgtaatccgatgatcattgtcattgcttttctaatcatttggtcccctcaagggtttctcccaacgcggcacgtctccgtcggcgagtgcggttgcggcgggtgccctcctccgcccgagcggcggtggctcgagtccaactcggcatcgagctgcgactcgccgcgccctccaccgccccctccgtgctgcggttgtcgagtcgtcttgcggctgcggtggcggcggatgtgagaattttcaaatttaaaactgagtagtgccaatctgatccggacaatttttgccattaggaaaattctcggcattttaaggtacagacggttttgtttagctttggaatttttccttttcgatttttacattttttgcataaattaaaattaattttcgattttttaaggtggcggcggttgcggcggcggtgccattaaactgacaattggctgcgactccccacgccctccgcctccccctccgtgctgcggttgcgggtgcggctgcggcggcggatgtgagttcatttggtgacaaattaagacaaactgaattaattggccatatttgcacaataattctttcaatgaaaatccaaagattacttttcattgctttcacatcgctttctcaaccaagaactctgactttgtgattttggcttttttttgggtatattcgaattcgattgaccacgacattcctcgggggtcaattccctaatttaaatttgctattattattaaggtggtggtggcggttatggtgcaaatggcggcggcggctgcggcggttccattaagctgacaattggctgcgaaggcccaaaagccccgccaccgccccctccgtgctgcggttgcgggtgcggctgcggttgcggcgggtgccctcctccccccagcggcggtggctctgtccaactcggcatcagctgcgactcccctccgccccctccgtcctgcggctgtcagccctcgggcggctgcggttgcaatcgccgcaagcgcatggcttttctgcgccgcgccgttgctcagcgctctgttggccgtcattaagtgcaaaatgaagcttaattaggcactgcttattgatgacgtcaattgccgacccgaatgatcaatttaattattaatattttgtaacaaattttagcatagaaatgatttttaatttttagtgacccaatcgaattttagtattactttttgataattattttttcaattcttctgttttttaactaataaataaaattccttatgcattttcatttcatcccttttttggatttttcaaacaaaaaatctaattggatattgaaaataaaattcgtgatatatggtcgtattattgctatataaatattggattaaaacaaaatacctataaagactttttccaaattaatcactcaatatccactcgttaatgctgcaattatgacaattactttattttttcgtcatggtaagtgattcggggaacaattttaaatttatgtgtataaactctttaagaatattataggtgtaattgtaattttgtgtaattttaaggtttatttctatacaattaaattgataaaattatatatttttattatttaaaattgttcatcacatcattaaagcatcatccttttccgcctttttttgctttgtttcttcaaattttttgtttggcattttgtcactgattttgccgaacacaaaggccccttctgccgaagtcgcacgcccaccccgactcacacgcactgcacgtgtcacccgagccgtaaatggtttggcccaaaacgttacccctgnaaattgt

SEQ ID NO: 15138 - DNA, 1104 bp, Heterodera glycines
aatatgattaattttgagaaaaatatggcaaagtttaatttaaaaaaacacccacggttttatgaaacgaattcttttattctataattaaaaagataatttggtcatctcaaataggtaaaagcgcaattttttcctttttttagcatatctaacataaggattttttaattttaaatttttttaaattttcgagattcccttatgatatcataattcccaaataaagttcatcaagaagcttgaaaaactagccacaatgggtttaatttcagatgcaaaaaatgatctaaaatctcttaaaataggtttaaaatttttaattttcccaattcctatttctcccaaatttttcaaaattcgggtaattttcttttatggctgcatcaggaaaataaataaaatcttttttagctttgattttgtttcttttaattattttatttttggtatttttaaaaatattttatttaagaaattaaggcaattatactttattaattttttaatttataaactcaattttttctacaaaaaataaattcaagaagataaatataagttatgagttttattgataaggttcaaaatttttttcagagaaaatgacggaaatgcatagaaaaattatagcgcaaacaggaaatatattgaacggaaggatatgatggcagacttatattcacgtgaagagtgttttatttgactataaatatggcacttcccaaagagtgccatcaaaaatttgcttccatatcaaattgctcacccaaaaatgaattcaaagttggcacagtgcttattcctcggcattgttttaattttaaataatttgcttgttatttttggccatcctgtggaaaatgaaaatgatggcactaatggacaaacttcagaagaatgtaacacatttgtggcaatttgcaaaaagcattttgaattttattttcactagttaaacactcaaaattgaaaaaacaacgaaaagccatcactttttaagccaatttccaaaagtgtaaattaataattttggaatttacattttcagttgacaaagtgacgcgaaattacgttgaaacaattggtgaagagtgaaaagca

SEQ ID NO: 15139 - DNA, 1831 bp, Heterodera glycines
  unsure (1)..(1831): unsure at all n locations
aaatgcaaaatgacaatttacgcncaaattacaaaaaatataaaatttagcttttcagaaaaccattcgaaaaaaataatttttaaagtaacacattaattaaggttcaaattgggggaaatttttgctgttaattacatgaaatgacactattttgatcatattattttttccaatattttgagaaatatgcaaacaaataaatgctcgtaatatatcaacaaaagagaatataatgttttcatggtcaagcgattgattgcttctgatcactgctgatcattgcgtccacgcgacttgaacaatttgttggaggccaacgcgcgtctgagttagtaccgcgccaccgcacgcttcataaacgaaatgtcgcgcgcacgcgctttaactgacgcctctgaataaaataaaataatttaaaaaatgttattgtctctttcaaatgcaattgctttaactttttctgccggtggccgaacgtttcgtcactgaacctttcgtcactaaacttttcgtcactgaacctttcgtcactgaaataaaataaagaattatttattagtgaaaactatttttttttaaataaagttatgtatttgaaattttggagtgtctgatcagtgatcaccgtaaaaaatttttaatggacgtcaaaatttctcgtttcccaaacatgagtgcctaaatgtaattccccaaatgctatttccaatagcggtaaaaaattcttgactatctacttttacatatttctgtaatttagctatggaatctgactcatcgcctcgaaattggtctttcaagaagcaacaattcgttagaagcgtggcataacatttggggggcccttcttgaaccaaacccactgttcagcaaatttgttaagcgaatgcttaaagaatttgaacgttggcagcacattgttgccgattttcacaatgcaccggcaaatgggataaggggaaagggccttaagagaaagtccatttatctacaacaagacaacaatttgcggcaactcttcgctgaattccaacaacgagcgggtcaagacccattgcaatatttaagagcgatttcatatcacttggctcaaatttaatgcttttttattcaaaaaataaaaaaaatatttggcgtattgtttaattttttaaaattttatttcagtgacgaaaggttcagtgacgaaaagttcagtgacgaaaggttcagtgacgaaacatcagggagcctattgttagaaccaaaaagctaccaatttgaattttgattttaaatattatgtatttcgatactgatttgatttggttaattttgttgctttttggataaacttttacgattttacacccctaaatttaagcaaagtgacatcggagggtacgacacggaggaggacaaagtaaccttggccatcgatatttatgtggacgatgaaaaaagggaaagaacggacatctcgattttcggttgagtttatggcattattcattttttaatatttcactatttatgcttataaattttctcaacttgatcgaacttcaatattttttaggattagagctataaattatatgcactaaaaatgcctaatatttgcataaaatatgcactaaaaataccatagactgaaccgtccaattttaaaatcgcaagaaaccacaaattttcagttgaaattgtaaatatcattttcatccatatttgtccgttatataagatcatttacgccatttttgggccaaaaatgataaatacgaaagtttggactttcgactttttgttcgagttcgggattggggttcggaatcggcgaaatggatat

SEQ ID NO: 15140 - DNA, 3113 bp, Heterodera glycines
  unsure (1)..(3113): unsure at all n locations
taattcctggttataaaatatgcctttatattaaatttcctttccaaactcttcgatcactgtatgaatcgggtgtcgttggattaacaataacgaattataaataattcttcggtaaagattgggagatacccctttgcaaattttcctttttcaatggtaattcgaacgatatcgtcaaattataatttgttctttttcgaatttataattacattcccctcatataatttttcccagacagaacgcggcattttcacaagaggcggatactgaccagccccccaacaccgtagacagacggaacatagtaatcagtaattggcatcactaaaaatgccctctgaagaacaatagtaaaaaatctcttgccattggacgaaattcacacattgatctgtgaaatcgaagccatcatcaatcaccggccgctcacattcgaatccgatcaagagccttacgtttcacttcgttcaatcaacttcctcataccatacaaccaaacggagaacaactttcccgttatcaacgaggatcacaaagatccagactacgaaccaacacccagcaatggaagaacaaacggaaacgaagaaagggaaggcaacaaaagaagagcctatcgacagaagcgaccccgcagttgaaagaaaaaagcacgatgaacatcgaatccgatgggcaacacaacgaaaagcagcagtggatgaacttcgccaacggataaagctacgcaaaaaacaatggtcagcagcagacatcgaaaaagaaatgaaggaaactgaaaaagacgacgaagaacacaacagcgaatgcccgacttctatccaacagatggagaaaaagttctggcctactgcgatagaagatacggcacaaatctcatggcatcctggagacgcaacagagtccaaacggaattaaaagaactcctggagaataaacgcatcactctgcaacacatcacggacaaccagcacttttgcatcggcttactgagcacaaaaaaggactttgtggagaatttgtcatcggaaaaatttgttcgtggcagtacttggacgaaatcgaattcaaagtcgccgcggacccagaagaacaacaaatcgctatgaaagaaaaatcgccaacgccagaagtggtgatcatcgaagaagacgaatctgaacgagaagcatcgatcgaaccgcaattcattaccgagcgtgccggacacagaccgcaattactgtttcgtcatccttcaccggagcctaaacaatttatgaagcaccgcgcagctcacactcctccacccgtgcgtcaacgtcagcctgaccaacttcagctaccgcgcaacaaaatactgttacaaattcatcacggtcagaattcacctcccaaacgcttatagggacgcatttctcgacgctgaaatgcgcatcctttcactcacctcacacatcgccagttgctcacatctccgctaccattatctacaactacagaaaaattccaacattttccctagtctagttttgcaggatttgtatgttcactcggcccacctgtcactcatttacgcatttttccttccatgcacatgcaattcattgtcagcccactcatttttcccatatttagggccgatcaaaatcacttatcgcacattcattcgcaacacaacttggggaggaaaactcccattcccccaatttcctcccccaaaaaacaatattaatttaaaaaaaaatgcattggtatcgaaaattttataataatgaacagtcacgcaaccagtcattatgttgtagtccgcaatagagcgaagttattattagttttacatttgtataattttgttttatttaaacgattttaaataattaatacatttttgaatttaaaataatttataaagacagaacattttttatttgtacttgacatggtttaatcttaattttaccattatagaaaataattttgtcatattttaagtcttgataaaatcatgatataatttgtcttaaattttaaataatgaattaaccttcatatttttaaatttcaaaaaaatgacttaattaaactcatttccgcaatgtaccaataagagaacgccgaattccaagaaaaaaaacgaatttgaaaagaaattaacaaatagcatataaaatttaaaaaatatttttttttacaaaatcaaaactcactatcaaataattcacaaatgagctaaaaaatagttcagtaaacgaatattaaacaataagaataaaagtaaaatgtatatattcataaattcttaatgcgtgcctgcaaaaatatgatagaatataggttatatgtaaaatttaaattcgatcaaatattttgtacgtctttatttttcgtttcattttgtgcctgtgctcggaaaataaaaaatatttaaaacatttatatttaataaacattcaagtacatattattaatataaaaatacttctcatcaactattttagttatttattatataaatacggaaaagtattgtttatcagtttcattttcacttttatttttttgttacatttttcttcaaaaatttacacttaagctttaattattcaaatatattaaaagattttatgtaattttaaggcaaaatttaaatgtatttagtgaataaactaaatctctacatgatacaactttctaattttcttattagtttttatttttatgtaattaacactcatttatttattatatatatttgagattttttagttaatttaataatcttgttataattttaaaagtgattatttataatctttcttttgatgtgcttttttaatcgccttttttatgctcattgttatctttaatattgctttgatttcacatattttaatattgcaaatttttttaatcattggtatttttaaagaaattttatttgtatttactgtttattcaataatgtttaaataaatgaaatttataataaaataanataaactatttagttgaaccttaacataatttattttttaactagtttctttaatganacaattntttgaatcattaatttactgtaaattgtgcattgttgttttgtttacttacacattcatttttct

SEQ ID NO: 15141 - DNA, 1016 bp, Heterodera glycines
  unsure (1)..(1016): unsure at all n locations
aataaaataattatcccattggttttgttcaaggtaatataaaagtgattaaacacattctaagtcattttctaaaacagtaattactgaaacattggttatacaattatatntagttttctaaatacatattaataaataaaaccataaacctaatntcttgagcaaagataattcaagaacgaatagtagccaagaagcgggtgacttggaacgattaatataattataggtaataatgaagagtttataaatatatttattttaaaaaataaaaggaaaatattataaggatcaatattcttaaaaaaaattttctattaaataaatttagtttaaattttcgaaaataaagctaaacttcaatctttattttaataaaactacaaaaaaatgaaatttatataggtttaattaacgataaacagaaatattaatctaaaaaaggaagagaatcaaaaacaataaacatgtcacgctgtattaagactttcactcaattttttaaataaaaccgatttacttttagcatttctcagtattgaaaagccaaagtttatcatgctcactgattcatagttaaatactcaaaatctaacaattcaacaaaatgtttcagaaaattaacaaatttatagggtgctaggtcgtttcgtaaattccgccactatgggcgtttcgtaaatccgccaacgtgggcgtttcgtaaatccgccagggcgtttcgtaaatccgccaacgtgggcgtttcgtaaattccgccactacgggcgtttcgtaaatccgtcagggcgtttcgtgaatccgccaacatgggcgtttcgtaaatccgccagggcgtttcgtaaatccgccaacgtgggcgtttcgtaaattccgccactacgggcgtttcgtaaatccgtcagggcgtttcgtgaatccgccaacgtgggcgtttcgtaaattccgccactattggcgtttcgtaaatccgccagggcgtttcgtgaatccgccaacgtgggcgtttcgta

SEQ ID NO: 15142 - DNA, 2951 bp, Heterodera glycines
  unsure (1)..(2951): unsure at all n locations
ttcgacttgtgaaaaagtatgaatggtcgttgttttgaagcttgntacggttcttttttgttagaagtatttccatttactacattaaacataaaatttattgtcttataatgcatgagaaacatcaaaatgttgaaaagcctctttctatttttgaaattttgccgaaaattttcgaaaaaatttttgtcctacggcatggaaacgccgctatggaaacggcggcatggaactgaccccaaccgacaaaaaacatttttttgctggatttttttccttttaccgtccatgatgtgctttcggtaatagtgtatatggtagcccccttttttttaaagaaaattttcaaaaaaagttttcgaaataaagttgtttttaggttttcagggtcggaaatatgaaccatattctccggcccaaaaaacctataaagcaactttatttcgagaaaattctttgaaaattttctttttctaaaaggggggcgctaccatgtacactagagaccggaaatttcaaatttgcggatcctgttgcaggattggaattcaaaattttttacaggacaggatccggtaggattaatcctgcaaatcctgcatttaaaatctgcaggatcctgcgcaggattgcggattttaggaaatttcaaaaaattctgtattaataaaaaagtctttcaaagtataaaaaagtattcaaatatatttttaaaccaaaaaatgatgaagatgaaaaattaatagcgtttttttgcttacactccaagcaatcgactgaaatcttctttaatgcgtttaaaaagaccgatttgccaaattgggtggctcataaataatagcttaaattaaagtaaaataatttttatttaaatttctttgcaaaaaagccataatccattatgtatagggatgggatttttaggcacaaaaaatcgcgaaataggcacttaaaaaggcagaaaaatcctaaaataggcacgaaaataatttttattaacgccttttaggtagcaaaacacataaaaaattcaattgtacaaacttttttccgctgacccacaaattgtccaagccacgaattgtccaagccacgttttgtccaagccacgaattgtccaagccacgaattgtccaagccacgttttgtccaagccacgaattgtccaaaagagtaaaaactcacgaattgtccaaaagtctaaaaagctcataaaaagccgggaaaacgggtctgttttaggcttttcggggtcgctgaatacgaatacgacatttatatagccccttgcctaaccctagatccactcggataagaaaaaatctcataatttgtctaaaatatttgctctttttttacttgatttttcttttcattaattgaacaaatgattcgtaataaacttgaaagtctacaaaaaagtcggaagaagcgttatttgtcagacatttcaaacgcaactgaggaggccgtgaatttgggagtggaactcgttgaaccgaatgccgtaacaacctctgacagcgttgaacaacagaatttgaaagaggctgaactctcaacagtgacctttgagcgcggaaaaaccaattatgggaccgattgcctatggttgaacagaatatggtgaggcagttcgcaaaacattcaggtaaaaaataaaatttacaaactattcaggatttcgttttacacaccactcaggaaatcgctggagatgcacaaatcgcagttgctcagcatatataaacatcacaaacaacggcgaaaccggagctagtggaaccttgagtcaaaaagaacacaaccacctcccagcacctcagaaacaacaagtgtataaatttaaaaccaaataattaatgctttgttaaaggcagagtcaaggcgacagaaaatcaaagaaagtgtcctggtcgagccgtgtctgaagcccacacgacttttggctaaagtgaggcgatcagcaacggatgaagcctttgttgccatgagctccaacaatgcgttgactgaaatgatgcggcgtgagaagaaaaagttgctgggaaacgtcgacgtgcaggacccactggcctttgtcattccagcaacgttacgcgaaaaacgtggcgaagacatcgtcttgtatgacagtcgcaatgtcaggcaaggcgaaaaggacgttgtccttattttcggcagtgttaaggtacattttttggctataaaattctgtttgttattggcattcctttagactctggacattttgcgccaatgtggcacgtgcacctcgatggaactttcaaatgtgctccagcgatgtgggagcagtgcttcgtcattggtgcttcagtacatcagaggatgtgcatcagcatgtggtgtctcctgcctggaaaacagcgacgctactacgaagaagcactgaagcatcggctcaccggcaccatcaactcttacgtggccaaccactgtgagtccacgggagcagcttgttcaatattcgttgagcccgctaccgactttgacagctccttcaggcagaatccttaatcaatcatccgtttaaatttaataaaaaaattcagttccagcgtgggaggacgaaatcgttcgtgcgccacattttccaattccgctttggaacatgcactcacaggcaacatctgccctcgctcgtacaaacaacggactggaggcaactcatcttcattttatggtctttaatttattaaaaacaaattgaaaagaaacatttagaaaggcctctgtcaccacaccaccccgccctctcggacttcatttgtggggttaatgaaagcatcgacagacaggtggacgctgcccgatctgctcgccatttcattcacaagcgacacaaacgatacatcctcccagatgctgtcattatgcgaattttggcggacgcgtcgtacaacagcaatggtgaaaattagtgatctgat

SEQ ID NO: 15143 - DNA, 1191 bp, Heterodera glycines
tcgaaccgaccatttgtagggctcaaccgtagatagctttgcgatttggctgaaacccacatgtctaatgatgtagaaaaaagggataaccattttctgagaatacctattcttacctacaatgcaaatttcaaaccgaccatttgtagggctcaaccgtagatagtaatgcgatttggctgtaaccctgtcaatgatgtagaaaaaagggatagccattttctgagaatacctattcttacctacaatgcaaatttcgaaccgaccatttgtagggctcaaccgtagatagtaatgcgatttggctgaaacccaaatgtcaaatgatgtagaaaaaagggatagccattttctgagaatacctattcttacctacaatgcaaatttcaaaccgaccatttgtagggctcagccgtagatagtaatgcgatttggctgaaacccaaatgtctaatgatgtagaaaaaagggatagccattttctgagaatacctattcttacctacaatgcaaatttcaaaccgaccatttgtagggctcaaccgtagatagtaatgcgatttggctgtaaacccatgatgtcaaatgatgtagaaaaaagggatagccattttctgagaatacctattcttacctacaatgcaaatttcaaaccgaccatttgtagggctcaaccgtagatagtaatgcgatttggctgaaacccaaatgtcaaatgatgtagaaaaaagggatagccattttctgagaatacctattcttacctacaatgcaaatttcaaaccgaccatttgtagggctcagccgtagatagtaatgcgatttggctgaaacccaaatgtctaatgatgtagaaaaaagggatagccattttctgagaatacctattcttacctacaatgcaaatttcaaaccgaccatttgtagggctcaaccgtagatagtaatgcgatttggctgaaacccaaatgtcaaatgatgtagaaaaaagggatagccattttctgagaatgcctattcttacctacaatgcaaatttcaaaccgaccatttgtagggctcagccgtagatagtaatgcgatttggctgaaacccatgatgtagaaaaaagagatagccattttctgagaatacctattcttacctacaaagaagattcgaaccgaccatttgtagggctcaaccgtaga

SEQ ID NO: 15144 - DNA, 952 bp, Heterodera glycines
ccatttgtacggctcaaccgtagatagtaatgtgattaggctgataacccaaatgtcaaatgatgtagaaaaaagggatagacattttctgagaatgcctattcttacctacaatgcaaatttcaaaccgtccatttgtagggctcaaccgtagatagtaatgcgatttggctgaaacccaaatgtcaaatgatgtagaaaaaagggatagccattttctgagaatacctattcttacctacaatgcaaatttcaaaccgaccatttgtagggctcaaccgtagatagtaatgcgatttggctgaaacccaaatgtcaaatgatgtagaaaaaagggatagccattttctgagaatgcctattcttacctacaatgcaaatttcaaaccgaccatttgtagggctcaaccgtagatagtaatgcgatttggctgaaacccaaatgtcaaatgatgtagaaaaaagggatagccattttctgagaatacctattcttacctacaatgcaaatttcgaaccgaccatttgtagggctcaaccgtagatagtaatgcgatttggctgaaacccaaatgtcaaatgatgtagaaaaaagggatagccattttctgagaatacctattcttacctacaatgcaaatttcaaaccgaccatttgtagggctcaaccgtagatagtaatgcgatttggctgtaaacccatgatgtagaaaaaagggatagccattttctgagaatgcctattcttacctacaatgcaaatttcaaaccgaccatttgtagggctcaaccgtagatagtaatgcgatttggctgaaacccaaatgtctaatgatgtagaaaaaagggataaccattttctgagaatacctattcttacctacaatgcaaatttcaaaccgaccattgtagacgcaaccgtagatagtaatgcgatttggctgaaacccac

SEQ ID NO: 15145 - DNA, 2182 bp, Heterodera glycines
  unsure (1)..(2182): unsure at all n locations
aaaaatgcatancaattcttagccaaatcccccaattaatttaaaatantgggaacaaatttaatttattgaaaattttccaactaaaatatttagtcctacaaaatttgctgtccgcggtgcgatggactgtctgcgcatggaactgtctgatcgaggcttgcacaacaacataatatgcaccaccatttgcccgttctttgtgcgcacgccaatgatcacttcaattggcattcggccaatttccaggcattaaaaaaatatatatttatttttaatatttaaatttatttctgttttattaaagatggatcccatttttgtcggccaacagttgtgcccagcaaattgttgatgcggtcctcaaagagaaggtgatcgcgttcatgccatggtggttagggctgattgcgctgcttcacaggtggcacaattaaaatatgaaaatgatcttctattcccaaagggatttgatcagttattgagatgacctaaatttcttatcagtgtagtctttgctcccaattttcttatcacaaaatgacatgaataattaattattgagaaatattccactataaaattatatgtattttcaatttattgttataaataagcaaaatctaagttgattttttgtgatgctttttccaaaaaaaaaacttttggggaacaaggggggtccggcggtgccgataggcgccgccgggggaaaaattaagaattttgaccatatttttagcagattttcattaaaaaattcttaattttatggattttcgaaaaaattggttattttcaggtttttatgaaaaatttaacaaatttttttggaaaatttggatgagattttcgttttgacgctcttttaaaaacccaaattattaaatgattgtcaaacattatgccaatttatcaaaattcatcataaaatttaacagattctgacgattttccccaaaagcctcaaaaatcctcaaaatttctcaaaaaaccgcaaaaaagctcaaagcctcatttgaaaatttagcctcattgacctatcaaaaaaccacaaaatgaggctaaagcctcagatctgggagccctggtttaaaagccctcccccctaaattttaaaaaaaggaaaataaaccaaaaaaaaaaaaattaaaaaaagaaaaaaaaagaaaaacttaaaaaaaaataaaaatattttcatgcaattttaaaaatatcagcattttaaataaattttcaatttttaattaaatttttcgatttgtttagcattctcccgttgaacatgcaacgagtggcgcgggacttcatcaattttcgctatgaagaacccgattatcccatggcagatgatgctcaaccaaaaacaacaacaactgccgttgaccaccaaattcaaaatggcgccaccgccaacacaaaattggcggttggcgaaatgcccatatccaatggacaaacggttgaggagagagtggcagagaagcaggcagaaaatggcggtgcaaatagcttccgccgaaaaccttcgccattgttgcgcctccaaaaacgccaaatgcgggagcacttcgaatttgccggattcatttggtggctgatcattgtgccggctatggcactgacatttgtaatccaattttaatttaaattttaattagtaacactttaataaccccctaattaactagactttataaccccacctttttaacaggtggtcttttatgatcctgcgcttgttaatgtgcattggcttggccctgttggtcaatttgtgtataaacttggtaaatttggatttaatttcaattttttgattgacttggttaattatgcttaaaaatttggcaatttaattgtttgccatattattttaattaaattccttttcattgagctcaatcgactaaatacaaaatttagcaaatgctaagtcaaagtcttggctgacattatttagagaataaactattgcattttattagggttttatcattatttgcctaattgtgccataataaatattgtattaatataatttcccccccccaggcattgaatatccgaccttgattctgtttatcaatgtggcggcatggactgcgcatctgcttgaggcacttattgcgctttatctcaccgatgagctttatattagccataggttataaaggaaatt

SEQ ID NO: 15146 - DNA, 1899 bp, Heterodera glycines
ttgattctgtttatcaatgtggccgcatctaatgtgatgtgcttgaggcagttattgcgctttatctcaccgacgagatctatattagccataggtgataaaggaaatttaaggatttatataaaataaattaaacgaaaaaaagaaaagaattaaatgttttatctttttcttagcagttttatcgatctgaatataaattttgctggtctttttaagcgattttaattatttatttttacaataaaaatatttagaaaaaaaaataataatatttttaaaaattttataattgtttttcagatgcgcccttttttggttcttgcagacactgattcttggcttcccctcacttcgattgttgctaaaattacgccagaaattcaattaaaatgccattttatcattatttttatcatttaaatgaaaatgaattaattaatatatttggaattaaaatgtgtttaatatacatatatatttaaaaattgtttcaaggattaatgaaccaattttcttaattaattttgtcattataacatgcgaatttaaaaacatcctactgtaaaatgtaaattaatggaaataatatcaaaccctactgatcagaggactgaagacagtcattattgaattgttaaattgcccattgatcagtagtagtaggaaaatgcaaaaaccaacactgacttattttaatcaaattttccattttattatgaattaattgcctattgcattaataccaaaacaaagtttgccaaaactttacagaattgacaaaaacattccgatttttaaaacatatatttttatgaaattgtactcattctcattttataccataataaaagaaaagataaaatgcagacttttaaattaattttattatattttattaatttaaagttttacagaaattttaaaataaatgtttttgagagtttattcaaacaaaaatgagctgaatgaaagagaaacgctattgaaattacaaattttcgtgcatcttttctgcacataaatacttcaaattaaaattattgtttggcagcgttatagcttttattgagcaacaaataattgtaaaataaatcaaatctattattttaaaattaaaaatgcataaccaaatctggaatttttccttctaattgaacaaatttattcgattttcaaagaaaaattcaatgaaatttattatgttttcatacacatttttgggtgtttgtgccaaagagatcgaaaggaaattcaaaattttgtcggtaattgttcatcatttatttttcaccgttgcgctgtgttgttttgaacatgaaaaatataacaacaattcatccgaagcgaaacatctaaaaaaaatttcaaaaatttcaaaattatggtaaatttttttacaaaatttgtaaaaaaaattatagaaaatttaagttcataaaaacggttcccaattattctaatgctttgcgcacagaaacggagataaactatggcaaaagtataatcataaaataataaacccgaattggaactataattaaattgagtaattaacaaaaaatttaattttagaagcctccccgactcgaaactcttttttatataccaaaaaactaagtttttttttaaaattatgtttatttaagtatacgaataaaaatagcatactaatgaaatagaaaatatataaatataaaatttaccgttcctcccaaatcgccaagatgacgcgcatacatttttggagcagtcacctcttcaatgtttcgtccagcccgcaacaaattttgttcctcctcctgccgttcaacaaatttatttatttttggcattttttttattttttggcattttttgccttatgggcggtccgcgcatttaacgcttcgccatcaa

SEQ ID NO: 15147 - DNA, 3711 bp, Heterodera glycines
actctgttaacaagctaggcgctgttagcaatatatttgtgaacgacaaaaatgggagacgcagccattcaacgattgacggatattttgcagcaattgttggctgcgcaacagcaaaacgcgccaccggcacagaacgcctcccaattgccaacactcccggacgtgaaatgttttgatgctagtcagcatcgtggctgcgaaattgaggattggctcaagcgatttaagttcgctctggactgtgcagcgccgaacttccaggatgagctgaaggtgaagctgttgatgacgaaattgtgtggaccgacgttcagcgaatattgtaagtctgtcttaccgagagaagtgaccgacttcgactttgtggagacttcggagaagctgaaggcattgttcagccgacctcaatcagtttggattgaccggtatgaatgtctccgctcggtcaaagacgacgacgaggattttggcaccttcatcaaccggcaaaagaagcttctgcgggatttcaacttcaagaaattgaatgaggagcaattcaactgtatggttttgctcatttctttgaaatctccgaaggatgctactctgcggtcgagaattttggccaagttggcagcggatggtgacacggtcaagtacgacaccgtggtagacgacttgaagatctacatgtcgaccatcgccgaagccaaggcactggagcagccacatgtttcgaagcatttgttggcagcaaaattgaagggccaaaagaagaggaagaactcgtaccattcgtcgaatgcgagcagcgtgtctacaggaactcggagcagcaaccgatcgcagcgctaatgctggcgatgcggttggaagcattcgtcgagggaatgccgacaccaagaaacggtttgccgaaagtgcaagaggaatggccacttggaaaggatgtgtgccaagcaccaggcatggttgaagaagaatggcggaacgaatgaaaaagcggtgaacaacgtccgcgttggaggagttttcctggttaaatctgagaaccagaggaagaaaggaatgattgatgttccgattaatgtgaatggaacaaaagtggacttcattgctgatttcggcaccgagtgaactgttctttgtgaggacacggtgcgccaaatcggaactttgaaattgagtcgttgtcaagaacgcactcagtaccacgatgggacaattcgtccatttgttggccaaggaaaggcaacgttttcgtttggcaaccgatcagcgtttgggcatttctttctttccaaagacggatcaaagaatctgctcggattggacatgatggacagacttggattgtcggactccatcagaaatggtctgaaggacaaattccgaattgagactgccaaagcgaacggagagatccagaacaagaagaaattcttcagaaaaaatcgacgcggcaaaaagcaaaacttcttcgccgttggagcgaatgtgatcgccagcttgggagatgaaccatggcgtgccggacgtgtgatcagccagaaaagaggcctttacaacgttcagttttcggacggcacgaccggagaattcccggcaaagagtgtacagccgtacatgccggacgaagacgaaaatttgaattttcttgacggatttggactgaagagatcctcatccggtggaactgtcaggaagcaccaaatcggcagtgacggccgacgagatcaattggaagatgatctccgagcttccgactgtgaacaagaggcataagaacgccgacctgaggatgcggatgatggacggaggcctggcactttttaaggggggagatgttagggttgggacccaattggccggtacccattttgaccctttgctttattgtatttcccttttcccttggttatgtcacgcccctttttccgcccataaatacccgcgatgttgaccctccccgttcacttcattcatttgtgttatttttccttcttgttatttaaaaattcctccccatttattttgtgtctttttcccctctgctccaaataaatattgattatttgtttgccatcggccggcaaaacaaatgatatcttataattgcatactttgcagggtaattctttgaattgttcatctgatgaaatttcagacatgcaaatggtgcaatcattttgttgttcatttgaactttgacttggttgattagcacttgactttgaccgattagcactttgattaccggtgtctcgattaacacctaattttatagttataatttgcatagaaaattttttttaaagattcctaaataatatataattttaaaaataattcaaataaatttctttgagataacatggaattaatagttcgataaattttaattaaatttacatttaatattttgaaaaaacccatttattgatttgcacattattttttcttaattaattacccatgccttccgatgttgttccaccatattcttctgcttgcaatcttgctgctaattgtgcatcatcatcaactccacttcctcctcctctttcttgctgtgctaaagttgcagcgagtagttcatcttaatttgcttaacaatgaattaatgatttcttcaaatttttaaattataaaatttaataaaaaaattacggtaagcatttgtatttgtatttgtatttctgttgctggtattccgtcgtccaactaaaaatggtagcagtgacattttgattaaaaatctgccaatttcttggtcataataattgttttcgataaatgttatgatttttttaaggaaagagtaaaattttaaataattagatgaaaaaaattaataaaaaatatttatttgaaaattgtgtatttttttcaataaagaagaagaaaattaaatttagtggattatagcaagaaataattacctcgttctgcatggtttaaatcaaagataataaacaaaaaaataaaatatacaaaaaacatctaatgaaaataaaatgtgctgtttttctagcttaaaaacgatttttaatgtctatctctctgtggataaattatgattattcgaagtatttaaagcaaaaacaataacataattaataattcaaaatattaatataaaataatattaatacttataataataaaaataaatttctaataaaattatacaataaaatatagttatattaaaaaaggcattagcaagcttttatggcattgattagcatttaaaacgacctttttaaggcaggaattattttgggaagaagtcatgcgttttctaatattaatttttacaattagctacatttttaattttataaatttatatattatatgctataattattacaaataaaatgatttattgagaaattgtagaactagttgtaagcagcatgtcaaaaggattttcgaaaattaatgtgtgatttgttaaagttttcaacaaaaaaatctcttttaaaattcgcaattttaaatgatggctccgaaacaattttaaaaaagtcatttaaattgaaaatatttttattgttaatctctcttaaaaaaaacaattaatgaatagtcggttatattcttgtttaggcgtccaatgatgaggccgctcacgggttttgaaggaacaaatttttttcaaatttggccagggccaacttttttttaagggtttttttttttttcttgtttttaaaaatt

SEQ ID NO: 15148 - DNA, 1601 bp, Heterodera glycines
tataaaatgatattatataaaataagcaaaaagcgaaaattcgcttttaagtgcttaactatgtctgttttttctctaaataattttttagccatttttaaagttttacattacatttagcgaatttgatgaaaattgagaaattacacactcaattttgaaaaatttatgtccatatttttgaaactttatgttcatatttcgcgatttttggtccatattttatggccatattttgcgatttatatccatatatttcgccgccctagtcataaaactgagttgtcccatcagctgagttgtctccagctcacttgcctgacagacgagtcggggtcgttttggcgcccacgttttggcgccgacgttttggcgcccacgttttggcgccaaggtcgttttggcgccgacgttttggcgcccacgttttggcgccagggtcaggtttttaaattttgtctatgtttgaataaatgaaaatatgtaatcgtcagttttctgagtcgctaatcacgaatattgtattcattttgacaattgcgaagcccggacttgatttaaatgaaatacaatttttgaacatattagatcaggccttctatctgttttgttttatcaaatgttttaatatggtgggtccaaatctgagaaaatgatttaccagattctgatttagggatagtgactattatttattaaatataccgttaaggttatgtttataatcactaactcttttgaaatttcaaccgaaaaaatttaagagttacagtcaaaatcgggaagtttgaaaaaaaattctagggggttgtgaattttttgaaaatttgaaaaacccattggaaggtaaaagtttttcactttttttataaaatttttgatcaaatttttaccttttttaatttttggcttcgcgccaaaacgtgagcgccaaaacgaccctggcgccaaaacgtgggcgccaaatcgtcggcgccaaaacgacccagtcccctcaaaaatgaaggaagaatggcttaaaatgcatagtcgtcaattcaaccgggactgaaacttaccccgtaaaaataagattttaaatttacctaatttggtgttgtgtgtgggtggttccaaagttttttccattgactgattttcctataaaagaagcacaattcaagtggtccactctcattccattttttttgccccgttgaattttattctgtcatttttattgtcggaaagtgaattgcgtcaaaaccaaatcactagtgctcattttgcgctgcttcttttccgtttaggcaccaaaaagtaacggagaacaaatggcggccatcgacaccaatttgtactctcggcagatgtaagccgcgacggtactcattgggtttgggtccccttttttggccagaaattttcaatttttttttggtttaaaaattcctgaaaacaagtattatggggttttcggggtcgctgatcacgaatacgacatccatttcgaccaattcgagattccgaaaccaaattcgaacaaaaagtcgaaaattcaaaattttcgaatttcgggtttttggccgaacaaggtctaattacattacaaggaactttaa

SEQ ID NO: 15149 - DNA, 2430 bp, Heterodera glycines
ttgcttttttgaagaaagttgaatagcaattcggaaccttcccgaaattgccaaaatattccgacgttgagcttcttttttaagacgggcgtcgccaattgttcggtcttcaagccgacacaataaaatgtttatttgatgaacaaataaattaaacaatttaaataaaaatgggcgaagtcggtggcgcgaataaataatggaggagaacaaatatttaggcgaagtgaaataagtgcataaaaagcaactgaatgaatgaggggaaaggacaggcaatggacataataaatcaatagtgtcttacataaatgaagacacaataattagagagtggggaaaatggagaggaaaagaaaaatacaaatgcaaagggaaataatgcaaatgtgttctttcatctctcggggttgaccacccgaacaagtagcaagaaatatgtagcagaatgtaaaagagcatttgaaattaaatttaattcatttaaattgttaatttaaaaaaatcttttacacttacgtggtgttgcttctgctgatcaggctgagcagccatgtttacaaaataatgaatactttgaaaagcctaagtatttatttaaaataaatatttttgtaaatgaataagaaatgaaaaataaatggcaatgggataaagaaaaaatgaaatgtttaagaaatgaaggagatgtttttgcctttgacaatttgtgagaaaagacggcgaaacaaactttacaccgcacaatcttatggccaatcatttgaacggcaaaaaggaaacattgctgtggtgctaatggaatgcaaaaaaaaaataattaaaaaaatttaatgatatacaataatcgtattgttttacattactgtattcccccccccccctctgctgtgtttatatttatttctcgtatttaattatcactaattaagctgacaatgagttaaaaaagcgggatatttatgttgattcataaacaaaaacagcttggatgactttaatggaatggaaagccattaaagctcattcaaaaagattcaaaaaatttatcaattaaaatatatccttatttttcaatacattttttgagctgtatttcattaacaccacagcaatgtttccttatttattttaataattaaaataataaattttcattttgattagctaattaataattacattaattcaaataaacaaaaatgaatcattttttgctgcccataaatctgacaaaaattggatggaaatgggattcatttaatggaaaaaatgaataaattaacagcaattaatcggcgtcaaattcagtcaatcattcagtcattcattcattatttttccattttgttaatgggaaaagcgttccattattacaaataaataaaataaaaataatatttcaattattgtttatttaaaaattcaaagcaaaatgcgtctttatttgaacatccctttaattttgggccacatttttgcgttgaatggcatccaatcttctgcagatgagcagataaccaaaccgtaaacaaaaagcattttaataattttggaatttaatttttcaatttttaattagcactcgactgacgggccacggcacaaaagtgacgaccatccaaattcaggactttgaccaatgctttcctcgtgatgcaaccaaaacttttgggctcgaatttcgtttgccacgagacgggggctgttgtgaagacgggtgaactattcaaatttatgttgttttaataatgtttggcgaaatgtcagggatttttataaaaatgaaagccgtagagaccggtaaagacaggcattaattattcagtaattaagtaaatttcgtactaaaattattgtcaacttcaccatcaaaattcgacaattaattaattttcagacccttttgaattttcaaaaaatttagcttgggttcaaagtttttcaaaatgttggcaattatcaaaaaaattttattttaattttaatagcaaatttttaataaataatttcagtctaatcatttgctacccgagcataatggccaccggagttttggacaacgatcattcagttgatactgtagacctaagcaacgaaatgttcaacattgacaacatcgataatgtgaaagaattttttggcattttaaattaaaaaaaattttttaaatttttttagaatccgattgccgaagaatgccaaaacagagccaaaaagcttggaaattcaatggcaaaactcacttggcatggcattagcataaaacttaacagacaaagtgctgggataagcacggcaattttggacacatcattctgcgagaaaaggtaaaatttgccatttatactgtaattttttgaaattcggtaattttgttctaccgtaaaaggatgatgaaaaactgtagtttttataaataatcgaaaa

SEQ ID NO: 15150 - DNA, 1311 bp, Heterodera glycines
tcaatttttgaattgtcttagtgaataagtaaaatttaaattcaaatttttgaattgtcttagtgaaaaagtaaaatttaaattcaaatttttgaattgtcttagtgaataagtaaaatttaaattcaaatttttgaattgtcttagtgaaaaagtaaaatttaaattcaaatttttgaattgtcttagtgaataagtaaaatttaaattcaaatttttgaattgtcttagtgaaaaagtaaaatttaaattcaaatttttgaattgtcttgagtcctcccaaaagtcttggctatcaatgacaatgaatatgtggtgcaaatcacagcaaaagtaaattcgaaaatcaaatttttataaaaatttggtctttcaattgtcacgacgagtcatcgttgtgttgtgaatttggtcttggcacatcggatttttatttatttattttttctaatttttggtactcctttttacgggactcaaataaaaaaactgtgcttcaaatataattattgtaaaaattatcaaagcatactgtaaaaatgatacggtttttagctgtgttaatgagacacagaaactgaccatgccaatccacatttcggacgtgaaccaagtgattaccatccgactgttaactgataaaatgaaaaatgacaattcgacgaataacacaatcgcgctgaaactttggcacacgaatcaaggaaaggaaggtgggtagaaaattgaaaatttttaggtaaaaccgaatttttcaagaaattaataagaatttttaatttttttttttttgcgatctccttattaaccttttttatcctaccattaggttgaagtttattttattaaaatctttttgaaagcccctgaaacaaagccatgttgaccaaaaaagacctaaatggtcgccctgttttttgcactaattttttcattaaattcttaatatctgctacatataaaccaatcaaaaatttaaaaaattgaaatgtaaaattaatttaaaagttagttttaaatttaaaaaaaagcaattttgcagatatcgaaatgcttagcattcacttttttcttgccaacaattccgtggaagtggtgattggaactgaaacacatttttgcgattacgaattttctaacgaaatattcgaaatgaatctgcaaatttggataaagcagtacggttacaaaattttgtttaaaaacaaacgattgggcaaaagggaatattatcccgcaaaatggtgggaaggattgaaattcaaggaccacaacaaattgacggtaagaaaattttatatggaattaaaa

SEQ ID NO: 15151 - DNA, 1447 bp, Heterodera glycines
ggaaaagtgaaaaggaaagagaatcagcaaaaaaggaagttccaaggaaaaggagggaccaaagacaacagaagattctgccccaattggagcaaattgaagaacagacggtatggctaccggtgagagaggaggaggcaaagaaagagacagacgactaaagagcacagcaagacggagaaaatgaaagaggaaaagaaaaggagcgtcaggaggaagagggagtcaaagaaaaagagggaagggaacacgaacaacaaaagtcggcacaacgcaaaaagacaacgaacgtcccgggcaatgccattgagccggcaattatcagcagtcggaagccggccattgtgaccatccaaagcaaagagatagaggaaatgccgccggatgcatttgacgatggcagcatcaggacggcaccgacccctcgggtgcaacaaatggaagagttggagagagaaatagccggaagcattgtgccggaactgattgtgccacaagtgatcgtaggagggaaacggaaagaggaaaaaggggaggacgaagaggaaaagggagacggaaggcaaaaaggaaatggaaaacggaaagaggaaggaggaaaagggaaagaagaaaaaggggacaaagaagagcaaaaaggagaaggaggggaaaaagaaaacggaaaagggaaagaggaagaaggaaatggcagcaaaacatcggcatttttgcaagagaaaaccgacgaacacaacgccaatggcaatgataaggtattatcgtgttagaagaatgaatctgaacagaaattggttaagggaacaacaaattccaaggcgaaaaacgaaattcgaattgagccaattgggacaaaaggacggacaaatgccaaggcaaagcctacggaaattcccgcggaggaggcagaagagggccgagaagacgagcagaggcaacagcaagccgaagaagagccggaacagcacgagccggcgtcgtcgagtgccgtgccgccatctccgccacaaaggcaacggccgacgacccccgaggcgaagagaacggcacggccatcgacagaaatggcaacaacggaggaacagagggaaacaccaaaagggaaaattgacaaagaaaggccaacaactcaaggaacaacaccagcagaagtgagccgaacattcattctgatcacgaacagcacgaacaaagccaattcgccgtccccgtcaattaaacggacgaaggcaacgacaacggcaccgaaagtgaagccgaataaccccgacggggacgagccaatgctaatggaatttgacaacggcaacagcaacattctggcggagagtgccgtgaacgggaacagtgagtgaagggaaaggaaagagagggcaaagaaaaagggaaatgcaattgaacagaactttccgtggtggtcccagtggcaatgtgctcatttggctcg

SEQ ID NO: 15152 - DNA, 2926 bp, Heterodera glycines
ttttgaaatttaatctttgtattaattccgtcattttctttggcattattaggcaaactcaagagcgtttgcgcactctgtacggcccggcctatcagataaggccagtgtatacgatgcgagtgaataagttgggaagtggcaacgcatcgtatgaggaacagttggacaaaacggcccatcggctgagtgcggagatggcatacaaccaggcgagttgggattggaagtgggagtgggtgcagttgcacccccacccgcccgcccattgaccgttcactggccgtgccaatgccttctcccccccctggcgagggttcgtcggctttttggcttttcttccctcatccgtgccgaatgaaaaatgcctttgctgatatttgtcttttctcagaacccttttgtgcccggtcgctattccgtgtacggctcctattggaacatttctccacagggaagcgccgtcagcagacgaaacggcggcaaagcgacgcttaacggcacggggccccagcaacagcagcaaaatgcctcgagggcacagatggcgccgcttgaaatcagttcgccccggggcagcagcggcgacggcagcggcggatcgtccgcttttggcaattacatccaatcgctggcaaaaatgagggggacatcgaacggcgttggggggacagagcgggaggacgcgcaatcggaatactttgccaacagtcaagtagaggcaattaacaaattaatactaattgccgaaacaattagcaaatgtttagagaaatacgaaccgtttcagcagtaataacaacggaaatggacggatttgaggagaaaaacagaagagaagagatggtgaaaaaggaggacaaaaagaagaaaaagcaacttttagtgccattcattgttattttattccaaattccaaccgaacattttgcttaaaggacgcaaatgcctcagtttcataattttcatttttgaaaccatccattcacttttgtatgtaaatgaattacaatatttttgaataaatttataaattattaataacttttaattattttatttttataattttgattatatttttatgggggtaaaaactttaaataataataaattgcataattttttttttctttaggggtttaaaatctgaatttgtggggaacacccatcaatcagtaatttaccaacaaaaaagtatatcctatataataaagttgagtgtctgtatgtatccgccttgctttgaattggcgtggcgttttgtaattgttttgcgttaaaaaatgatttgaaaatgaaaatgtttttgttttgttttgcgttaaaaaagcatttgaaaaatggaaatgtttggttttgatttttcaatttgttctgattaattaatgcatttgcattgtattttatgtctatgattatagttagtctattattgtattttagtctttgtctattttttatgatttagccaaaaatgaattgtttacttaatttgaattttctacaggtttgatatattgactttctctctgccgcttcggcattttttttttcatcaacggccggtcggccatccatgtcttacccaatacttttgatgtgtgattttagttgaagtttgttttgtttggtttttatgcaaaattatgtttataaaatttagatatgacatgaagaactaaagttttatgatcgctcatggttttgtattcgttgtgaattcattcacaagtttgaaatctgccgtggccatcattcaacagcttgcgattgagtttaagtgcctcatcaaagtttattgggattaatttgtttcgaattatattttgctttgttatgttaattattatgtaaaatttagaaatgagaaccatcatattgaagaaatgctgttggcttacaattggttgtgatttcatctctgaagtgttgaacctgtcggtcggccactcaactttttgctcactttcgagaaattcactacttcaactttggcggccccttttgtaagtgggttgggaagagttgtggtaaatttgccaaatagccaaatatctgataaaacattagtgtttgttctgtgattttagtgtgacacaataatgtgtcttatgtctgataaaacaatagtgttttttctgtgactttagtgtgacccaataatgtgtgtcatgcttttgataaaacattagtgtttgttctatgaatttagtgtgacacaataatgtgtcttatgtcttttgataaaacattggtggtttgttctgtgattttagtgtgacacaataatgtgtcttatgtttttgataaaacaatagtgtttattctatgaatttagtgtgacacaataatgtgtcttatgtctttgataaaacaatagtgtttgttctgtgattttagtgtgacacaataatatgtgtcatgtttttgataaacattagtgtttattctatgaatttagtgtgacacaataatgtgtcttatgtctttgataaaacaatagtgtttgttctgtgactttagtgtgacacaataatgtgtgtcatttttttgataaacattagagtttgttctatgacttcattatgaaatttatttgcaatatgttaaaaattagaccaatataattattaagcaatgaagtgtgcactgggcttaccattggatctcttcaaaaaaatcatggatttgttagtgataaactgatcgtaaatcgtaaaaactttaaataaataataaatttaatgttatgaattcttcatttgattttcatttcaatacctacaactttttgttttattttaaataattaattttcagttatttaatattatggcttcaataaacgatttagattatgttcgagattatgattatgtttatgatttagattttgatgaagttgagaaatgtgtgagatttt

SEQ ID NO: 15153 - DNA, 2549 bp, Heterodera glycines
ttcgtcggagggaaaaataaccggttaaaaaaataacttcttaggcttagacatttttcaaaaaatcttattgttcgaaatttttttataagaacataccaaagaaaaaaaaattgtgaaaattttttcaagctgtatgatgaattattaagtttttactagggttcggaccccgcccccgtccccggggcgggacaggtttttggggctcaccaccgtccccgcccccgtgactctgacccccgcatcccccgcccccgcgaccttcgcccccgcgggggcacgggggtgaaaatacacccctaagaatgacatattcatggataaaaggcaaaaaatttatacaattttgattttttttaaccattttgacaaattttttatgaattaaagttaattttattattggtcattgatgtgtagtgtggtgtagtgtttagtgaatcaaccgtgacattactttctgtcgtgagttcgattcaggttgacggtttcttttttaatttattttttttaattttaaaattcgcctggcgctgcctatcggcatcgcatggcccaaaaattcgtaaatcttattaaaaaaattctctaaaaattgcaaaaacctatcattttttggacaaaatctattaacagatccatcagttttcaaaaaattttcccggcggcgcctatctgcaccgccggacctctacgctcgcacattcaccaagttttttttttttgaaaaatgtgcctcaagaaaatatgttacaaatctgagttccaattttgcttgagtaaatcatgataatttaatatattaaaaaaacaaaaatttatcgtaaaaattttattttttttgtaaacatctgttagaaatcgagcttaaatttcaaaattcgccaggcggcctatcgacaccgccggccccccaaaaacctattttttcttaaaaaattagccaaaaatctctaaaatttggtaattctttagacaaaatctgtgtaggaaaaaaaaattaattagatccaaaaaataaaaaatataatttttagttttttttagatgttttatttatttttttttatctttaaaattatatctaatagatagagctcgcattttgaggcatatgccttttttttcaattttttggtgcctattttagtgcctttttcgcgatttttggtgccttttttgcgagctctactaatagaattaagtttaagttgaattactcattcattcttgtagttataaaatattcgaagggattttcaatttattatcatttcctaaaagaatatcacaaacaaaaattgctactgctctgcttttattcgttttatttattttttggtttccaactagggttttgtttgttattttgtcaattagcatacataattttaacaaaatttgaaaattaaaaaagaaaaaataaatttaattaattaatcaatttttcgatattatttatgcacattaattttcgttcaagttatatgacaggtcaattggtctgctatagtaattattcatttgacaattaacagttttttatggtaccaacatttctttcaaaaatctggttgttttgttagcggtaaagaataaagtgtttgttttaagcaaatttaagaaaataattattattttattaataaaatatttatttatgattcaaagccaataatattattactaaaataaaattacaaattcaatatgaaaatgataacgaaatgttcaaaatgttttcttcattaatttagaggttaagcgctttgaatgttttgatgctgcacatcttcagacttgcggtatatttgttgtcaaaatattcatcgccataaactcggacgcggaaggcgaattgtttcgtcgcattaaaagggatttccactgttttgatcaaattgttgacggcactgatcagacacttttgcagcagttttctggacgtttggtcattaatccaaatctgaaatttatgacacatttatttagaggttggcagcaaaaagccttctaggcacgggtaaatattttccctcctagcagcacctatcggcaccgcggacccccttgatcaccacatatttttgttaaaaagtggtgcgaaaagcaagctaaaaaagtggggttacccccccccccaagccgaactcctgggagcgtccagtccctggtgcccacctccaattttccaatgattggtaagtcgagtacatcccacggcttctcctcctcccacttcgccccctcctccgcttccgcatccaattccttcctccactttcttttgccattggccgtgtcgatttgccacctgaggaaaagcccattcacatgacacccaattgtcggtgacgcgtcaaggataagtcgaagcgattggagaaaaagcgcgtcaaatttggccaaaagtggcgcactccgttggcccgaagaggcaaagagaagcatttggaaaactccgccggaacaattctcggcactttccaagttcggtgtgacgccgtcgcggacatcgccacgcccaatttgcgattgaaaactgt

SEQ ID NO: 15154 - DNA, 1059 bp, Heterodera glycines
ttccattccattccattccattccattccattccattccattccattccattccattccattccattccattccattccattccattccattccattccattccattccattccattccattccattccattccattccattccattccattccattccattccattccattccattccattccattccattccattccattccattccattccattccattccattccattccattccattccattccattccattccattccattccattccattccattccattccattccattccattccattccattccattccattccattccattccattccattccattccattccattccattccattccattccattccattccattccattccattccattccattccattccattccattcatttctcttattcattttcagttggtctgccgtgtttcttctattggtcgattgtgccaccattcttttttggttctttttggacaatgcaaaaaaacgacgacgcccacacaaaaaagaaatgtaaatacaaaaaacaaaaatttggaaattgcaaaaaaaaatcttcatttttcagctttatctgcggcgattgttggcttttggtgttcgattttcttccgccttctcagctcggactcgaaattgcactggtcagccgccgctttgactgcatcgtcgatgaacacttcaagacacgcaaatggacattgggcgaaatgcgaatttcccacaaaattggagagaatggcaccaagcaaatgcaaattgtcaattccgatggaaaaccattgccaatcccgcaaaatccgttgccgaacaaagtcatcggattccgaggcattacgaacgagtaaaaattaattagattaaaattttcgtctacatttctgcttttcagttacatcgacctcaatgtcatcgcatttctccgccgttttcgtcgtattttggccacttgtgcaatcagcttgtacattagcactgaaaatgttcgcattttggagtgtgctttgctcaacatttggccaatgt

SEQ ID NO: 15155 - DNA, 2544 bp, Heterodera glycines
ccgattgttggtcattctgcaagaaagcaaaaaattttttatatagtaagacgaagaaacaattcattaaaaaattacaaattcttaaattttgaatttccactttttatttgaatccgtgttcaaaatgtgccaaaatgaatgtaaagcaccgacccatttaaagtaaaaagtgtcattttcgagaatatattttgaggcatcacacttttggggttagcaattcccaactccaaatacactcaaaagagagaccaagccaatccaattcggctgaggtgagtcaatgtgcaggccgagcacgtcactttccagcacaggcattgcacagttggaaacccagcagaagccattgtggcggacaaaattagtgatgcaattggcatgcccaacgtggtgacacggggcgagcatggccaacccaaagggcactggcgaatcacacaacggacagacggacattttcaaacctcaaaaagtgacaaaaataattatggatttagaaaattgactacattggatttatacaatgggacaaattagatcatggatctgacatgaaatgagacaaattcctaatccctaaactaaactcgaacaagaagctcccctcttttggtttctctttggtttttaataaaattcaaagggtttaaaacagtgaaaaaaacatagattggcgtttataattagccaattttaaatcatacagtatatcactatagcgtgatatgatttgattagtaggcgcagcgagaaaagatcaaatctatcttatgatatctattaaagcgcttccatctatagtggcagtatatttatcggggtaaaatctattaagaaaatgactaaaagcggaaaattggctgaatgacatttttccagctggtaccccgcccaaagccacgaacagcctaaatccttggaccgtcaatggttttatgcagactaaatgatttcaattagaaaaaaaatggcgaaaagtttccttgaacttgttagcctgtataaattattctatgtttaaagtgttcttttctaattacggtattaacaaaaaagcacaaccaatttcgctgacaaatgaattttttcgttactgcttgacttcactcgcattatgtttaaaggtacaattgtggtatgactgtatgaattacactttattccgcgttctcttcttcctcattccgtgtgctaattggtctcgagaccgtaccaaaatttaaattgaaaaggtcaaactcaagaactcggtcattcggcctctgtgcctttttctattttcgaccttcaccgcggtgccgtccatccctccaccgtttttgccaccatttcctcgaattggtgtgaagcttaatttgccgcttcggtgtaattttgtgcattttttacacttcgccgcctgccaaagcactgattttacgccattcctcctcatttaatgacgtacaaaagggcgtccaatgcaaagccagcgaaagatgagccacaaaaacccctcgggggggggggggggcggtggaggcaaaaaatgtactcattttgttgtggtggtaaggcgttgtcaacccttaacatttaaccaccaccaccaccaccattaccgcactcagtccttttatggcatttataggaaaagaggcggagagggaaggcacaccccggggaaggaggaggagggcatatcactttccatcaaaaaaaaacatttcacaaccaactgcttcctttctcgcacttgagacgccttcttaagtgagtcacagccatttttgcgaagagaataggcaccacggcaccacactccccccccacccaaaatgccaatgaatacggtccatccccacccaaaatgccaatgaatacggtccatccccacccaaaatgccaatgatttcagcatattgcctcctcccaaatgccgatgattgcattttaatttttcatcgaaggtctgctcgtccgtccgctccaacgcttcgtctctttgtctttgtactgctccaatttgtcgtccgacccttggtcattcattcaatgctttttcctcccttcgttttgctattggctcccattccattggctttttccatttggcccatcgttttggctgaacccgtttttgcgttggaccatttgtcactgcaaaaccgtgccaccgatgaaaagcattcgtccgcttccacctccccttcactgttatcgtctgtcgcgttgacaaagtgtcaaagcgactatttgtccgcactgatccatcgctgcatgataagaggagtgcccacagcgatggaggggcgcatttgctttgcggacggtaaaaatggcgcggaaggggggggggggagaaagtcgtaatcactagtgatgctcaagaccgaaaatttcccatgagtcgagacttgacaggcagagacccaaaaaacctgagactttgagccaagactgagaatgtcaacggtcagataggaagtgcaaaaaatgaaaattgtaggctcttttttctcgagtcgatatcctcgagcatcactaataatcagagga

SEQ ID NO: 15156 - DNA, 3116 bp, Heterodera glycines
ggggaggaggagggaaaccattcatttcattcatccacttggatggttttcgcaattgcacgtaaggaggaggggagggggtgtacccaaagtttggggattcaaaatgtcctttctttgtggcgttggagcagggaaacggagggggggggggggggcaaaatgaatgggggaaagacattttagtgaacaaatgatgtcctgttgagaggagaaaagtgagggggggggggagaagagatagccaacccaaagaaagagagtgagcggggaaatcaacaaataaatgatgaataattatgagtggggttgacgggaacgagtttccgggaccggtacccccgagggattggggcacgacgagaaaagtgttggacaaaaaagtcggtaaaatttgtttttgattctttgataattaatcatagcaatttgctataatacaaccaccaaaaaataataatagacaatttttattttagtaaaatccgaattagaccattctcacgacagaattcgactccgagtgagggagcacccctccccctgctgtccctacgattgtttacccaatgacaaaaaagggaacccatcaaaacccattagacactaacgcggttaaacattgggggtacccatgtttttggctgtatttaacgaaaaacccctaaaaaaagcaataaaatggatatttttttgttttactcaaaaattgtcaaggaaacagcgcattttaaatgagggcgaacaaaaacaaaaccctcttcttttggtgaacataaagtttgagcgaaaatgccattcactcacctgaatagtacactccttttgttgagcatccgggggaaagtcatcctcaataaaatattcgtccggttgtaagtgccgagttggcgtcaaatgaatggcattttgtttcgcgtaaaattgtaacaaattttgccacctaaaaaatgaattttatataaaaaataatttgttagaaattgatgggaaacacccatccttttgaaaacaatttgctcatttttaagccaaatattcaaattttatttaaagaatatttatttatgcacatccaaaaacaaaccatcgaatttcgtcagttgagtcggccttcacatagcacacaaccgggtgctgtcggtgttcgtccgtcttcgcaaccgattcaatttccgatggccaattgaccttcttcaaaagtccgtcgcctaagccgtccatccgatcatttttgaacgcgatcagaatgctgtgggcatggtttgtgatcgcatctgcctcgcatactctgatgcatttgttcatgtccattttcaattgcggcacagtgtcggactgaaatggcccacgggtgaatgccaattggtccaattttctcttacatttgagtccaacccataactgagttcgccatcgtcgtacaatgtgaaccagcgacgttgccaacgctttttctcatgtgacggttgtgaaaaatcttcaaaaataaaaatcatcgggatttttacatgataaattacccaagtttatcggtgcaacataaagaaaaccacaagcagttattttacggttcatctgaaaagggaattatgaatttcagcagtacaaaagtttgtcacatttttacaaataacaaaagcaaaacatatggttgaaatcttgaaataaacagaaaataggaaatttttttttgaaaaaaatgagtttaagcatttttgaaactaaaatattaaatgtttttttcttgagtttaattaaagtttaattcaacgacacgatctcgggttgtaatgcttttcgcaaatatgtatttggtccacaaaaaaatttttatgaatgaaaaaaatcagactttgaaaagcattatgccaaatatttgaaaaatgccaataaaaacgcgttttctctattttcaaaaatcttagccacattaaaagctcaaaaaggataacctattatgtcatttaaacagcttcggtgctacttaaagaagaacacattgaattttatcataaaccaaagggaaggtctttttggtttacatttttttgacataaaatgtcgtgaaaatatatatgcttccagcggtaattttgaggtcgccggtcacgaaaccgacagcaaccaatttcgaatcatttagcttatttcgaattagagttaaggaattcagcaatttgttgaaaggatagcagattcgtcgtaaacagaactccgaaaacaaatataaataattttttacgataaggcatattttataaaaatttatgaacctaaacgggtctcccggtgcctttggtttttaataccagctttattaatatatatatatatatatatatatatatatatatatatatatatattattatcatgcaatcgcccccccccaattcgacaatttctggaaatgtgtttctatcgcttccgttacagacaatagccaacccaacccaaatccgaaaccgcagaaatgaatggtcaatgaatgagtcagttacccaaattccccctttcgccgaaatttcctcggtcaaatgaatctccgactgttgttgactgattacgtgacggatgacttatgacaagcggtcagagtttgaaattaagttggaaatgggttaagtgacaaaggaaagaagggcggggggcagcagtaaaagaagataacggagaacacttcgccaatcgcccgcttgtttaatttggtttgatttggaatggcactctgctaattgtaactaaagttctgacgggatcaggatcccgccgggatttttccgggatcccgatcccggcttttttgaaaaagggccgggacagggatcccgaaaattcgtggtttgaatcgcggcaaaatcggatcggatttgaatcccagtaatcttatcccggcccggttccaatcccaatcccgactttaactcagggctataattgaacagaaaaatactgcaacggaaggaaagtgaacgggggggggggacgcactaataagagatcgagaatgagtgacttgttgaagaagaggcaacacatgtaaaagaaatgggcggatgaatgaatgaattggatgatggattggcagtgattgcgctgataaaaatcgaaga

SEQ ID NO: 15157 - DNA, 562 bp, Heterodera glycines
actctcttccccactctcctcctccccactctctttggccccgctctcttctcactctcttccccactctctttttcctcccctcttctcgttggccccactctcttctcactctcttccccactctcctcctccccactctctttggccccgctctcttctcactctcttccccactctctttttcctcccctcttctctttggccccgctctcttctcactctcttccccactctctttttcctcccctcttctcgttggccccactctcttcttactctcttccccactctcctcctccccactctctttggccccgctctcttctcactctcttccccactctctttttcctcccctcttctcgttggccccactctcttctcactctcttccccactctcctcctccccactctctttggccccgctctcttctcactctcttccccactctctttttcctcccctcttctcaatggccccactctcttctcactctcttccccactctcctcctccccactctctatggatccgctctcatctcactctcttcccc

SEQ ID NO: 15158 - DNA, 2161 bp, Heterodera glycines
  unsure (1)..(2161): unsure at all n locations
ttcctcaatcgcgaaagcagtcgcttctcgctgcaaattcgccgcgtggacttttcccaccactctccgctagcccactaatccaagctgggttcagacgaagcggaagcatcgtcaaatttgcattccctgctgatcaaaacggcgggagggaaaatgatcagaggaaagagacgacggtgatcggagcatcaggcaagtgatcactcactgctgaaatgcaggctaatgaaacaaaatgcttttacaataatgaatggatacgccatcctcctacactttaattgcaatgagtgcgtgatttcgtcggtcccatctctcctcctccccactctctttggccccgctctcttctcactctcttccccactctcctcctcccctctcctcgttggccccactctcttccccactctcctcctccccactctctttggccccgctctcttctcactctcttccccactctcctcctccccactctctttggccccgctctcttctcactctcttccccactctcctcctccccactctctttggccccgctctcttcatccacctactctctcctcatattcactcactttattaatttaatttcactttttttttgtttaccttatgttgctcacaatcagctgaatcaactttaaaatgctaaaatccttttctacccgtccaaactcaaattacccccattaaattggattcatccaatcatttggcaattaattttgaagcgcttctgaaaatgaaaaactctcattttgttaactgtttttggctcgttttgatggtttatatcgctaaaacgaatggacaaaacgctgaagcgaccactgaagtgaattcggagcagaatggaacggcaaattttgacaatggcaatggcaatttaaaagaaaatgacaacggaacatccacacaaaagccatctctgagaaggaagccgctaatggaagaggccgagggcggcgtggcggacgaggaaattgagcgattggaggaggaggagaagcagatggagaaggacaaagctgaactgcaggaagagaaggaggaggagggaggggaggaggagaagcaacggaaagacgaggaagatgaggaggagaagcaacaggaaaacgacgaagaatcggaagcgcaaggggcggacgacgcagagcaaagcatgaaagcaaagctctttaaagaaaaggaattggcggaagaaatggaattgagtttggctgattctgaggaggaggcgaagcgagcgaagaagcaggggaagaaacaccacgggaagggcggcgggggccatcgccacaaacaccgaaacggaagggacggaccaacggcgttcattttgccgtcatttttccttcagcgtttgttcagccgcggcgcttttgggccgtcgggcgctccctttgacggttcatcatttccaatgattcttccgattataattaataataacatccgtggggggccgccggaggaagaacatcagctgatgagcagcagagccaatcaccacaatgggccaatgttccaagcggcgcatcactttacggcgccctttccgcccgacttcttcgcgcagcgtcagtcgcccctcggcaccccaattggcggacaacgcccgtcccaccaaaatgccaatgccaatttccccccgacttcgtttggctctctccgagcccaacaatcgcaaggagttcctcaaatgcacaaccaacagaacaacgcctttggcccgtctgccagtgatccgtttccccctttccttcactcaatgcaacaacaacagcagccgattttcccatttggctcttcctcttttgacgggggccgtggaccatcgtcgaccgaaactcagcaagaaaaccaattccaacagaagggccaaacaaaattcagtgaagcgagtgatagcgtgagtgatgccttttcatcaccatttgggcctcaaaggggagcgatggaacaaatgcgtgggaaacgataaattggnggtgggaaaatgatcagagaagcggatggagtgatcagaaggagagacgatgaatggatagaaaaggcgagaagtgatcggaaagcggagggggagtgaatgggaaagaagtgagcggagaagcagcagaggaaggcggatgacacccactttgat

SEQ ID NO: 15159 - DNA, 1066 bp, Heterodera glycines
aatcactaaaatcttttatttgctcagactcaacccaaattcaaaaaatttcattattttattacggtatcaattctaacaaaaaagggaatgtgatgaaaaggggaaaggaaaataaggacaaaaaatgaaaaaagggaggggtaaaaaaacgaaaagccaaaatgttaaaatgccattaaaatgtggcggtatcgttgggatttgtgggttaggatttagcaataaattcccccaattcagccaacatccacaacgagtttggcatttgcggatggattctgaccattctgtcgtacgttttgatcatcctcactttgcccatctccgcttgtatgtccatcaaagtcgtccaggagtacgaaagggccgtcatcttcagattggtcagttggtcttcgaatcccttcaaatgcaaacatttgaccccccaggggcgtctcctccccggcggcgcgaaaggacccggttagatttgattgtcccgaaattacccgtatttctgagcaggcattttcttcattgtgccttgcatcgactcctatcggaaggtattcgccgttccgtccgtccctccgtcgttttcctccattgctccccccccccccaatttcaggtcgatcttcgcgtcctttcttttgaagtcagtccccctcctccttcgtctttatttgccattttaggttcctccccaggaaatcctttccaaggactccgtaagtttcgcctccgtccattggctttcgcttgcctttctcaccccccccctttcggttaggttaccgttgcggtggatgccgtcgtttattttcggtttgtcacctccctcaaaatggccataattactcactcagaatttcaaatgccaccatttccgtcaccaatgtcgaggatgcgtcccgctccacaaaactgcttgctcagacgacgctgcgcaatattctcgggacgaaaacattggcggaaatgctcagcgacagagaggcgatttctcttcaaatgcaagtgaggagcaataataataataataattgtcatcggttattgtcattgtcaaaaacatagg

SEQ ID NO: 15160 - DNA, 2988 bp, Heterodera glycines
  unsure (1)..(2988): unsure at all n locations
tattttggttttttgctcttaaaaatcccagtcctactcctttcctactgcaaatagtgaataaaaattatttttgctcaatttttggctgaaaattatgtcactatttgtcactaattcgtactttttgcctatgtcactattttggcatttttactcactattttagttaactattttgggatttttcgtcactaaaagtcgcgaccctactcattagtctaaatttagcggttatgtttaattttgtaataaggttaattttctttttattttctgaccaatttttgataaatttttatttaaaatttatttttggccaatataattgaaaactttggcccaattcaaatatttccaatttcattttttgctcactttttctatacataaaatgattgctaaatttattattttggcatttaagccgatcgtcttgacctgttgagccgtctgaaccaaaaagcggttgaagggcagccgagaattgaagcggtcgaagccgctggcaaacagttggacgaagcgacggcacagaccgatgcccatcagcgattacaggtggtccccaaaaagtgtgccgccagaggcattttttggggacaaaaatggcttagattggcaaaaaatatacacattcttggtaattaaacaattttaaaatttggatatatggttgagtttaacaaaggaataagggccacatggacggacaaagtgactcaaaaattgccggattaccctaatctaaaaatgtcattgatctgaatctggcattggcagcaaaaattgctcgaatttttgagcccgagctggcaggaaaggcgtttcagtgatacagtatttttcanagtagagatacgataactgattaatgaatcttcagtttttaagcattaattgatatgagaagaaaattattgtatacttttctcttcattttatgaatttccatcattttcacaaaattttattaattttttatgctacagtatttttctttaaaaattcgctgtatcgctaccgtatttttcaaatgatccgtttccggtagccttttttttcttggacctttttatccattttctcctgagcatgactgtaacttggatgacgaccaaagatctttcatatgatttccgattgggcttaaggccgaacacgctgatcacctggcccaagtgcgcaaccgctttcgcacactaagcgaccggttgcgtgacagtgtggacggtgcgcgagcggagatcacgcgtcgcgaggggctggcacgcgggctccagcagatggaagaatggctgaacgtgcaggaacgcaagctggcacgcccgcgcgcaatcccgctgagcgcgggcaaactgagcgaattggtgagaggcctaaacaaaatgccgcatttgaagatctacttgcacttaagcttccggtctctttcagattttcaggttcaaaaaatgcacaaaaattgatcagtttgacaaaatgtgctattaacaaaggcaacaagcaaaagcgttaaaacacaaaaaaacactgtcaaaaaaagtcaattttggcattttttggttataattttttttttgagcgtgctgatagacgccgtcaataatttttgcaaattttaacgaaatttatttttacaaatttgctagaaatttcaagaaattttgtcgaaaattttttgttagtttgagctgatctgttcatgacagattgatctgaggtcgattgagctgttctggtttcgaatttactttatttaatcattatcaatgattagtcttagcattgggactttttcagaaatacgaagaccaattggagcgaggcgagttggacaatcgcgcaaaaacattggccgagttgggcgaactgttgggcacagaacggcacggcccccacgaacagttggggcgtcattttggcactgtcaccgaccgtttttggcgggttgaagcaatggcacgtgcacagagtgacaacctacgggatgcggtaagcatttttcgaaaaatatggaatttcgaaattattttttgaattttatacaggttgaagcctttgaacagtggcaacatgccgacgaagcgttggccgagcgaatggcggcactaagcgacgcgatagcccaactgagcgccgcggatgttgacggcgctgagcagttgggcgccgaattgaactcggtggaaaggcgcgaatgggccaagttggacgagttggccaatcagatagttcaaatgccgaatgtggaacagactgatcacctgactagaaaggtgaacaaactaagatggcgtaccattatcaaacaaataaaaagattacggtagagtgaaaatgatcaaatgaatagatatacgataagagggatataccagcagaaaaatgaagtaataagggtgaaactgatcagaatactgattggataaaattggtcaaaggtaataaataatatgagaaaatgaaaagatttgcttgtgctccccctctccgcatctttattaaaaatttttaaatagggcgttaaaaaatttttttaagctgatcaaaaaacatgattcatagacaaagtaatatttggagcagatcaacaccagaattgacagaaagtggtcattttttgtgattgattgaatgagaatgattaaattttgcttggatactgctgacaattatgatatttaacatggtataaatttaaacatcgttttagatgcgttccaatgagtcccaattggcccgaattcgtcgagatttggctgccaaactcgagagtggcgagaagaccagcgggctgcttcgcaaatttcgagaaaatgcacaaaaaattgagactgatctggcagaggtgaattttttgcttcaatcgttcttaattttttgcagtaataacagtataatttttcttggggggcggaagtttgggcaccgggaagtttgggcaccaggaagtttgggcaccgagaaatttgggcaccagggaag

SEQ ID NO: 15161 - DNA, 3426 bp, Heterodera glycines
  unsure (1)..(3426): unsure at all n locations
attttgtttcttccgctgtcgtagaatttctgataattcgtgaggttcgcattcgttaaaatcgcatagaatttcaatgagagaattcattttgagcaccagtaggcattttcatattcgttgcaagtccttatatacacttacttcaccactgtagagtgaatttttaccttttctttttatttttaaaattctgagaactgaaatacagatgatgaccactaccaaatcgacaattgacaaaaaatatacccaaatatttgaacttgaaactttaattctctcaaattctttgaacacgacaaaattaaagaattcactatttgtgtctgccacatatttgggaagtatctcgtttgagtcaaatcgatctttatatattttcttttccttaatcagataaatttgtccctcaattattaggaaatcggtaaatgaagacggcattgatccgatcggtttagtaataattttggtaccattatgatgtatccataaattctcgattgatctaatgtcaatttcatctattcgatcgtcactgattacaaaaagtcggccattaatgtgatcaaatctaaggtccccactgggaaaattcctaacaaccttttcttgactccctcttgttatcgaagtttcatttgtattttcgttttggaaaattaaataactatgatcgttgtaataaaagcacgctcggggccttaattgtcgaaaatcctggtaaagcttaacattagttggtccgctcttttctattgaattaatttcttggattgataggctccaccctgaaatcagattcctatttatcgtacataatctcgagcgatcgaatccgaactgtctttcatttaccgaactctttgtcatagtgagatacttgtcgtcaaaaagttgtgtatcagaaagaatagtaaccctttctccactgagttgaccgactatcgttaggagaacaattaaattaaacattactgacaaaattcttaactaatatatcggacatcgggcgaaccttatatagaccatcaatgacctcacaataaaggattccggagcaccgttgtgttaaaaaataaatgcaaaattgaccacacgcatctgagaattgatgttggacgatgcggtcgttaatgagaattcgttcaaataggttaagatatgaacttaaatcttcattgggataatcgcccaatgaatcaaaatattctatttctgttggcgaatttacaaaacaagcgacccagtgttcacctattgtgcccgcccggtcagtattcgccacaaaacagtacggaaaatgcctgtccttcaattttggcatcttgtcggaagcaaaaaccccgataaaatattttcgggttgtcggatgtttggatagaaatatttcaatctcatgagaattcatcatatgcttccgtcgctactgagcacacgattagcattaatagatagaattgaatcaaattcccccagaactatcatctcatacccgccgtcctttataggctcattaaactgcaccttgagtctcggaacaatgcttgtaaaaacattgtgtgaaagatcagaagtgccacgcgggatgaaaagactcctgatctcaatttttctcataggatatttggccggggtggtttgtagctgattgcttattatgttatttaatgactgggtaacatctactgtttttacataaattctaatatcgtgtatgttaatacgatatgtgtgcgggctcactatgactgcatttccggaaacatatggcggtgccataattagaaaatcatcggtgttacggtgtatgctaaaaatcacgtcagagttattaagcaaaaaattgggctgacgggcgagatcaaaattaagtttcaccattgtttcacattttgcactatcagcaaaacgtgacgctctgtttttaaagccactgtttgtataatcatcctggtcgacatcgtcgacataatagcaggacgcttcacagagaccctttttgacatcttctgaaaatcccaattcattcatcatatatgccctaaacgcatagtaaatgccggaatcataagactcaacacctgaaattgacacctttaaggttttgacaaagctgtgcccaaaattttgaatgacaccgacgtgttggtcagcttcactgtccttggtaatcggaatccaattgcttttttcttttctctctattgaagttgacagatagagaaaggttttattgagatcgcaaaactgattatctgaaaaaagtctaaagatatatggcccagattgatttattgctgaaagagggagtaattccctaatactggatttattaattgcaacgttcgtcggggggatatcaaacagcgaaaggcccccctcgagaccatcctcactcgccttgtctattttcttaagagttgacattttttaattatttgtgttatttattctatttatacctttaaatgaaacttaactgatcaaatacccgtttccgattcttattagtgatcagagccctttttcctttcccacattgttgtaacttgtcggtaaggttagtcaacccctgtcttgaatgttccctgacggcatcccctaaatcacggccctgagcgatgtcactcagaactctctgcccagcggcgagcccctcatgtcctgcactcgaggcaatattcctcgcaataggggtcaagaaacgtgccacattaccaaggaacccgaatccccgttgatacttgcttccgacaaaatattgtttctgtcctcttccatgttggggagtgataaaagatgaccaatcgaccgactcgggatcgaaaaacacatgtgtcattttttaaaatatacttttcttaaaatgtaatgtaagaatacaacttccccagtgaaatttaacgaattcaccaaacggtgtgtgaatttcaattgtaatttctgaaattcgtttcgactgtagacgatgaaaatactcggtgctatatataacttcactaatcgatcctgggtcatcgacgacgttaactattcttaagagtggagccatctggttcccgataattgtgttttcgattaaatttggtgcataaatgtatagctgccttacacctcccgtcaaatccggcatataagtcgcctcttccgcgtgaaatagccttgtattcttaaatccgagcacataggctaggtgttttgacaaatctatatgggagacagcagcggaaagatagacaataaatttttgatcaatgctgtcgtagttaaattgaacatcctcattggctaatctctctcttttttgtggtcctttctcagcttcagatacttgtctatttttcatatctttacgtttaatatgctcaccgagcgcctcattaagnctattcactatcccgctaaaacccttttccgatt

SEQ ID NO: 15162 - DNA, 1833 bp, Heterodera glycines
aaattctgacaattgctcagctgtttctgccgtccgctgttaccccttcatggattcgcattggcgctgccttttcccatttgttttgcgacgggtaataaatttccatagagctcaaattgttctaaaaacagtgaagatgcatttagaatatttcatcatgttcatgttatattaagttactatatctaatagtctatgatttgccacctctccgtcgtatccaccaattgcttgcagcaaatcgccattggtcactaatgaaacacgagctctgcacacacccatcggcgcaatgtacgaccattgatcctacgataaagcacataatgtgaaacaaagacaaatgaacaatttcaattcaccatctccggatcgtacacttccgctgtcgacatgaattcggtgttgtaatagctgaacaaaaaactgactaacaacaaatttcaaaagcacttttccggaatcggattagaattaaatagccctaattgaaagcaactgttatttaatgttgtttttttctttacccgccaaccgcataaattttgttttggtatgttgtggctgccagacgacctacgattaagtgacaattattttttgtccgaatttatgtcatcagctcacatctcggctgttgcatgggcgcaactctttcccatcgctgcgagatggggtcgaacctctccacggtgtcgaaaattgaaacaccattatgcccaccaatgacttaaacagagatagcgtatgcatagtgaacagcaaggaatgagcataaggcagcaaacccaaaaaatcaatcgacccatgttttttttacggtcgttgccccatacaaacaaaatcaaaagcttgggttcgtccctgctgacttagaaaaaaagatttgaaaatgctcaccgtaaatctgtcctttgaggacagccgttgccgcagcacatcgtttggttagcatcggcggacggacgaaccattggttctttcggatgtcaaatgactcaacggaatccctgaaattgaaacggaacggaaatgtattctctacaagccaattcgaaatgcgcacaatgcgtggtttccgtcgtatccaccgcacacaaaaatgttttctcccaaagtaagcgcacacatcgcagaccttcgattgagcattggagagagctaaaaaatttattaactgtaattaggtaatttagaaaattgacgcaccgtttcccattgatttgtcctcgtgtcgaaaaccttaatttatttaattacccaattttatttgtttagtgtgcttaatgttcgttttttccatctatccagtgggtctaaaagttcacttcggttttttttagtcgttctgtgccgttgtaaccgccaaccgcgtaaatttttcgatcgaaaacagcaacgcctattctataaaaaattaaatttgtttcggaggaaatgtatttcaaaattgccttgtcctttgggatagcattggctttcccaaaatccattttttggtgggcgggtcgaaatattcgacaccagaaggcgactgctgcaactgattgattccgcccatggcataaattcggccgggcatatccgtacaaatgcgaacggacattttgaaaggtgtgctgaactgcgaccgacgctctaaaagacattgggaaataaaaattagcaacagaccaatcagagcaccgggtacgagatggaaattctttgcctcgtcatcaaatcgcgacattccatggatgaatggagcagcgggtgattggacaccacgtcgacgataaacgcgggtttgagaaagggcatacgaatggtggccaaaagactgaaaat

SEQ ID NO: 15163 - DNA, 2472 bp, Heterodera glycines
  unsure (1)..(2472): unsure at all n locations
gcgggttgagaagggcatacgaatggtgccaaaagactgaaatgctagtgatgcgttnggattagaatatttatntaatgcacgtgggaccgtggagcaaaagtgtggcgattcattgggtcaaaatccaaccaacgggcgagggcctcgaacacgcactcctccgagccgacatgcaaattgtcccagtcgagggtttggacgagtgtttggaaatccaattggagaaactcttccgacttggacaccgactcgaaaaaacgctgaataaaactttcagtgtcgagcacagctaaagagacgagtgattacaatacaatttgtaccgattgaactaaccctgttgggcattgtaaagcacggcaaactttcggatagaaaaaacattttcttcagtgatatgcgcttttagaatttcggagcagcgattggagaggacggagagttgcaaataatcctaaagtgacacattgtcagacaaataatgcaaatgttgctaacttactgcggccttaagcagtctttccatgtttcttgaggtaaattttatacgaccttaatttggatgagaaatattattgggtatcaaaacaaccgaccagtgtaaataaaatccaaaatcaatcccattatttccgcgtcaatggctgaaaaaacggcattatagtcaattaattttgctttgaaagtctctctcaacatactattcatttggactgaatcggaatgcgcttcgaccatttccgagccgaacattttcatgaaatacggcactgttgctgccaaaatgactttgtgcgctttgaatttgatgccttcagtttcaattttaatgtcacacattttgccggataagcgcaattcgttaaaatttccatgagctgaaattgcaagttcgcgggaacagtccaccaaattaacatcagagtcctcttggtcttcaaaagcgattgaaatgtcaagcatagaagtcatattctgtttcctaaaggaaataaacaaatatcgcttgactaacttttataccggggaatagctgaactgattttaacgcaaaacaattaaaaaacgccacgccaattcaaaccattgcagatacatacaaacactcaactttattatataagtagggcttcgatttttaggtgctaaaaactgccaaaataagtaggttttaggttctaaaaaacccccaaaataggtgctaaaaatgggaaaataggtgccaaaaagttccgaatttaggggtgtaaaatcgaacattttcatcaaaaagcaaaaatattttgccaagtcattaaggatatacataattttcaaaatcaaaaattatcgtcaagaaaataaaataaataaattttggagataaatttttgagaaatttttcatttcttaggggcgcatttttgaaaattttctggtcgattcttagggatgtattttttgaaaaaatttttgggtcggttcttaggggtgtatttttcttttttattgcatttttgttaacaaattttgggcaaaacgccaaaataggtgaaaataagtttttttaaatttttttaggttttttaggtgctaaaaataaaaacctagaaaataggtgctaataactcgaaaagtagcttaacaacagcccaaaaaaacatgtttttcgtgcgtttcaggccacggggagctcaggaaaaaaatatgtaaaaacctaaaaatcgaagccctataaatcactaaaagttgcatccctacacataatgcgtttttctttcatttgtgagatcgtttcgcggccaattcgacgcgttgcgttgcgttagccgtggactccgttcggctgctgcagctgcggcaccgtcccctgcctgctgattgtgagcattgtgcgtgcgcagccgcgctgctcgccccgtccgttccctttcgttcgcatttgcccctccgttggcattgtcccccgtcttttgccactttcatcgctcctctttcgctgctgtttttgctcctcgtcctcctccgcctctctttcatcggtcggaaaaatcaaactgaacgacgagtcgcgactgggggaaggccgagagaacagcgacttgctgagactgctcacggccggacagccgccgcttttcgtaagccgacggatcaaacgccgcggggggaaacctgtgggaaaagtcatttctgaacaaaataggaagaggtcgaaaagcagaattggcaactttaatggccggtgattaattaattatccgtccgagtgaccttcggcatttggccctccgtccgtttgcaccattccgttcgtttctaccgatgactgtctttggctgaagtcgaccagggcacagcacgcgccgttctgaaatttatgaaatgtcaatgaatcggagggccattttcatttccgtctttttttctgtttttcccttcattgtcttaagtggctctcttttccctttccatcttttccccctttcc

SEQ ID NO: 15164 - DNA, 2456 bp, Heterodera glycines
tcccgggatggaaattttgggcaaataaaccccgtgaaagaacaaaatcgttactctcagagtaaccaagtcgaccccaacatcgataatcggcgcagaccattaaaagtctcgacaatttctcgtactcaacgacgctacaccattcgccagagctaagaggaaacgccggagcggacgaagtgaacgccttttttcgccagtcggacgcagttagcgaagattggcccaacgaaaagcgcttaagcgcattaaaatcgaaatgttcgggtagggcagaacgcgcatacaattccgccgttgccaataatcccttccggtatgaaaatatccgaagagcgatgaagcaacaactcgattcaactgatgcaaagtcaacgtgtgcttttgatgagttgatggcaggtgtccgcagaaggaacggagaaagcattgacgatttggcggaccgagtctcatcgttagtgcgaagggcctaccccgggctcggcgaacattcatatgatgattattcgatccgacacctcatccgctcactcaaaaatccggatttggcactcactaaactcgacatgatctttgacgaattcgtggccatggcagctcgcgcggagatcacacaaaaatccgcaaaagcagccgagcaaaaaaacacaaattttcgccaaaattttgatcagcgtcggcaaataaattttcgaccaccgaatcagcccgaacatttttcaagacgaaccaacgaaaacgaaagacagaatacatcttttggcgttgtcaaatgctacaattgcggccagcaagggcatatttctcgcaattgtcatctcccacggcgcgatcaatctaattttgccccacaacaatacaattcatcggcaagaggtgccaaccgaacccccattgcaaatgattacaggaacccgccacaaagttttccgaaccgtacccaacaatcgcgtaactttttgcgccaaaactttttggtagaacaacctgatgattctcctgcagtgtccaattcaaatgtcttggttggtgcaattagcactgcaagtgaagaagtgtccaagttgtttgaccaatggacggaaaataagaattgtagaaacgcggaaaagaacggcagtgctgttggaaaaattatgttggtaaaggtctcaattttagagcaaaaggttgaagcccgatcgacaaattgcacgtgtcatagacataaatggaaaagaggtcaaatgttacggtgttgtaactttgcctgttaaaaggcaggaaaggacagtgcaagtgcgtcttcacgtagctcaaacatcgtttggatacgatttactattcggaaccaactcactttcggagttagggttcaaaatttttgacgagttgtcaaaaacgatggtagacttcaagcaaaacgtgaacacccaaaactcggttcatgtgattttcaaaacgactttaatgcgttagccactacacttgttgaaatgacaagttcaacgaagaaagacaaagaattggcaatttttccatcaaatgacagaaaaaaggtgatgagaattgaattgaatgattcaatgttgttcacattgacaggcaaaaatgatgaagaccaaaattcgtccaaatctaaaagtgaaatccaattaaattgtgcgaattcaaaagaattccagcaaatctggcacaaaaaaacggacaacttacgtggagaagaaaagcaaaaattgcaaattctgatcacggagtttgaagacatttttgctgtcagtgattgggagttaacacagactaatttggtccaacatgcgatcgatacaaaagacgcagaaccaatccgaagtcgaatgcgcccaatcccatacgcataccgcggaaaagtggctgaaatggtccaagattatatgggacgtggtctcattcgtccatccagctcaccttgggcaagtccaattgttcttgttccaaagcgtgatggtactttgcgtttttgcgttgattatagaggtttaaattcgatgacgatcaaagacgcatttcctcttccgaacattgatcacactcttcttgcactgggaggaaagaaaattttctcgactctcgatttcatgtcaggctactggcaaataaaaatggaatcagaatctgttgaaaagacagcatttgtaactgagttcggtcttcatgagttcactgttttaccttttggtctttgcaacgctgttgcgacttttcaacgatttatgaacaaactttttgtcggaatgattaatgattttctgtttatttacatcgatgacatattggtggcttcagaaaattgggaacaacatatacatcacctacaaaaagtttttgagcggattcgaagcgccggactaaaacttaaaatcgaaaaatgccatttggcagcgcggataatctcatttttcggtcatatatcgaggaatgaagccattaaa

SEQ ID NO: 15165 - DNA, 1662 bp, Heterodera glycines
  unsure (1)..(1662): unsure at all n locations
aataaaaatggaatcagaatctgtgaaaaagacaccatttgtacntgagttcggtcttcatgagttcactgttttacctttttgtctttgcaacgctgttgctactttcaacgatnttatgaacaaactttttgtcggaatgattaatgattttctgtttatttacatcgatgacatattggtggcttcagaaaattgggaacaacatatacatcacctacaaaaagtttttgagcggattcgaagcgccggactaaaacttaaaatcgaaaattccgaccacaaaaaagcaacttcagtctttccttgggtttgtgacctactacaggaaattcatccatggatttggaaccttagccgctccacttttccatcttcttaaaaagaattctccatttttaatgggcgaaaaagaaacgcaaattgtgtcggcattaaaagaaaaaatagtgcaggatgcgattttgtattttcccgacttcgcagcagcaatcgaagacccgaaaaggcgctttgtcattttaaccgacgcaagcaaacacggcgtttcggcagtcctttgccaaaatgatgaaatgaaacgcttacgtccaattttgttttgcctcgcgtcaatgcaacaaatacgagagcgattactgcccgacagagctagaagctttggccattcgctttggcaccgaaaatttacccaattcataacgggaattccgacgagagtgatcactgatcacaaagcacttgtccccatgttcgggacgaaaaagagacgggcaacgcaagaattgatcgttggcttatggaattaaattcccggtatcagttgaccgttgaatatcagcccggtaaatcgaatgtcgttgctgacttactttcccgttatggaataaattctgactccgaaaacgatcagcaactggaggaaaatcctaaagaaacaattttggttggaaaaatcgtcgagggcgaaaagtctcagaaagatggaagctttttagagttgggaggtcgaagtgattgggtagaagaagttaaaaacagtgaaatgaagactgtttatgaatttttggagaaaaagacgtgtccgcatagtcaacgagaattccaaagtctaattgacaaaattcatcactttacaatcgtcgacagacttttgtatttttgcgaccctaaaacttcgtcgcaacttttgtttgtccccgaaaagtttcgcaaagagctaattgcatcacggcatgaaggaaaatgtgctggccatttaagcggaaagaaaatccatcgccagctttcggagcactatttttggccgaatatgttgggagattgcgtccgattttgtttgagttgtcgaatctgtgcccacgcgcgcaaatcgcgtgcaaatgaacccccactacaaacggttaacaccgtcgaaccaatggaattggtttgcctcgacattctctcaattggtccatcggaatcaggaaatcgatatctcctcgttatgattgaccatttttccaaataccttgtagcagtcccaattcctgacaaaaacagtgaaacggttgctagggcatttgtcaaaaatttcgtgcttgttctgggttgtcctggtcggcttcacagcgacaaagggggataatttgttaacgaaactttgaatgaagttgcgtt

SEQ ID NO: 15166 - DNA, 1174 bp, Heterodera glycines
  unsure (1)..(1174): unsure at all n locations
ataaatttntttttacagtagtaatagaattaggataaaaaagcgttcagtgattttctagcaattaccagaaggatgaacaggataagaagcattgaagcgataaagagcgttaagatacaaccgaagtataaacggggcattaagagcaattaaaatcaaattaaaaccaattgaataaaataaaataaaaattcaaatcaacaaaaaatttaaaaattaatcaaattaatcatttatttatattttttggggttggtctaaaacttccgaaaaaatcgattcgaaaaaatgtttgaaaagtcgatttaaaaaaaaatttttttttgcgaatttattaagaaacaacgaatggctgttgatggaagaaattgggaaacagttggaacaaagtctgggaaacctgatgaatgtgaagctttttaacgcattgtttgaccaaacttggccaaatttggcctttttttgcactaaagtagcgcaaaacattgagacagagtacggcacttttttcccttcatgggcatttgcgtgcgatgtaatggtcaggttcaagttggagcaggaaaagaccataaaaaacaacaaaaacaaaacgccaaaaaggggaaagggacaaattcaaaaagaaaacaaaaaggaagtaatccaatggacagaagaaggaggacaaagataggaagaaaaaatcgaagacaaaatgatcattgacaagaagaaaaaggaatgatttgaaaagttcgacaaaaagactagacctggatttttttgaaatttgtctcaaaatgcaaaaaaaagtaagagaaatcaattaattgctttcgaaaatcaaaaaggatctaattgacaataattaggggggcttcgttttagctttgcctatttcgggggggggggggggggggggggacagtgtcgatacgacagtctataatgatgtggacacaaaataaattagcgaaaaaaattgcctctacaatcagtggtgaaactgaaagagaaaaacttccccaaaaaatcggagcttttccgacggcatcagctgcatttccaacagttcaacagtataaataaatattaggcaaatgaaaaatttttttccttcctctttagagagtgtctaaaaatttttgttgttaatattcagaaaacgtgttttttttactgacaattt

SEQ ID NO: 15167 - DNA, 739 bp, Heterodera glycines
tggtggtcccggttatatccggtcgtggacaacgcttttgcaaaatgctcaaatttttgtgccacatatttgattttcagatcgaaattcttatttcaaagtttttgatgacatactcctatttataccctgttcggatgagcatatttgaattattatggcgatctgtccattcaaattccacgccatttttgttgttgtcactcgcccataaatagacgatcattttctccctcctggtctttcccctcattcattttattttgttattttcctccgaccaaattgtcttcgcttttatttattgtacgtcaataaacatttatttattgattgtcttccttaaaccctcggaccgaacataccccatattattacctattaaatttagctaaatatattaaatgtttattttttatttatgccattatttttaaaaccgaaaccgtcaacctggtggtcccggttaataaccggtcgtggacaacgctaattataattaaaaaagaattatttgcctgattatttttttttttttttggttaatgaggctttgagaaaatataattatttgccaaagtcacattgagttttatggaatcggtaatcccaagtgtcctgattttccaatttgtcctgaatctaaaaaggcaatatgaaaaacaggaaatgccctgcttttttcatttcatcctgtaaaaatgggcgccataaatgccaagagtaagaaaaaaaaatg

SEQ ID NO: 15168 - DNA, 2081 bp, Heterodera glycines
atgtgtgccaccaaggatgtgatgtcttggctcggcttttgtcgaatttgaaagcagtcgaagcggcggacgaaaagtgagcgggtttcggcaaacaaatccttgagctttgtcagcgattcgccccatttaacctggtccggttgggacgggctaatgctgtctctgtatttgttatactcgtcgtctcccaacttgccaagaagaagccgaactttggtctgttcggggagttcctttccgtcctcttcaataagcactccaaatcgattaaaccaccggtcaaatgtgttgccgcattccgaatcgtagtggaatttggtgatccggttgtccaaggagctggccagagtcgcgtgtgccagtgaggatgaggccgtgtttgcaggtgccgcatttccggcaaatcgtgcaaaaactgcgtcaagcacttgctgcagttgggtggcgtccattggctttgactcgtccgatgatcagcaattaaccacgcagagtggctcctcacccgcctagggactattggatgtcgaaattgaagaaaaccgcgtcttgcggaacctcacccgcctagggtctattggtttttgtcgaatttaaccgctaaatttagcggacctcacccgtcttgggactattggttttgttgaggttgggttgcagttcggtgtgtcttcgaatgggtgaagcacggctgctgactgcgccaatgttgtgtctctactttggacacacaataaaataataaacacaatttatgtcggaggagaaatgcagtacaaaatataaaatgtaaaatagcaaatgaatggagaaggaatcaagtggggaaggagggagtgctaaatgaataagggggagggattgacacgtcacaacattaatcaataatcgatgcgcgccaaattcaaattctttaacactccaacagtttcataaaaaaaaaagtttgcaaactgaattcgataacatgcaaatataaataaaaaataacaaaaacattagcgtacgctgcacatatactcaagaatataccatgagaaactaaattttatataaacaaaacaatttattaattatttttcaataaagttaaaaaaaattaaatataaattttacacaataaataaataaaagtttaaagcactcttcttatttaaattatttcagaatttaatatattaaagcagaaataatctaaaaataattaaaaagttttaagtgcaaaaataagataaacaattgattagacaaaacttagataatgaacaaaaatgaatttaaaaaaggatattaaacgcatcataactaacagattgattacatatttttgcatacaattagaaatgaaaaataaaaatataaactttattttattcataatatttaataaatattcacacctgacaaattaaacgtcgacatttgaaatgttttgttaatggaatattaataataattcaaaactgataattggttttactattggaaaatagcattgtggcttgtcaatttattaattctaaaaaaatataaatattgatagaaaaataataggaaattttattttattttattttatttaggtaaaaaaatagaagaaacccgcaggcaactgaaagaatatgcaaagaacaaattagaaaataattaaaagtattaatgcaaaaaaaagaaaaacaattagataatgaacaaatgaatttaaaaaaaaaacaatattaaacacatcataacaaacatatttataatttattttagcataaaattagaaataaaaataaaaatataaactttatacacaataatagaattttaattttttaaccatcaatcggtaatattgcacagcgagtaatatttaaaatcataaatacaattattttattaccaaactacaattagaaattaattgatgcatttgggggagggtctgcgccgtttgttccgatttagccgtcgtcaattgcccaatttgccgctcaaaaaatcgcaccaaaaatactccgcaagtttatctcaaccctgggtaattaacccctacacttacaataaatgtgcgagaaacacaaagaggaggg

SEQ ID NO: 15169 - DNA, 2543 bp, Heterodera glycines
  unsure (1)..(2543): unsure at all n locations
aaaattacattaatttcacgagatatttgtacaattaatatccattntaataaaaaaanatatataaattatttttaattaaaaaataaatcaaatataatgtttatatatttcaactttcaaaaaacgaatttaaagcataataaatagatggaaccatggttgaatgccgtttacttatttagaaaattttttatcataaatttaattgaaatgcatgataattcattataatattttattaataattttctttattttttgcattaaaatcgaagaataatattgagtacacctagggggactattattcccttagaatggtatttcattaataaaaatattatagaataaaatattattgaagaaattataaaagaatttgctgacttatttaattttaattttaaaaatattgtaaaaaaaactttgataaaggaatagtaatattaatttatttttaatgttattctttatcgtataatttttttaaataatatatgtaaatgacagcaattacatttaggtatcaacgatgtgcgcattaaaatgataatgtatttgtgtgatttttaagcatatgataaaagccaatttatcaatgtgccgctgagcgatcaataactttttttattaaattgtctattttgccaatatgtattcttcgattaatcattttcgtttaaatcaatttcatgtttttgcaaattttgctctttttctgtaaaaaaataaaattattgtactctgttttaatttttttaatttattgttttcagctattctatataagatcataaattaatttttcaagactttttttactttatctttttattcattatttttgggttttttgcgagaaaaaattaatacaaatgcgtaaatttttcaaaaaacctgaaaaaaggccaaacagcattttataaaaatcactctgtcttcttaaaagaagcaaatactgatattattcatattttagtattatgttacctttttataatgatgttcgatatttattttttattatatgttttattcatgataattttaaatgaatggaatttgagttaaaagtattcaattttttattttgttatagttgatttaagttgatcaaacaaagatcaattacacgcatttatactttaacttgaattatttaattatacgcttatattttcaacatgataattaagaaagtttattcaaattaagaaaatatgcagaatataaattcaaaaataaacaaaaaaggcggaagtcaaattctcatataaaataatagtagtataaggtcccaggggccggggtccagaccactgcccctgcttaaaaaaacacccatttttgttcttcatgattttgtctcagctgccggggtccagggattcgccctcataaagtaccatttagctttgttacagatgaccataatttatataaagctcacactaaattattccctttcattaaaacaaaacaagttagattatgagagtttgaactttagctctaactgtcgaactcgtcgtactaacactaaaccaccggaatagctacaagaacaattatttaatgaggcaataaaattcgatttaatttcatgtttaatgtgattaaaaaatattaaattaatatcacatatttaaaaataatcacaattaaaattattttaaaccttcaacaaaaacaaattcccaactccaaaatcacatgaccgtcacccccttttaacattttttttgcttctttgccctattcttcttccttttcatcttcagaagacaaaatacgtcttgtccccgttgaagcatgaacgtcactgtcagatgacaaagtgtcatctgacagatacttcttttttgatgtttgagtcaggccaccgccacgaagccctggaggcttgggcggaggtggtagccgcgaacacttgagaattgagggaatagcctaaagcaaaacatcatttgaacccgaatattttgtaataattcagtttttttgagaaagggatgaaaaattaatcaagcctaaaattaactatgttacatttttgggtgttatagtgacaaaaatccgaaaaaaacatacagacaaaggaagatctgtgccatttttgccaacgttttcaatcacaacaccacgaccaccgtttgcgccaactgtgatgggatttttttattttttttgtttttatttttaatatatattttttaatgttatgttggacttttgacccttatttttatttttatatttgtttggcattatgttcatttatttgtgactgttttttcccaccttttccttcattcgaatttaattgtattaattttatgatgttgtcttctcaaaaaattgtttgtgtcctttttttgtctcttttatttaatttggaaataaataaactctgaaaagccttgactccttctttgagttcccaaccaaaagtcgaagaaaaatcccatcgttaaaaatgttatttttccgggcggggggggggttattttttattttattttaagaagaantataaagag

SEQ ID NO: 15170 - DNA, 2567 bp, Heterodera glycines
  unsure (1)..(2567): unsure at all n locations
gaggcgtgcagcgtggacatccaaagagtgntgcagagatgtgccaccggggcnagagtagaagtgggcaacatattaaaagattattttaaaaatttaatatctttttttattaaaacaaatttaaatattacaatttaaataaacaaattttattgcgattttttaaaaatggaataattattcctaatcacttaatatatcgttttatttaattttgatgttgtctgcgaatttatcagatcttacaatttattgtttatctctaaattcattaaaaatcaatttccaatcaataaatcaatttcgcaatgcttttttccctttctcagttatcatgtgccttgtggacgcggcacggaacggccaagtgcatttgtccgccgcatgtcaaacaaaactgacggatcgaaacaaactttggcaaatggcacacgacgagtaccgaatggcattgccggagacatggtctgaggtaaagacgtaaagacaattgtggcaaaaaatgtcaaaaaaccgtttggagtcattttactcataaaattctataagttttttttctaaaaattatttagcctcaattaattcgttcaagcatttaaaagataaaaaattgttcaaaattataaatattttggtttttaattaaaaagaaattcattagcttttaaatatgggtcaattatgataagctgtgattgaaaaaaaagattccgccattttaaatattttgcgtcgtttatttatttaatcctatataataaagttgagtgtctgtatgtttctgccattgtttgaatttgtgtggcgttatgttttgtttttgcgttaaaaatgagtttgaaaagagatgaaaagaaattgttttgaaaaagaagagaatataaagaaaagagacgaaaataaatagttaagaagaagaagaaggcaaaagaaatagcacagaaaaagaaggtaaaagatttctcctcctaggatgtagaggttagagggagggatggtgggaaatagtgcactgtatgactgtctgtctatgcgggcagcggcagatgggaggggcagacagtgaacagacgcgtgctgctgtggctgctgtgcagcagcagtctgttggacgcgtgcgtggtgtgtgggagggagggagtggggaaaaagagagattaagtggaaaagtaaaagaaataagagaaaagaaatgaaagggagagaacaattgaaaatttgtctcgcatctcttccttatttacatcccattttttattttaataaaagaaagggaaatgagagttttttttatttctgttttcgcttcagtgagaattttcctatcttatataataaagatgagtgtggttatccgccatggtttgaattggcgtggcgttttgtatttgttttgcgttaaaaaatgatttgaaaatgaaaatggttttgatttttcaatttgttttgcaataaacattcttaaaattgtacctatttatttgcttttttatgtatgttcatagtttattaagttatttgttatataaatttgttttttgtaaacgaaaaaatttatcagtatattgtttgagtttgatttagtggttgttgtttgtttgtttgtttattttgtttttgtgttctttacgtgaaataattatgtttatgcttaatgttatttgaacttttaatgaaatagaaatgcatatctttggtttgttctgtgactttcgtgtgagacactaatgtgtgtcatgcttttgaaaaaacattagtggtttgttctgtgactttcgtgtgagacactaatgtgtgtcatgcttttgaaaaaacattagtggtttgttctgtgactttcgtgtgagacactaatgtgtgtcatgcttttgaaaaaacattagtggtttgttctgtgactttcgtgtgagacactaatgtgtgtcatgcttttgaaaaaacattagtggtttgttctgtgactttcgtgtgagacactaatgtgtgtcatgcttttgaaaaaacattagtggtttgttctgtgactttagtgtgagacactaatgtgtgtcatgcttttgaaaaaacattagtggtttgttctgtgactttcgtgtgagacactaatgtgtgtcatgcttttgaaaaaacattagtggtttgttctgtgactttagtgtgagacactaatgtgtgtcatgcttttgaaaaaacattagtggtttgttctgtgactttcgtgtgagacactaatgtgtgtcatgcttttgaaaaaacattagtggtttgttctgtgactttcgtgtgagacactaatgtgtgtcatgcttttgaaaaaacattagtggtttgttctgtgactttcgtgtgagacactaatgtgtgtcatgcttttgaaaaaacattagtggtttgttctgtgactttcgtgtgagacactaatgtgtgtcatgcttttgaaaaaacattagtggtttgttctgtgactttcgtgtgagacactaatgtgtgtcatgcttttgaaaaaacattagtggtttgttctgtgactttcgtgtgagacactaatgtgtgtcatgctttga

SEQ ID NO: 15171 - DNA, 3077 bp, Heterodera glycines
taagcaaaatgtttgactatttgtggagacttttgttctttccgtttgcttttctcaaatgccattcgatttgactaccgagtggaggggtgtgagtcatcagaacatcgaccaccggcctcggctgtaccgttgggattttcatccattctttgtggatgggaacgcctcgtggacgatagaacgaaaagacgggcaaaggttgccaagaagagccgaaaatgtatagacctaacaactgcaatagctacaaaagtgatatagaagataacataagcataattattgcatgagatcaatggtgggtggctctgagcatgtcgatgcacatccccgtgggtttcagcaaatgctcatccgaccattggtcctcccgggctttcatgcaattgtcaaatgagtcggaaaagacaagtcggagattggagaggcaaagttggaaattgtcgtatgccttggccaccaatgaacgcactccttggtcggttatctgcaaatattatcattttcttaaattgaatgatgccctaaacaattccctgacatgttcgtatgcttttgtggacggctcgtccaaagtgttcagtttcaattggccaagttcggggattaatgtcgtttttgttccaatttagcggacagttgagaaaaacgcaattcttccatcacatcgtccaacttcaacatgagtggtttcaggttcaatttgaacaggttttccacaaaatgtttcggatggtccgtcggtggcatattttactgagatttttgccaatttatacatttaaattgccattttcactctctcttggtagtcaatggatcaaaagaggcgctacttctcctgaggggtcaattccttctcctatttttcgaaaatttgtgcgtcttccggcgccgccgcttcttgaacacgtccacccagcccatcctctgacacctgacaaccgaataaaagattttcagagcaaaaaagcattaatatgcgactagttttagttttaacctctcggtagtccctcgtgcgcgtggtctcagtgatggcggacccggtaccggcgaaagagcctgagaaaaaattgttatttgttttatttgtttagtaatttacttgtcaatttgttcgtccgtcagtgttttcttccgatcagttaaattaccagcttaagtattttatgaagtcttaatttttaaatgtagttcttactcgtttcaacctcctcgcattgttcatcaaaacttgggtcggcgcgtctgttgcttgttggagtaaatttgtgattgcctcgtctgttggtgccatttcactttaaatgtctaatgtaaatgaaaattttaatatgtacgttacttgtattgccacatttcgcgcactttcgacgtcttcctcgtgtccttgcgcgttttcaaacatcaatagttccaccgcacgtccagccataaattgcacaatttgcgcgaccagttcttcatctgtgtagaatccttcaacataatgccaaaaagtttcgcccaaattgcctccttgggctcgaatcgtgacctattaaagaattgataatgaaaaaaacgaaattcaacttttccgagcataatttttttgtctattgcatttagctaaaaataaagttatacagaagcttctatagaccttaagcttttgtttaataccaagaatataggtattgaccaagtaagaaaaaaaattatgacctaagaaactgggtatggtcattcatgggacgcataatctgtcatgggatgcataatatgacatggaacgcataaaaccgactagaactaaaccgacagttcttcgttttaacaccctatgcatccctagaaatctactttggattttgccactaaactagggcatgcttattttggcatttcactcttattacagcatgaaaaatagaattctcgtagaaaatttcttttaaaaaaaattttaaattttggtaattaaattactgaaaactacttactctgtctaaaatgtcgatgttgttttgcccatattttattaaataagcgtgagcgcactcatggtacgctgtgaccaacaaattttgcactccttgcaatgccggcccgagcaatttattgtatttgcgcttgtaccgtccaaatctcctacggccgtcaacttttccatatctagcgaattttggttttcgttttgttcttgccattgctaaattaaaacttaaagaagaaattcactgcaattaaaaaaaaagtaggcagatgaaaacggtaaaaagaaacagccaaaatattcatgttgagtttaattagaacagaaacaaacaaaagtaaaaatgcagttttaggaattgaaaaagaatttaagtatggttaatgttgggcttaacgtagatacagtcaacaaaaaaagaggaaatgttaaaaaatggcgttaactaaatttcgaaccattttagtcggaaaataattatagatcagatatatgtacatttcatacaaggcatagactaggcctgttttaggcataggcctaagtcaagcccagtgtgacaaatcattcaacatgccaaagtggggtattttgtgttaatttaaaaaagacagtatacatagttattttttcgttattttgacaactaaagtaaatcaaatgatataatttgaactcttttaaaaggaataaacgtttagcaattgttgcacaaaagaacatttatgtgtaaaaacaagggacctcgtagaaccgggagttcccgtcccgttcccgctcaactctaatctaagctattacctttattttttgtatttacctattttttaataaaatttttaccggaaagagctaattttcgacggtggccgaacgtttcgtcactgaacctttttggagtgtctgatcagtgatcaccgtaaaaaatttttaatggacgtcaaaatttctcgtttcccaaacatgagtgcctaaatgtaattccccaaatgctatttccaatagcggtaaaaaattcttgactatctacttttacatatttctgtaatttagctatggaatctgactcatcgcctcaaaattggtctttcaa

SEQ ID NO: 15172 - DNA, 2261 bp, Heterodera glycines
tgtttttggtcacgagccgatcacccgcgtcatcggtcctttttccacaaatgatataattttaccaataataatttttgttttgattttttaaggttgcaccccctcggacacctcaccaatattcgacgacatttgtgagaagtgttctaaagttagttcgtggattagtttctccaatgctttgcttctcttcaccctcttccccctcattttcagtttgatttgtcatttgcggccaaaaacaacgatggaaaaatactgggagttctgttgaatgcgcccttcaaattggaaaatattcacgaaagctacagagacattgggcgcatgccgaacaaaaaggaattcggagaaggttaggcaacgtaaggcggagattgaagatgaaagcaaattgttaagagattcgcaatggcccttttccatctcaaaatgccaatcgaatccacgccattctcactttcgtgaatagtcatatcgcactgttgccccccgaagaggatatcaaattagtcgaattgcaggccatggctgtaggtccaggacacgccaggtaacgttgtgttgaatgccaatcactcgctcgtcaaatgcggcactttccgctccttttcaggactggcttgggctccggtatgctccgtgcactcatccaaacggcttccgcaaaaggctattcccatttgttcacctgtgccaccgccatcgcctctcagacggggcttaaaaaagtgagttgtctgaccagcagtgatcactattttatttttccattttgaaatctttgactttacagtttggctttgacgagatcaaaactgtccctttcaactcttttctggaggacggagtgccaatcttttctggggttcacgacaacggagtgggcgcaaaacttgtggcattgcatatctgaagtctgtgtggaaacaaatgttaattggcataacacaattgatgatgattttaaatagaatcgtcaaatatgcaaattgtttgtaatatgtgcagaaataataaaacccatttattgtatcggtgtgccttataaagaatgagctataaactgattagccaattaaagttaaaaatatgactctggcgaaatatgatactaaaaatagcaatggcggttgtttttttggtaatagttcagtttgtccccccccccttttcgaaatttttttatgttttcaaaagtcataaaaacactttttatggggttttcggggtcgctgatcacgaatccggcgcccatttagaccaattcctaatcccggacccgaattcgaacaaaaagtcgaaaatttaaattttcgattttcacatttttggttcaaactttgtttaaatacacggaaacgaactgaaattcaacattgcttcaataaaagatcatttgagccatttttagaccaaaaatgtgaaaatttgaattttcgactttttgttcgaattcggctctgaggttcgaaattagtcgaaatgggtgccggattcgtgatcagcgatcccgaaaagccttggaaacatgttttcatgacttttgaaaacacaaaaaaaattttcgaaaaaagggggggggacaaactgaactattaccaaatgctttaattattatattattttttcaatatcgcacaaaatcattcatttaacaaccacccacatctgcaaaatctaccaccaaaaattgcacaaaaaatagaacactcaatacatacctacaaacaaaggacgcttgcataataggcgtacgacaccttatgacatttgttatgaccaatgtgcaaaaaaatgccgtcaatttggcagattggcattattgacacttggacatttaacccaaagttaaaacatcctgataaatttagatcgctcggttaggcaaacaaatcactgccaccactaaatgcaaacgcgtgaaatacttgcctaatttgctcccgtatgtgctgccaccgcccgaggaaatgtcttactatcctcctattgacacccatttacccacgaaatatctgaatatatgtctatattaataattatatatattggcctagataatttacaacctcctccggcaaaccgaaaagaaacggctgcggacagagctaatgattcgcattgtcactcgactaatcgccgaatttgacgcactatgatccagtcatgctggagcatgtcctaaaaagacaggaatacacacacagcagtgtcaaaaaatatcatgttattttataaagtataaactaaaaacc

SEQ ID NO: 15173 - DNA, 3260 bp, Heterodera glycines
  unsure (1)..(3260): unsure at all n locations
caattcctacaatagcgccaattcaaattgctcagccgcctgtccgtgatcaagctcctgtccgtgaccgcacatccgacccagtctaaatctcctcgtccgcagtgtcagcgcaagaagccaattcgctattcgcccggctcattgccacggacggtctttccaaaagagggagatgttggatgtgttgatatctaatattattaagtttcgacacgacttcttttattgattagttatttgttgatgggtcctctcccatcgactcattcttgacatttgtgttattttacttttcggtgtttattttcggactctctaatttgagtccgtcgttattttattattattttgtgattataattttattgtttattcatttaataaatttatcttgttcgtgtggtagcaaaacacaacaggtctcataaatttcaaaatctttgtcatccttttgaacaattttcaaagctttgttcaatggcacccaaatttttttttcattcggtacctttaaccaatgatttaacgtgcaggtggtttcctaatttccgcaaatgggttcgaaaacaaaaaatgtgtaaaacataaaaattcataacttggctcaaactcgaccaaattaattttcatggtataatttaataaatgtaagtattgttctatcagaatataatgctaaattttcgaataataaatttggttgaatttgagccatgagatgaatttttatgtgttacacattttttgttttcaaccccactggcagacttaagaaacgcgtatgggtttcggaatttaagcaacccgctagcaccattaaacatgcctagattaattatcttttattgcttactttcattggaatcatttttcgattcatctgtgtatttaatatggtttccaacaaattcaactccgtctaattttggtaaatcagtgatcgtgggcaaagtattccaaaattcatcgccaagatcatcaatgtaacttttaatgttgtcattagctttatattgagttgaattgtctccatttttgtcgttattaccatgtacattaacgctgatcaacaaaatagtaataataataagaatgaaattattaaagaaaatgaagaaattcatttttgcaattttctaaaaaaatatgaaagataatttattatttcaaatttatttcttgcatcaaacaaatattatataaccaataataataattatattgtaaaaaataaaatttctctgaaggaattataattgattatagacattgcatgaaaggtggataattctggccatagccatacaatagcaattaaaataaatttttacgttttattatagatacaatgacttgtatttctcttataatttattgtagcaatgaaatatatatttattatttatattattatgcaaaaaattctaaaaattttaatgagtttcaaaaaagttagcgtcaaaattgttgagccaaatttttcgagcttttttgttacaactttttgtaaattttagtaatttttaaaaaattacatactgggcattttggcattgtccattggctcccggacttttcgacagcaaaggacttttcgacagaaacacaaaaacaactaattcttattaaaatgaattatattgcttgtcagttttactaaatttattttaaattaacatactaaaatgtattgttaaatcattattactagggatacgatttttacattttttacaatgaaaaatttcagaaaacacacccttaagaatcggcccctaaagttttcaaaaatatacctctaagaagaaagaaaaattttctcaaaaattactctccaaaatttatctatttattttcttggtaataatttttgattttaaaaataatttatctcaatactgatctggcttaattttgttgctttttcgataaaattttacgatttacacctctaatttaaaaacttattactctttactgtcgaaaagtcccctcctgaaattctaaatatttctgtcgaaaagtccggcgcccgaagcgaattcattattttttcttcgaaaaagaaaagactatttaaatttaaaattaagttgctattttggcgttctattaactctaaaaaaatttttttttccttttgtaaatttaaaatttttctgttttaatttaaaatcaatttttactatataggccaattaggtaggtaagttgagattttttcaaataattagttcgatttttaaatattcctaaatttatctgtcctttagctttatttacatttcacttttgtcaattcgtccgtttattcaatggccaagcatcatcccgacctcatcttttgtcgtaagttttatcacttgaatttcataaactttctcaacaccttgcaataggcaaacagcccggcgttgcgatcggacgcctctgtgacaaatgcgacgggcggtgcgtcgtctgcgattcgtacgtgcgcccgtgcactctcgtccgcatttgcgacgagtgcaactacggaagctatcaggttatgcgcattgaactattgtatttaagcaacaatttaccgacttaccctcacattttttgtattagcattttaaaatgatagaaataggcaatttttggacgaaaaatataaaacttattgttaatccagaaatgtgggcatggattactgtggtcccaatttttagggtcgctgcgtaatttgcggtgggccaggcacaagcgacgcgtactattgcaaagagtgcaccattatggagaaggacagggacgggtgtccgaagattgtgaacctgggcagtgcgaagacggaccttttctacgaacggaagaaatacgcgttcaaaaagacgtgatcatagccgggggttggactgtcagggtttttgtctgttttttccgaccgttcgacctccgtttaatttaccatcgtttctttttataaaataaaaccgcgttctccattcattttttttcaattttgtgttgcttttcattcgatatttttgccttattcttgtccttttacactgatccatgattttataaagcattgttttgaatttcgaaaaaatgggcaaaattcactactgcaagcgtccggacaacagcacaaagtcgtgcaaagctcgtggttcagatcttcgtgtccatttcaaggtttgttttgccggaaaaacgtatttttaagtaacgcctgtattagcagccanaaattttggcccattggagaantatgacctgca

SEQ ID NO: 15174 - DNA, 1596 bp, Heterodera glycines
cattaaaatcagataatgggcgttagctcttgccgttttaatgtcccgaccgtagagactctggggttacaaaaattacgcttacgttccaattatgggagcccctggtaaagagtagatcgaggaaagtattctgcatattaagcattaaatcgtcaagtatcagtaagaggagtttttcctgttctttaatcttattcatgtccggaatcccgttaaaagtctcaacgccctcccgattaatcctaaaatactatcattcatctcaccataacaataaagaattttcttaggcgatggttcaattagattcttatggtgttttaaaaaccgtaatagccaatgggtcttaccactcccggtagcccccgagagaattagagtgaacggaccgcgaaacatttttaattcctcttatttatttgacctatttatattttcatagggaacatgtttcgcgcatttggggcatagccagaaattatcaaataatgatgtgccgaaatgtaaaagactgtgctttttacacctgctacaaatctcgtaatgacagggacagtaatgacaacacttaattttatgtgggcagttcatttttcaatttaattttattttgggttgctatttatagaaggggtatataaagggagtgaaaggaccatttgattgaaatgtatcattatattcttccctatctgaaaatggctcaaaagaagttagggagacgataaaaaatttttcatttattgggacggtcccccaatttatagttctgttgggtatttattttgttatcgattacttcgcgcggcgccggcatcgcggcgcaccggcggggcggagaggaaatgcatggttttggcaaattttcaaaattcagaaaaatcatcataaaaaaaaaatctcaggatttgagaaaataaaaccgcccaaaaggtttgggatcaaaaagatttaaatttgcaaaagaaaaaattgaatttcctacacctgtcacttttggtgacaggtggatgattgatgaccttcccgcggcgctgcgcggccgggtgaaaaaaacacccgcacggatttgggtaaattaaaatccacaaggcggcaacatcaaagggatgcacccctcccataggctttggttcttggcggtaaatgtccacgggcgtcaacttcatagggagtacattaggtttggtttggaacacacacccctcccctcctgggttttgatggggcggcaacttcaaagggttgcgcccctcccatagggtttggttcttggcggtaaatgtccacgggcgtcaacttcatagggagtacattaggtttggtttggaacacacacccctcccctcctgggttttgatggggcggcaacttcaaagggttgcgcccctcccatagggtttggttcttggcggcagcttcagaggtagtccaataggcatgggtttgtgagcgggcgggacatttcaaaagaaaacacccctcccgtaagattgggtttgtgcaggaaacacccgctcggaaccgagcgttttcaaggtcatatactactatcggtcgagagtttatcatagtatggggaaaacgacatca

SEQ ID NO: 15175 - DNA, 1347 bp, Heterodera glycines
tttattaaagtatggggaaaacgacatcagtgtccctactcaagtttatttaccggacatgaattttaaaaccgccgggggcctgggaaataaaattaatgaggcattcacacatcattacaaaatcaaaaaacaacgtggaaagagagaagccaaggctgaagataccaaagattcaaaaattgatgtcgcaaagagggccgcagaacgcgccgggagagacgtagaaagacattttaatcagatcaacaatatatcgaattccatccaaacccaactaaacacactacgagaaacaaatcctcaaattttagaagagcctgatataaaaatttggtttgacaaaatggttgagatgggaaccgaaattcaaacatcccgaaatgaacttaaatcttttcaagaagaagtagataaagccaaaaacataacattggagcatgtggaaaagaatgacttgaaaaaagcaaagaaatcagccgacgtcgcaaagggaatcgccagacaggcaaagaccaaatatacatcaactctcgaggaatataatgataaatcggaaaagggttttagcgggatggtggttaggcttaacgaggcgctcggtgagcattttaaacataaggaaattgaaaataaagaagtttcagaagctgaaaaagggccgcaaaaaagagagagattagccaatgaggatgttcaatttaactacgacagtattgatcaaaaatttattgtctatctttcctctgccgtcacccatatagatttgtcaaaacacctcgcatatgttctggggtttaagaatacaaggctatttcacgcggaagaggcgacttatatgccggatttgacgggaggtgtaaggcagctatacatttatgcaccaaatttaatcgaaaacacaattatcggcaaccagatggccccactcttaagaatagttaacgtcgtcgatgacccgggatcaattagtgaagttatatatagcaccgagtattttcatcgtctacagtcgaaacgaatttcagaaattacaattgaaattcacacaccatttggtgaattcgttaaatttcactggggaagttgtattcttacattacattttaagaaaagtatattttaaaaaatgacacatgtgtttttcgatcccgagtcggtcgattggtcatcttttatcactccccagcatggaagaggacagaaacaatattttgtcggaagcaagtatcaacggggattcggtttcctcggtaatgtggcacgtttcttgacccctattgcgaggaatattgcctcgagtgcagaagatgaggggctcgccgctgggcagagagttctgagtga

SEQ ID NO: 15176 - DNA, 3487 bp, Heterodera glycines
ctgctgatgaggaagacaattttgaggagcgcactcgtcaattcttcgccttcgtcaaccagggaaacattggacaattgcgtgcgctggtcgactcgctggacgcggatgagctgagcattttgctggagatgaaccaaccggatgtccaacatgctcggcccgcactcgtgaacgcaattttgaatcggcacacagaaacggctattttcttggtaaagtttccgccgacatttcgacgacagcaatttgatttccccacatttttcttcattcagttggagaagggtgctgatccgcatcagaccatgattggccaactgaacggcttgaacatgagtgagtagcaaacagcagcagaattggctatatgcactctttatgagttcaatcttcagtttctttgctcatacataaccttacttggtcaatgtgccaacattcttggcataatttttgtttctttgtgtcagtatttgttcttcctgtatttatgaattggccggactttagcctttttgttttatactaagaaagtaaattgaaaattttctttgaaaataatttcaggggggggtctcaaaacagaaaagtaccgaaaaaagttatgggcaaagaaaatgaagattggactgataaagaatgcaattgagccgttatttaaacgttgtcccccaaatttgcagatgtgacactgctttgggccgctgtcgtttttgtcaatttggagctgtgccgtgcgctgatcagccatggtgccaacattgaaatgggcacggactctggccactcgccactgctgtgcgcatgtttcaatggcaatttggagatcggtgagtcaatctcgaatggatgccgttttgccgctgcgtaattgccacaatgatttcccattttcagccacttttctcgtcgagaatggcgccaacgttaatctcgcggacactgacggaatgacgccattaattgccactacctttttgctgcgcctcacttcgccaacaattctctccgatctcaacatcaattcaagcaattccggcacactgtgtctcgatgtgtttgctgaagaaaatgattttgttgggccaaatgcgacgacggcttccactgggcaggcattggcaaatggttgcacacaccgagaaaagatggccaaccaaagcgattgttttgtctgaaaatgagtcacgggcccagcggacattggaagaaaaattgaatgaattattgggcgttgacaaatgatggatcgtatgaatggaaactgatctgaccattattgatgcccattttgttaattttcgatgattttccgacgaaaatattcattgtttcgctattctcatgcaaaaaaacttaaaagaattcacggcttttagagttattaaaaagtggtcataaaaaatagatgtatgtgttattgttagcattgggttcctaatcactaattaccttccatcacataatcagctttctcacctttgttgttgttgttgttccccaatagaaatatgtcttcaccatcgcagtcggatacttccaagccgaacacgcttgaactcagcgggtggataacttccaacccctgcggacatctgtcgacgaattggacggttacaaaaataaaaatacaatcacacaaaatgttggcgatcgaattctgctctatatgccgtcaccatgcggtaaaagtgtcgataaaatgccgaatttgtgaacaaattttctggcggacatatgacttttcatcaagcggaaagcacgacaagtaatttaagtgtattatgccgcaaaaaaaaactttttttttctacaattagttctggtctatatcgcaagcatatggccatttggcgcatgcacatacgacttcagttccagcggaaagcacgacaagtaatttaagtgtattatgccgcaaaaaaaaactttttttttctacaattagtgctggtctatatcacaaacatatggccatcattaactgttcaaatataacaattgattacaacacagtggatgattgctttaaagaaatgagaggacatgggtactgtgtattgacctacaattgccaaatttgggcgcgagaattttacaccaaaagtaagattttttaaatttatagggctgggattttgtaactcataaatataaaaatgacccaaaaagtggcacccatgttacatatatgtgcaagtagtgcgcccgtgtacacctttcctcctctggccataaaaaagcctacgtaaattccgagacaataagaaaaataagaaatgaaaatggattttagcggaggggggggggggcaggcggagtatgtacccccctccatcaagcccatttcgcattccaaattaaaggacaaaaatattattattgaagaaaatttcctattttcctaattgttttccctccaaggttttcatcaccaaaatttctccaaaattcttctagcttgtttttatcaaaaaacttttggggaagggcaaggattcggagagtgttaattttggaatttaaccaatttcttatcagtagagaccatagctgtgcaagggggcaaggggagggtcgtgacgccgaacgcaaggggtcgacgggtgtcgaacgcacgagacggggggggggggggtcgagaaaaaaaagaagaaaaaagtgaaaggaaaaagggaaaaacgacgagaaaagagagcggcgaggtcaaggaaagggccacgtattgcgttcgactaaccctgaggagatttttcgaacaaaaaaaaagtggggaccgtcgaacgcaagcggaagggctgaaaaattccttaaatcttgcctaatttctaaaaatttgattaaaaatgcgaaaatttttcttaaaaattgactcgaaatagtaaatagaaattgggtgaatgtttggaaaaaatatgatatgaatttagattgaaagatttataattttctgggagagggattgcgtttatagttcccattatttgttttgtgaattgtgatcttagtgatgaagatgttcattttgcgattgatgttgctgattggatgagtttgggaaattggagtttatcacattaagggtggggaaatcaaagggattatgaacagaagcgtgaatttcaatgttgcaaaggccgtccaacaatttgtgggcgagtgcactttctctgtgacggggctttactgtaaagggcaaagggtacggtagggtgaaaaataagaacaaataaataatacatgaaatttaaatttatttaatttttgcctgcttttggcccattgtttccatttaaatatttatgatatactaaaaatataacaaataaatgtaagagaaataatgcgatgaaaaagtctatttttgtcgattgtagcataaaaaataaaaactgaaattgtaatgtaattttattttgtcagaattctgatgtcattactattaaaatgaaataatctttcttttagtgaagcattctgattc

SEQ ID NO: 15177 - DNA, 877 bp, Heterodera glycines
aagaaaaaagctatagccaaaaacatggtggggcccaaaagagaggggccaaacgaagggagcttaggtataatccttaataaaaaactaaagcggaaaaaactattctaggattttatgagagaaaacacacaaacgaagtgaaacaacatcaacatccaactgaatgaaaagagtgatgaatgaattgatttttggaatgattgcgaaattgacaaaaaccagtcgtggtaaaaacattactttaaaattatgatttgctgagcgattaaaatatgaggatttttaaggaactttttgtaaatcctcaaaaaaatccaaaattttgggaaatttttttaaatatttcgagaaaatttatttacataatatacatatgttcgtacatattttttccgacaataatattcattgtttggctattcttaattcacggcttttagagttattaaacaaatggtcataaaaaatggatatttgttggcattgagttcctaatcactaaaatacattccatcacataatcagcttcctcacctttgttgttgttgttgttattcccaaatagaaatggtatcaccatcgcggtcggatacttccaagccgaacacgcttgaactcagcgggtggataacttccaacccctgcggacatctgtcgacgaattggacggttacaaaaataaaaatacaatcacacaaaatgttggcgatcgaattctgctctatatgccgtcaccatgcggtaaaagtgtcgataaaatgccgaatttgtgaacaaattttctggcggacatatgacttttcatcaagcggaaagcacgacaagtaatttaagtgtattatgccgcaaaaaaaaactttttttctacaattag

SEQ ID NO: 15178 - DNA, 1499 bp, Heterodera glycines
ttaattcattaacatttggctctgcttcatcaggatcataatagtcggaagtcgcacacgcacagaaaaaggcatttgcaaaaaagaaaacaattaaaaacatcaaagacaataaggaggctaatgagtatgaactaattaagtgtctgccattaatagaaataatttaaaaaaataatttgtagtttaaatttgctttatgtaagaaattcaatgaaaaatgtcacaatattttgtaaatgaaaaattgaaaaggtcagttgatcagatggttaaataataattgcgccaaaatcagtttataattggggcaaatgacagggggtccaacaagcaaattaagcaaatatttaatgaaagagcgtgggtttaattagtgtacaaaatcatgaattaaaacaatgtttgttctccatacagatttgcattacgattggtaaaagtgccaaattaattaattaaaggttaaaaatttattaaatagtgaaagaaaaacagactaaaatgatttatgagcctaaattcctatttaacctatcaaatttcgctttttattaaacattaaaatctttcaattgcattttattaaaaataaatgataataaaatcaaatatcaataaaaaaatattttaaaaatcaaattgtgttgaaagttgctaactttgatattttaatttccaggtccataattttcggtatttttattactattttcaattcaatatatcaattgatcgttcgtatcgctggtgatccttcactttctaatcaatttgttaaaaatctttttaaaataattttcattttaataaagattttaacttcccgattattattgtaaataatgtaaagtgattaatctcaaagcattgtatgaatataacatttggccattttatccacaagcggtggatggttggaaatgatgactaatcctttttcgacactttgctttaacaaaatgttgaaatggcattaaaaaggacgaaaagcgatcagctttaccattttgatacacaaaaaatggaatacattaatttaatttcaacaattagtattcttattttttctttttcattgtttggcccaaatttttatactccaaggtgattattattattattattatttaattttactaaatttatcaccataaattttatataattatagtgatgccaccgaagaggaacaattggcaatgaaatgcaggcagagatgcggcatacggaatttgaattttgttgtgaacgacgatgatgatgccacggcaagggtaaaaatcataaatttaatcacaaattgaagccgtaaagctgttataaggggaggggaggtgagggagggtgttatagccaaaaaaccgaaaaattaaattaaatagactaaatccggagcgggattggccccgtttttttaagaacggcactactctcaactcccggattcctaccccttagaggaacccaccccctcccccccccaaaaaaaactacag

SEQ ID NO: 15179 - DNA, 1636 bp, Heterodera glycines
aattttctcatggaatgaaaatgtttttgtggtatttaggggttttaacccaattcaggactctgtttttaaaatatttatagaggaagatgttgtaatttctgagttaagtttgttccataatttggttgttctgttaaaagttttttacggttcaaatgacattacaaaagtaaaaatgttgttgcattgagaaaaattgaagtgccatcgttctttgatcacgacaaacaagcagaaccgagagaaaatcacatagaagttatcagagtaaaaaaaatatacattttttatttcattaataagcgacgctgagaaaaaaatcagagaattttacgtataattgtagcagatcagcaaaaattgctgatttgtggattttctgaaaaatttggcgaaattttggaaatttgggtgaggtaagtctcggagtgctatttgctaaaaattttgtcaaataaacggcctattcttttaaagaaaattaaaagcttttggtcaacttgacgggggaaaattggaattttgaaagaatttttttttaatgatacaattttccaaaaattatttttttaaatttaaattttaaaaagactacaattttctttatcaaatttagccccgtaaaaatcacggcgcgccgcggatcgtgcaaaaaacgccgcgaatcgcggtcgcaccccaccagtctgtacgataaataattttaattcgcaaattttttttttcaaattttgtttataatttctaagatcaatttatacgcacgccttgcgctgcagctgatcagcgcttttgctagcagttcaattcaaaaacatctatcaattcggaatcactttctctctctctctctctgatcaatgggctaaatgatcatcgcaagcgttcattaatcattcaatacccacccacatgattatgttaattagcccattgtgtcgcggcatttaatgctgttttgcccatttactcaactcattttctatccattgctgctgatccaaaacggtggcaaggaatggaatacagtatttcctaaattagaagcccccttttgagggggttgaaaaatataagccccagggcttctattttaggaaatacggtatgtggaaaccgacgaaatcaggatcagtcagaggtctgatttaatccaaaaagtaaaacaaaatgaataaataaaatgtagtggaataaaaataaatgataaaacgtgtcaaattttcataatcgaataaatcaaaaatctcataaaatagagtccataagcatttttcccgctcttctcattaatataatttgtcgcctcatttgtcactttctttgatcacttcggtccccagcggtggttgtgccattgtttgttcttcggcatcacaccacgctcatcctcccaaacaaaagaagagaaatttgttgaagacaaattgctgctgttgttgcgcgagtgtgtgccatgtgatgacgacggcacatcattctgcgcggaagacgaaccgaaccaattaagcacgggaatcctctctgtaaattttagagcttaaaaaagtactattggaattgcttacgcaacaatgaactgcttgatgacgacgttgatggttgattataagcagcgtaatttccagttgct

SEQ ID NO: 15180 - DNA, 946 bp, Heterodera glycines
ggactaacaaccatcatggttttttgtcaaaatccgatgtgccgacaaccatcaatctaacgtgataggaaattggcaaaaaattagctgatcattatttatcaacaatttctgcatttaattgcatttccaccaaagcattgcccgataaatgcccaaaatagcaactgcccttttttaaatgcaaggacattatgccaaacaatttcagaatatacaattttgtttgctttctctccatgttttcaactttttcatttttgttcctgtcgttaacctttttactttaattcgttcttttagttttatttttttgtgcaaattttgaaagcaattttattaaatacgtcatggagaaggctccccaaaacgacacgattgatgttgttgtgcacgaagtgggtacggaacacagttccaaggacaaaaacaacatcaacaagtcacctttgaaaaaaaatgcacatcattcaatcgagggttcgcggaaaatggctaacaaaacggtctttttggcaaaagccgtaagctatgtgagcgctcttctgatgaaaaacggagaaactgatgtttcggagaaagaaatggatcgtgttcatcagcggcttttagatgtttgtttgtgattggcggtctattcaagcaataataatttttggcattaatttagatgcgttgttcaagttacagtgggtacgacactcataatctttggcgtgcttggatcaatgtgcgaaatacgcatccaaatacatatcaagaagccatggaggggaagtttcacattctcaaaaatgcaccaaactatgggggtccgccaaaccgtgcatgggacattctgcgccgcaaagaggaggcgaagacaagactggttatatttttagacttttaataatattagttatatttgtctttttaagctcgaagcacgcgttaaattgactga

SEQ ID NO: 15181 - DNA, 2261 bp, Heterodera glycines
  unsure (1)..(2261): unsure at all n locations
tggacnaatacaaccagtttcgcccagcgctacaacagacttttgagtgggtacggcgctgaggtttgtttttagcattgtaaccttttttctataatcagtntaaatcgttaagcatgtttacgtgccaaaattgctgacggaggtttcaaaaagactggaagcggttccagttcaaaaacgcaaaagggggtccgaaagggctcaggccgaggagatggcaatggcacagcagctgtggggtctgcgtggggtgaaacgtttcagagatgctgtaaatgcatcgaggtaaacttcttttgattattttgctagcctttttatattaattataggatagagcgcgtgaggaagatgaaggggcttcggatgatagtgctgatgatagcaaaataattcggagccaatctacacgaagtgaagagagtgaaaatgaatacgacaaaaatgtttgatgtgggtacgatacttttggtgtttttgtacattatgcgatgcatttttattctttatttgttctgattaaatgcttcgcaataattagctgatcattttcctttaataatgtaaatttccacaaaagtaaccccgaccccaaaccccaaaaggaccattcatacggtagaagctctttgagcgacaaatgcaaaaaaatggaattaatttgcatactgatccgcccatctattgcagcagaagtcagggaataattatttggaatcgtttgccgtgctcggcacgtcagtttatcaccgttccaccaaagtactgcttgcccatgttgggcaccatgctttttttcggcatttatcgggcactggtttggtggaaatgcaattaaatgcagaaattgttgataaataatgatcagctaattatttgccaatttcctatcacgagtaagatagatatcataattaaaataatttgaatttttggaaaacggccaaaataggtgctaatgttcgaaaatgccaataggtgctaactgtaaacccctgcttttaagttttatatgccaactcatcattctttttgcttagtttgaaaaattttttaaacctaaaatgggaaacgttctgaaaaatatgcctttttaaagaatatgaaaaatcggcgaaaatttgaaattttcgatgcggtgccgattagggggtatattttcgtggtctcaacgtgtaattgggttgaggatgacaaatatcaaaataaaccgatgaacaaaaattatatgaaaatcattttaaatatttattattcttctctttttcaagccaaagttgccatgcgacagtatcaggtcgcaactggcaatggttctttgcaaataacacatgacgcaaatccatcatattttttacagattttctccaatttggatgaacaactttttgtttcggcgcatccattcaagacaaatatatcattattttgttctgaacgcaggcattattggagagaggaaatggctccttcaattcaattttgtgttctaaaatgtcaagatttaaaaaatatgaaaaattagttagggatgagatttgtcctaatttgtcacatttgtcctgagttggaggtagcaaccaaaaattgttctgggttcttaaataaattcataattttaaaattttatggcagaatgttaatgttttctcaagaaaatataagattttaggcaaaatttggtcatttaaaaatctggttttttgatcccaaatgcattaaaatttatgatttgctaatttctccccaaaattgttataatcgataaagtgtggtgaaaaaattatatataaatatatttttgatccagtaaattgtaaaaataacttcaagaaatttcgcaaaatgtccaaattttgtatgccaaaatttgatttttttgggcctgatgtcctgatattgaaaatgttcagatcaaatcactgctttagttaaaaaattaataaatatttaaattgaaacttgtgactgttttccagccgtcaaacatcagctcgaacatctacttggcgctgctaaaatcgctgcagttgcgcgagatcatcagcctggacgagtaaggacagcgaagagagacaaaacagagcaaaaatggacaaaagacacgaaatcaaaacctataagacattttccggctatgaattgggctcgagtattccttccccccaatgaaaaatttataaacctaaaatgggaaacgttctgaaaaaatatgcctgaaggagaatatgaaaaatcggcaaaaattgaaattttcg

SEQ ID NO: 15182 - DNA, 854 bp, Heterodera glycines
ttcatttcttcgaccggcggcgcttctttttggcaacggcctaaaaatccaagtccatgatttaaatgcaggactcgaaagtgtccttatttctaagatttgtccttatttggaggagccaggtcttagaaactgaaaatgtccttaattctaagatttgtccttgttttcaggcttccctaaaacatttaaattttctcttccttttgcaaaatttgaatgactttttgacttaaggttttttatttaattcgattttgaaaacaattacatttcatttcattttcatgagtgtaaatgccaaaaatgctttaaaaaacattcaaaattttacaattttctgaaattttttgctaaaaatcacactgtgtattattttaagttcagagccacagaatttttttagattttccggtggaataacaattctaaatccacattaaaattacagtcttaagtgaccacaaattacattaataactctttaatattgtacgaattaatagtttacaatgtgcacatatattacaacatactgtacaacagtgaatatacaatagaaaaacagacaataacatgtgacaattacagcgcctaacatcggtcaatcgaatttgctcataatagacacacatcggggatcggcacgtcaattcagtcgctcatctgtagacggcactatttcttcacaaaaatgttatgatccaactggccaagcgttgcataattctggtcacttgctgaaaaggggcgaaagataaagcatttgtttggcttgaacaattcatgaattatttactcgaaacgaatttcgctccccccgctgtctgctgcggttttcctggcgcattctt

SEQ ID NO: 15183 - DNA, 1685 bp, Heterodera glycines
  unsure (1)..(1685): unsure at all n locations
aactttataataatgttaaatacntacatgcatacctcacgaaagataactcttgaaaacaaagcgattcagttttgggctcagaagaaaacgaattgaaagttcgtcctttcaaaaaaaagaaaaagcggcgctactgtaaaagttaccgattttgaaacaaaaggggggagggacccttttgttttgcaaaatttttntaagataaaaaaccatgataatttgttatccggggttttaaaggtcgctaatcacgaatctgacatgtatttttactaatttctaatccctaacccgaactcgaataaaaatcgaaattttgaatttttcaaattatgattttttgttcaaatttagattaggaaatcggaattgatcaaaataattgaaagattcgtgatcggggaccccaaaaacataaatgttgtttttcctaataataaaaatattagatagtacgccaaaaggagacaaaaaattagagaaaaaaagataatgtttttctctagcattctctatttattggtacacatctcgttttttcggacggtgtgtacagtagcgccgaaaaagcgccgaaatggtccgcgccgaagtgaccccgaccccccatcgaagcctctattgcacttttacgtgtccaatcaatgacaatcatcagtttattaggtcgatattcttacacattctgcctacattcttggtatgaagttaatttttcgcctaactttaagaaataagcacgtcgtataatttcttggcaagtgagaccaaagttcaattctatttaagcaagtccacttttaagctacaaactatgtaagtaccaaaaagtcagtagaagataaaagacaaaaacaattaattgacagccaagggatttgaccccgaagacagccgccttaagtgaccaacattaaatttcgaaaaattgaaattatatttaatagcctgattctaaaaccacctatgagttttacaccattcaggatttggattttaccataaatcatttttagaaaaaattaaaaaacttggacaatcatgagtgaaattcgtcgacaaaatcagattttaaatttgaactccgattcatgatcagcgcaattttttaccatagaaaaagcgcagagacagacccgggactgaactggtcaaatacctatgggactgaaccgtcactacttaaaacgcatggaataccgacaaaatattcctctcagtatataaatcacgaatccgaaagaattattaagcgcaaaaaaattgaaaaaattattggtcagcaaacctccgaaaatgactttaaaaaataatttaagtgagccaaaaacgaaaacgttttcaggtttctgaattacgcaaaaaggagcatgcgaacacggagcaagcagtgggcgcccgagcgagcgaagggttgcgtgcgcctggttaaggccgggccgaagtcttcacttggtttttttaataatcggaacccgtttttcccatggtttgatcactgatcagaatctgtggtttcgattactggtttgaacacttttgtcatagtggttttgttgttcgtgatcagaatccacagtttgttactaatgattggaacccatcttgaccggatcattgaccaatagggctttgtttttaggcaaatgtctaaaatttctgcgaaaaaccaataaaaatat

SEQ ID NO: 15184 - DNA, 2638 bp, Heterodera glycines
tttttatgtgcatattttgtcatttttggtgcatattttgcgattttatgtgcatataattctatgctctagtaattactatttcattttaatgaaattgaacattaaattattaaattctgcttctcgacaatcttcttaaaatcagtccatatttattcattccgatgacggatttagcaaatatcttagcgcgccagttttgtacacattgtataaattacatttaagccattcaatattttccaataaatccacgtgaaaaaattaaataaataaaaaattaaacaatgggaaaagatagtcgttataattacaaaatcaatgccaccagatataaaattttattgccatttatgtacatttttatatttcaatgaaaaaaaaagatttgcgattttgttatagctaataataaaaataataatataataataaaaataatcattttttatataatttacatttaataacaaaggagtagttcattaaaactttttatattaaaaaataataatatttcaaattttactataaaatattattgaaaattcacttaaataaatctttaaaattaaatcgaaaaaaaagaacgaagtctagttttcaaatagatttcctaattcaaatacagaaaattcttaaaaataaaatcggtgtccatattttcaaagactgataaagaagtgatgcgattgcgcgacgttttgctcacttttgtcgcttcatttctttttggccattcatttggcggcctttgcggctccaaaccgtccaaatttgagcgttcggcgagtgcgccccatcgacgggcgtcggcaccgccgccgacgcaaatgcgaagggccaacagcacaccgaaaaaacgacgaaacccctcaaaaaaccgggccaattctgctgatcatcccccggcactgtccagaaatctctcggcaagaaagcaatattttgatggtaaaaaggaataaataaaaaattgcacagttttaatgttataattagtgtttgtttaattttatttttaaacggaaattttttctgttccgcgacaaaatttctttttttttgttgctcttaatttttataaaatttttgaaaaacgagcgtccctttgatgcggtaaggcgccgttgaggagaggaaaaatcttagtgaaattttgaaacatttttattcaaaaagtggacaattttgaggattttgccttatatgtaaaataaaaggaatggcggcccgtgtgccaaagaaacgatgggaaaaattattggaaaataataaattaattattattttttagataccgtcgattttctaaataatcagtcgtcatcaaaaggacggaaaagtgacgtaaatggcacattatgggaagaatttgaagcgggaagagtaacgcaacttccattgaaagaataccatagttcaatccctgattactttgagcgggaacgggcaaaaacagcccgcaaaaaaactgtcgagaagagcttcacaggtattgtaagcgcaaaccagggaaaaaacatcggaacgccaaatccgaagacctagctttttctccaagaattttttttttgctgtaatttttcaaaaaattataggtgctttgcgcaaagatatcatttaaaggcgtttcgcaaaaaatgactactttttggttttgtttaaaatttcgaaaaatttaaggaaattattcgtcttgcgatgccaataagtgttggcggacaaaattggttgaaggaatatgaaattaattttcaaaaaactttggaatttttttgttctttttcgtgagagaggaattcccgtcccttcctttaagacaggtcttcagatgtgtccccaattttcaacaatttttacttttttcacgattttaagagggttcggtaggcattttagagaaaatatgttaatttagtcgaaaatcataaaaatcattttcaaataacgataaattttcaaattcactgctatgtataggaagtattttgttcattttaaataatcttttccatgcccaaataattattacatatttgaagaatgattaccgtatattgccaaatcactgtttgaaataatttaagctaaacaatttttgcacttcattggcatattgtaaaaaccaaagtgacgctgaattcaaagttaaaaaaacgaaaattttcaattttttttattatgcacagaaattttggtatgataatatgcacaaattactacgatagcattgaatttaagactcagcgctgaagaaaaatcggagtcagaaacggaaatcgctcaagaatcatttggagcaagaaagaactaatgattaccgagaaatggcacccaattggcaatcagcgggttaccgtgactcatatggaagtgacagttactacagaacgtcatacggtaagtggggggttgggattggatatcaatcaacattatatgtatctatctgctacagtttagactagtcgtaattggtttgtttttggtgttaaaatacctgaattaagggcattaaaattggggtttaaatgttatttaatttttttctaagttaaagattaataatgaacagggaacggatttatatgtttttacaaaaaaaacgtattttggattttagtagttttgg

SEQ ID NO: 15185 - DNA, 3477 bp, Heterodera glycines
ctatcctgtcgctcccttgccatgtttcgtgcattatacaactttctcccacactccattttcttcttctggcattacatttaccattaccataaaatgggaaatatgattaacaaatttcaaatttattataattttttggcattgagtcatcaaccaaccaattcaaaaaatgccacattttgtgccacaacgctccgccgttcgttccaccacaattcacgtgccctcctcctccacttcctcaactggtgaacgaaaaatcactggcgacggtggaaatggcactgcttccgctcggctggaactaattcaacaactgcaattccgacgtcagcacagctcgccagccgttgttgaggaggactatgagcgaagtgtacagtttgaagactgtgtatcaatgaggtgctaaagaagaattaattgttcgatttaattcaaaaaaaaaattactttatttcaaaaagtttatttaaatttcatttatttttaaaaatttttcaaattttaaataattgtttttgtatatccgttttgaatattttaaataattttcattctatgagaaaagggtacacatattatgcgccttaatgaggtggaaatgattttttgtgttccaatttatattaaaaaaaaaatttgaattgttttataaaacattattaaatttaaaaaaattgagtttattatccttctatataataaaataattattaaataatttacaaagtttaaaagaatacgattctgggctaattcttatttaataaaccaaacgaattaattaacaaattttaaaatattatattttaggcatattttttcccccaaaaatttttgaatcttttataaaattaaattcataatatttttcatcatcaattaatgtattttgttaaaaaatatagcaaaaaagagttttttcaggtccgtttctgcgtggtccgcatttgacgacattgacacagagttggagcccaagcatgaattccaagttaaaactaataaattaaacgaccatcataatcgccaccatgacaatcaaaatgtgtcaaaaactgttcatcaattaatgggaaatttgttcaaaacaggtaagccaattaaacagatgaattaaataaatattatattaatttaatcgcattgttttttagtctacattataattaagaatatcatgattatttttttaaataatattattataattaagtattaccaaatgttttaaacataatataagcttcgtaaaatggcatctttgatatcttggttaaattaaataaaattatttctaatttaatgaattttctgcttttttttgccgattctagatatatatatatatatatatatatatttttttttaaattttttcattttttaaaaacatttttatataaattattttttatttttccatttcttaaaatattatttattattttcaaaataaaactttccacaatccgtcattcgtaaattgaattttccattcattattcgtgtgtccaacatttggaattttctatgttcatcttcgtctgttggttgtgtaatttaatataacgctgactttcatacatatatcaaagtctcacatgtcaattccaaattaattcaatttcatagcataacagaaaaagtacacccgtaaatattatttacaaattttttttttttggcatttttgatggcattttattcatcggcactaaaatggcgcattgccctcaaaacaaataattttttgagtctcggcgctgccagaatggcatagttatcccaaagaagaaaaaggcaccagcgggggacgctcgtgggaatatttacttggttttcatggaggaatttttgtgccacaatttcttcccaccctcaccaccacaacgccaaaataattttttgttttggaagaaaaaatcgaaaaaaatgccggacggcggcgacccatcaaaggctggcaccgcttcggcccccgcctcatttggggcattatttgtgctgttaagaaattatttggtcacaaacccaatagcattggcggtcggtgccgccaaagtgccgacaaataaaggcagaggtaaaaaagaataatttacatttttttatagaaaaaataatttgtttttaaaatgaaacataataattattattatttaatattaaaatcaaaatgtagtgattctaattgattttttaatggtttgatggaaaaaaatgaatttttttataatttttattttctttctattttaatattcaatacaacattccattctttaacatttttaagccttttaactcaaaatatatttaattaatcaaattttttgcatttgagagaaggttaagaaaaatccatttttgcatttgagagaaggttaagaaaaatccaatttgaaatttattacgaattttttttattattttacttttttttaattaattcattttattttttttccagtaaaaatatgtaaataaaaattttgcaggtgtgttacaaatttctgaacctgaaaatcttttaattttaaatttacccgacctttattgaaacaattagcccggcccctcttttttaaacatgtggttttttttgacgaggtgacacaatgccataaatattgcacatgcacttttttttgttgttgttgtagtgccaacttacacgcgaacaattttttttttttttttgctgcttattcacccgttaaatatgaattatttaactcacactatgaacaaagccaaccagctgtttaaggagagaagaatgaatgaatgccaaacagtttttaaaaaagtgccaaaaaaatttttacaacgctttcctaagccccacaaaatcgaaattttttgccaccccgccctaaaaaaatgcaaattttgcatgaaaattattcgtgtcgaagaaacgaattgtgcagtgatcgtgaaaaggacacctttttggctgatcaaaaattatgcgcactgctttcagacatgttcaacgtgttcatgtcaatggccaaagatggcactaatgggggcacaatgcaattaggcgttggaggttcagttaattagggcataaaaattaattggaaaaaaaattatttaaattaaatgatatattgaaaaagattttaaatattgttaattattttaaaataaatgattaggtctttctggaatagttaattaattaaaacatactatttattctttttatttcattttttaatcgacttttcgatgttttattattaatcataaaattaattaaaatatttttttgttattattaatcttaaattaattatatatttttttctgtcaacaaaattttttaggtgccaacagcaaagaacagctggccatcactgtctacaacaatataaggcgaagatgaaaataatggaaccgtgagtaattattatatttttttatttgtttcatccctaattactctatatataa

SEQ ID NO: 15186 - DNA, 746 bp, Heterodera glycines
taattttaattaaaaatatttttatttaattttcatatcagttacaaacggtttcggcaccgcgctgaagcacttgcaaaacggaatatgcacaatcgaaggcccaaaatttgttgatgcgttacacgcacatgcagaaaatgatccacgaggtgatcatcacggaacgccaacaacattggcaacatcaacaaattattgctgatctgccggtgcaagcaatctccgaaacaccacaagcatatgtgctccggtccaattgattatagatatatttattataaaattgataattttaattgtctttgcatttaaattttaacaatttttttaaataataattttttgcttaatataatagaaggaattattaatggttaaaatttaaaaagaaacaaataattacaatattgtgttcattgaatttatgaatattcttttttattgaaaaggaattttcttaaattatatattaattgtacaaaactttttcaataaatagtaataaaaatttatattaattttatttagaaatatcatttaagcttaaatgcttgtttctttagtaattttaaattattatcattattattattattaaatatattatattaaatatataatattttttaaatttctaaataataaatcttttaagaattgcttcacttttggacgatgaagccaaaagtatgccatcatctccgcgtgttggcggtgccattgctcaattgcttggctcaaca

SEQ ID NO: 15187 - DNA, 947 bp, Heterodera glycines
catgctattttccctttcctcctcctttcttcctcactcataacttttcctcttcctcctcctgctcctcttcttcttcctcctcatattcccccttctttcttcctcatcatctttcattccctcctcctcttcccgcctctcctttttcttccgctccgcttctccccccccccgtctcccttttctttttgtccccgtcgcttcgccaactttttttcttatgcaaaagtgttcagtcataaatatatattatacataagatccagtcaccagaagcagtaggaccgaaaaagagaggaggaacaggatatccaatcagatcacagccatcgcattttgggcatcgcttcgcccctcccccgccccgtcccccgcggccccgtcaaatgtcgtgccaacgacggccgttctgcagcagcgaaaccagcaccaacagcagcaattccaattgggactccgccgccatgactacgtcgtcggcgtcgccaagttcgagcggttcggccgcttcgtcgcccgccccggccgtctcctccgctctgccgtctccgtccccgtccgcgtcgtccgcctcctcttctgcttgctgttgcgccgacaacggcaccggcagctgctgtcacagcagttcgtccgccttgcgcatcttctccgccacgtcgtccacctcctcgtccggcacttcccctcgtccggaagagtgccatcgttacattccggcaaatgatgaccatcgcgaatgccatcacaaacattataaggagcacacaaaatgcttttcaaccggtggaataattgcagaggcaaaattcaagcgatggccctgctgtctgatcaactttgagcgtgccgacgaaaagtcttcatcgtgcccgtcgttggctgcgttgttcagccgggaggaaacccctcggggagcaacagtacgaggtgagagagagaga

SEQ ID NO: 15188 - DNA, 1629 bp, Heterodera glycines
ccgttgcgcgtgtactgctacaacgcccccgacctgttggccgtccgaactccgctgcgcgttggccctgccgcttgtgccacccacttttttgccaacaacgcggcccattgggcacaacggcactcaaaacaacgatttccgtcccccaattcgacctgttctctgaatggcactttgcccgtccttctccgcccgtggcgtgccatcgcggacaacgaatcgtcaattcaacgcatcatcgtggtgataaaacattttttgaattgccgcacattggtacaaaatggccaccgttttttgtcgtgacagattcgcagtgccccgcgagcatctgagtaccgtaaggtggtgcaccatttggttacagtacattttatgacttaattgtacagtaattgccatcgtggatttgacttgttcatggcatttggtttttatttagtacattcgcgacagttggaagccggcggtggagcggctgaatgggccggtggttttcgtgtcgggcagagatgggactgaactggcagaggagaatggccaacatggggacattttgcagttggattttgaggactcctaccgcaatttaacgcttaaaatgatgggtaagtgaaagggaagggtcaattaaaagtaattaaataattaattaggcatttatcgcttcttcacggagaacacaccggtgcagcaaattgtggtgataaatgacgacacaattgtaaatgcgactgcactggaccaactcttacgagcgcaagtggtaataaaatgaaatgacaattacaaaccaacacattaatgagaatcaattacaaaatgacataaaaaacgtggaaatttccaatttgcgcatcggtgtaaaaatatgccaatttttattttttaattttctaaaaatatcacgttgaactttattttaaaaaacatttttcaaatgctttagtatttttatgaccgaattcgcgagaatttctttcttcacagaaaagggcaaaaattaaaaaaaaacccaacaaaaaacattttaaaattgatgcgttcattgtcagatgcgatagattaaattaaactaaaaatacatttgtgaatttcagccctcacaagtacaaaagggcgaaaatcggtatatgatcggcaaagtgtcgcgagcttatccccgaattgtattcgtaagttcagagtaatttttagtgaattccaagggcgtagccaaacccttggcttcgagagggggggggggggggggctacgccctttctgtatccctttttcttttttcatttattttaattaactaaatccaattttgctcctttccttctccctttagccgtggttgccatggcacgtcggctcggagctgtacccgcacaagtgctatcccccatttgtgcaggtcaccttagcaattagcaaaatctgttcaataaccattttaatattcccaatttttcagggctccagtttcgtaatttcgcgtgccgctgctgcggaagtgcttcggcacgtgtgcgcttttcccggctttgccattcatctcgacgacattctgatgggactactcaccaactgtttgggcataagggacattcaccgagacgggtacacacaaaatgccaa

SEQ ID NO: 15189 - DNA, 3503 bp, Heterodera glycines
ttctcagtgttggcagttgtaggtattctaatcgattttggtatggaattggcggaaggctacatttaaaaaatactcttttggtgaaatatttttgacacttttcgatttttttaatatttttttgaagagacggattccaaacctccggagcgtattccaataaaggcctaatataagttttatataacgtaatccaaatcttagatgatttggatttaattattcggaacaaggaacgcatacgtaaatatgcattccttgttatatgattaacatgatcggaaaattgtaatttgttatcaatgtttactcctaaatccctaattgtatccacagcatttattgtatttccatcaaatttatatgtttcttttgggttttttgaacccaaatataatataaaagttttttgcattgaaacttttatttgccatttatttgcccattcgaataaattatgcaatgctttatgcataatttctgtttcggttcttgctttataacaaatatacaatttaacatcatcagcatataattttattttcactcctgatggcaaagcatcaggaagatcgttaatataaatcaaaaataataaagggcccaggacagagccctgggggacgccagaggtaacttttttacttgaggataaagaatccccaattttaactcgaaaagtcctattactcaaaaagccctttatccacattaaaagtttgccctttataccaattttttccaatttgtataaaagtaaattatggggcactgagtcaaatgctttttgaaaatcaatataaatacagtcaacattttttccatttataattgcctcgtaccaatcttccacaactgttattagttgacttgtcgtagacctatttctaacaaaaccaaattggtattccgaaattttattgttttttaggagaaagttgtaaatattttgaaaaataaaaataaattaatagacaataattagggcatcaagtgaaagagcagtaatttatttttaattatgttttaaattaaccaaaaaatataatttctaacaataaaacataaacttttgtacgaatttgtttaaaatattgtcattttagcacaactcttatttgatagttcactaacagaattgaaatgacgaatatctaagccacggaaaatatttttttttaaagaaatattatttaggttttttaaatttaaataaaaattccgaacaggccatcaaccatttccaattttaatttaatttttttgtgctaataaaattccgaagcaaccgaacatttccaaatgaaacgtcttttctaacttttttaaaagcattcattgtaatacccccattttttgtataccttttataccttttcgttttatttatttttatttttcattttaattatttttaaataattttaaaatgtttactttcactttgcccacttctgctgatgtccaatttgagacgagcccaaacaatcaggtagaaggagaccgaaatcacaatgcaaatcaggcaacactgtccaacaattgatgcccatcctccgcccaccatttcgccaagcgtacaacagcgctcactttaatttgataaaatttaaatttcaaatttttcaaaattaaatttaatcaaaaactgacacattaggcttgctggtcatatttttgaatgcaatccactcaatgaacattggaaacattgttgaggcgaagaacagtgggaaaaagtagaggcgatcatttctcgaaatgtacctttttaatttgagatcgaatttttacaggaaataaattgctgaattttttggcaataatttttaaaccagaaagctcctagcgaaattttttggcattttgcagaccaaaagtgcgaaataagttaattaatttaattggatgaaaaaattgtaattttaatgaattttgagaaaatttataaagtatttctgctatatgtaatataaaggtgctagcgcgttcttgaagccaccaagccaaaagttataaataaatgatatttgatttttcttgtgtttttgaatttgtcaatattgtcaaaataaaaaaaaaattcattttttcattaaaaattcaaaatgtcaattatttgtgtcgttaaaaataataattttgtgaatgaaattttatttatattaattgggtcatttttggttattttttttaataaaaagtagggttcggaccccgcccccgtcacccccgcccccgccgggggcgggacaggttttttggcctcacccccgtccccgcccccgtgactctgacccccgccatcccccgcccccgcgaccttcacccccgcgggggcgcgggggtgaaaatacacccctaagaatgacatattcatggataaaaggcaaaaaattcatacaattttgatttttttaaccattttgacaaattttttatattgatgtgtagtgtggtgtagtggttaatgaatcaaccttgacattactttctgtcgtgagttcgattcaggttgacggtttcttttttaatttatttttttaattttaaaattcgcctggcgctgcctatcggcatcgcatggcccaaaaattcgtaaatcttattaaaaaaattctctaaaaattgcaaaaacctatcattttttggacaaaatctattaacagatccatcagttttcaaaaaattttcccggcggcgcctatctgcaccgccggacctctacgctcgcacattcaccaagtttttttttttggaaaaatgtgccacaagaaaatatgttacaaatctgagttccaattttgcttgagtaaatcatgataatttaatatataaaaaacaaaaatttatcgtaaaaatcttatttttttttgtaaacatctgttagaaatcgagcttaaatttcaaaattcgccaggcggcctatcggcacctccggccccccaaaaacctatttttttcttaaaaaattagccaaaaatctctaaaatttggtaattctttagacaaaatctgtgtaatttatgccaaaaggaattgaattgaggcgatacatcgactaaaggaatgtggagccatcacatcattcataaaaaattaattttttgtaaaattttttggagttaattcaaatcaaacccccgcccccgcccccgcgggggcggaattatcgtgcccccgtccccgcccccgcgactctgacccccgccatcccccgcccccgtgaaaagccacccccgcccacggggtccgaaccctagtttaaaaacctatttctttttctctcattttggcgtactattttcatgtctctaacatatcaaaaaacacaaaatttgcaaatgcgaacaatttttgttaaaatggtataaaataaatttagtcttatagaatcattataaaaagtaccaattttagcattttggttagatagagcggcctaggagtagagaatggcaaatgaacatttttcacttagaaatagagtgccacgggac

SEQ ID NO: 15190 - DNA, 1678 bp, Heterodera glycines
attattagggcatccaaaaatatgcacatgcatatttttttcctggactgtgggaggcctgaaacgcacgaaaaacatgtttttagcttgatttgaagcttctaggatgactttccatatgcatattttgcatatttcgcgatttatgtgcatatttgcatatttgtgcatattttggcattttgtacatattttatgtgcatatttggcattttttcaaaaaacccctattaaaacggcccccatcaggtaaattggactttttgaccctaaagaccgaaaaaatttccgaaaaagacattttttatcaaaattttgtcaaaaatattgattaaattcaattttcttaaaaattcgttaatttatgtcagaaataagcaaaaaagcgaaaatttcgcttttcaggttgatttttcgctaaaatgagtaatttttaagctgtatcatgtttttaatgccatatttaaccatttatgaaattttactttgcgtttggcgaatttaaagaaattttgaaaaattataccctcaatttggaaaaatttatgtgcatatttttcactttttatgtgcatattttgccatttttgatgcatattttatgcgcatattttgcgattttatgtgcatatttttggatgccctagtgattataaaattggatgaattgtaaaataaaatttataacgtctttcctgagttaggtaatcttttcatgattttttaaaaatgaatgacagatgacaaaacatttccgcctgacagtgaagaatcaaaaaatcaagtgagaaagaagtgattggagaaattgctttcgtttgtttcttgctctcgtacgatgtttaaggcataccaaatgcccgggaaccagccacaaaaactgaacgactttcagtattttgctatttaaattaataggaaccaaaggaggcagcatttaatgcaccgaagtccaatggcagaacaacgtaaaccactcatgattccacgaataaaaacggcgatgggctatagtcccgatttagtaatgtgagtgtaaaagcactacaagcatacataccggtagtaaaactgcaaggagccaaaaaaacactcgcagccattttttgagcatgacgatttctttgtttaatttttcatttgtttgaagcaacgagtcgttttgatgaagcaacgagtcgttttgatcttgaatgtcatgtacgtcgcctactgcttttctcaagactgtaatttctcgagctgctgcctgttgctcgaaatcactgcgaacttgcaacgcatgatgccgttgtccaaattcacgcagttcgtgtgacagagctctgtttttttcttccagatccagtcggctcatcagctcctcttctcgaactccctcaaatggaattagccaaatttaaccaatcctattaaaaatgaaaaaaaagaagcggaggaagggtatagcgccacaaacacaaccatatttttgtgtttccgccaaaaatttgtttctttattaattgtagcattttctattctttctaattatttcattagaaaaaacagttgaaaatcagaaaatttttcgaatacaatagtagcaagaatgaattaattcggcacgacgacatttcgccaacccacccaaaaatgacatttcgccaactgcaagaagcatccaaattaaacatcc

SEQ ID NO: 15191 - DNA, 1150 bp, Heterodera glycines
  unsure (1)..(1150): unsure at all n locations
ttttgaaatntcgaaaaaaatcgtcggtggttaacctgcgccatgttaagtttgaggacggcggcaaagttgttgaacaccaactgctcgagacggacaaactcttcggaggacatttggccaaacagtgcctggagcgtacgcgagcgaacgggcaacggacggacgatgccacggctgaacaacgtgacggaaccggtggaagcacgacggcacacagacaactgcacatgcagtgcctgattttgtgacaaacttgtcggcgtggaagtccaacgtgaaaatggcggacaaagtgtcgaacagtgacacggtgacggccgtgtttagtggggacggcacagcatgtgaggaggacactttttggtcgattgaaacaccgctcacaaaggcctaattatggaaaaattattcggtataaaaaaggttttctgccggacgaaaggaaaagtctcacaaaattggcatttgtcgtcgttgtcgtcccggtggtcgttctgttggcttggattcggtcggaagtgtgcgttttcagcgtgttgaattggagggtgttcagacagaggcgaatgtcactgccgtgggaaaggaacagttcgtccagctgatcacggccaattcgcacgccttcataatggcaaatctgacaattcaaaattctatctctggtccattcaaaatgctagcttttgtccccacctcttcaagccgtcgctgcatccgctggcgattgcaccgctgcacgcgcacgggcaagcagttggcgcgcaactcacgcagcgcgggcgcatgccaaaaggaggcgcaagtgcaaatgacgggacgtcgacggacgacggatgaagcgcgggaacgacgaacccatgaacaaaggaattgaacctgtacagggtagaaattgtcgctcaaattgatggcactgtccggcccggtcaacaaccatttccggcgacgcctgttccaccgcgtccacaatgaaacagcacggccgagtgccgacgtgcggtggctgtgcttcgcctgccgaagcggcagagacggacaaattgtggaagagcgcgtcaatggacgtacaatcggtggcattttcaagacgcgacttcagctccgccatgttttgaagttcactgacaaatattcgatttgtgta

SEQ ID NO: 15192 - DNA, 2852 bp, Heterodera glycines
ctggcgctttaaaataatttttaaactttgtctcgtcaatttaaatgactatcataacatttttaacagattgagcttgtgcccagctgtaaaacgttgcgcgagattcaaattgtcagctcgggtgccgccggcgtgttcaaagacgaagtgctcaacgaatggttggcccggcagaatccgtccgaattccaatataaggcggtcagtaattaagcaattttttcaggtttcaaattgattttcaaggctttggaaaatttccggcgttcgtgtgccggttggtgtgtggccacttatgtcctgggcattggcgaccggcacaacgacaacattttggtcactaccaatggccacgtgttccacatcgactttggcaaatacatgggcgactggcaaatggctgccggcttcaaacggtgtgcaatcatttgattaaaatccattctttcaaatttaagaattcgaaaatggaactaatctattctattggattataaaatgaattgaaatttcaacgaaatttctttaaatcttgctggggaacagaatttggtagcctaatagaagacctaattttggttagatttctcttggtttatgtggtaattgttgtcaaaaatgtgaaaaattttataggccctaaaaatgcctaatttcttcgccattcccttaaagtgctcttttaaacgctgtttcacccttcagctaattaattaccaccccctccctaaattcgcttgcagagaccgtgtcccatttgtgttcactcccgaaatggcctatgtgatcaatgggggccaaagctcgacggaacacttccagcgatttgtggatgagtgttgccaggcgctgaatctcttgcgaaaaagtgcgccgaccgtactgaacataatgcgctttctgagctgctcggacatcccgggaatgtccatggaatcagtagtaagctgaattaataataataaaaaactatataaatgcctaaatgtttcacaacaatcagatcgacatttcttgggggaggggaatcggcactcggtttattggaaccaacttttagggaactgctcgattccggcaaaaattttgagttccaagcccatgaaattaccgctctttattaatgaccctttcaatggcattttattcggtttacacgaaggcagaaaggatattaaaattaattttttttttgcaaattttacaatcatactgtggaaatcatatgcataaattaaagatacattattttaaatttatatttctagaaactaaaattcgattgttgtccgatttttaacaaattatgtgcttttctaatttcttaaattaatttgtaggctttcgtggaaaacaatttgcttttggatctgagcgacgcacaagccacaatgcttttcacccaaatgatcatggattcgctgcagagcaaattccctcggctgaatttcctcgcccacactttggcccaatttcggggaaatcccctcgggggccgaagcgaggacatgaacaggctcagcttcatctccgaactttacaagtgagccaggaaagtgatatcaatcagcagcataaggcacagcaagattcaaggacacaaaattgattaataacttaaaaggacattgaaacaatgcccaatcgggattcgggatttgagatggggttgccaattgaaatccaatgccaatgacgatcattagagctttgaccaaattgcatttgaagtgcacgaatttgtcctaaataattcactccctctccaattactttaaatttaattgctaaattttaaattttcagcgaaaagaatgaaggtcgtcttgagtcggtgcatgtcaattcgtacgaaaaatggaaaaacccggagaaaatttatgtaagttttgttcatccgccatattccttaagcttaagcaatgacataagataaacggataataatggctcattttgccccgccccctttctcagatgtacaaattgttggtgaaacggcagcaggaaaatgtgaccacggtgatattccggtaataattaaaaccggaggaatgcagtaaaacaacccgtaatcagtgacttggaaatcaaaaatttaaaatcccgaaaattcttttccttacacaatgcccatgtgcgcaggtcctttgccgagttccaagagttgcactggaagctgtgctaccgcttctccagccgtgccattccccaactgtgccaaacggtgaccttcggccgcacaaacattcgcacggtcgccgtgcggcgtcaggtggacctgcagtacttcttgcagcgcttgttcgccctgtccgacgaggtggcacactcagagttggtctacacgttcatgcactccatctaccgcgacacggagcccgaggcacacaaacagagcggtaattattaattaattagttaattggcctataaatatggaaatttcataagccagtcactttccaggattaaaattcgaaaaaattaattgaatgataattattattaatatatcaccgtttaaactgtttggcagatttattttctatcaatttcatttttaaaaaattaaaattatccatttaaaagcgatttccgaaatttgtacggacggcgctttgtccacccaatgccaacttttgctgcgcttggcctgggaagaggcgcagaataagctacgcatttttgttgggcatgccaaaaacttgccgttggttggccgtgagcaggcgccagacagttacgtgaagagttacctcagatggacgggcacttccgcggcacagccgcgccaatggaagcgcaaaacgcacgtggtgcgcaacgcgcagaatcccacgtacaac

SEQ ID NO: 15193 - DNA, 1112 bp, Heterodera glycines
ccttcttcagtcagcgtcagcacaggtggcaatagtactctaatcgccacgacaacgacggccgacggacagcggcacaatcccgagcagaagcgtgagcatattggagttcttgatggtccgttcttcgccatctgttatggaaaatgaaaatgacacgcgaagttggagcagttcaattcatcaacggcaaaaaggaaatgccaaggaaacagtggcaaaatgcgcccggggcaaagcctcgtggcaattcttggcatttgcgaatatttgatggtttttgggacttgggccattgtccgcccgaattaggacaaaaagtcgaaaggatggggaataagttcgagtttctatccaatttttggtccggtgatattttgcattggtttcagtgattctcgcggttttttttgtcccgaaattgtccaaaaataaaattttctttcaaatggcggttgagaaaagatacggcgaatagcatggcaattggataagttcaaatgccatacataacctatcgaaaaccttcaaatttacgagttgtccgtgccgccctccccggggatgatttaccggaaaccccgagtcttgcccgaggcctaaaaaaacccgagtcgacacactctccatcaacgagaaacgcgaaaatgccggcctattgccaaaaaagttctgtctgatgttgccttccccccccccgtgcccacccgtcggatggtcaaaggtggcgaattcgccgggtggcgggtcaatgcgttcgaacacccggcggtcgtcctcgtcatgcggcgggcccatctgctgctgatgctggtactgctccaccgccgttcgaccgccgccacttctcccgcgtgccgtcgccgccgctgtgccggtgccaccgttgtcaatgtttgtgttcgccctgcgttttttgatttttttgggcatcgaaaaacgcacggcattttttgtccaaccgaaggaagaggaaagtgttgcaaaagtgttcttcgcacgagcagatgtgagcccaccggtccaaattgcgttggcagccaagcgcttcgttgccgcacgttctgatcactgaaaatgggcaacaaaatgggggaaatgatcaaaaaatg

SEQ ID NO: 15194 - DNA, 1906 bp, Heterodera glycines
tccgtcctcggcccctcctccacaaacagcaacaacaataacaacagttcgctgttcgcaccgtcaaattccgttggtgctgctgttgctgttgatcatttgttggatcgatttcgtttttttcgccgtcaccagaatttttcggttgcccgtcggtgctatccttcgctttggcattttgccggtgccgaatttgttcgactttgcccctccgccccctttcatctcgccgcccctcttttacaagtcgacacgcatttccaagagacggcagaaaatgctcgccaactgttgaaattgactaaaaaaaacattttaagatagatgcgacatttagtggctaaactaatcggtactatcggtgggattttattgactaatgatgattgagctgaccgaatttggcatcaatacgaaaagaaccgagccaagcctcgagaccgatgtgacaatttcaagactcaaaagtgccaagaggcaaaaaagacttttcaagtcgagactctcgagcatcattattgaagaattccgttaatgaaagtgctaactcatccatattctacccaaaaaacaaaaaacacataagctggtgagatggagagacattcacatgacatgccaacaataaggtgccactaattaggcctcaaaagtcattcatttgaaattcagaacaaaatgacccggaaaattggccattatgggatttccacactttgtgtcccttgggaggatgaggaggaggggatttgactatttgatgagcccaacagaatgtgccggagagagagaagagactggagaaagagagagagagagaaagtgggaagagtgagagatataggagagaaagagatagagagaggagagagagagagagagagttgatgaatttgtcttttttccaaatcccaaccaatggcacttttgctttgggaaagtgtgacaacgaaacccagaaacactcactggcaattggtctggcactgacgtcatttgcgttggcattttcagtccaacaaaaagggaatcgatgtgctggcaaattatgaagaaaattgcatggaatttttactaaatattctaaacaattttcaatgctcattataaataattattttggcttagtaattagcccattagaaagacatttttgtttgtttgtttttttatgctacgttacaaatgctttaatgagtttttttggcaaattcaaataatggcaatttgagtggcatttggcattttgttactttccttcggtgggcagaaaaagaaaatggaaattttatttttgctgtcgcacggaacagtgactaaacaaataaaaagctttcattccaggagatatttgagccgacaaagaaagaaaaaaaggaaggggaaagttcatgaacaaaaaaaaagtgagttgctgcggggcaaaggcaaagtgccgccgggggagcggagagtgccgaggggcgacggcggcaaattatttaaatatggcactcccggggggtgggaaaacagacgggtgcagttgctgaaaatgcgaatacgacgtattggccaacggcgggaggacggaaaagacggacacatccgccgaagggaaagacggacggggcagatggccccgagggtaaaaagtgcacaaacgaatggagagggaggggagagggggaaatgggaaaagccccgaggggagagcaaagcgggagggtaaaagccgggaagagggacagagagagcggggaataggatgagggcaggcacaaaacggatagagatgtgtgagagataacaaacgaaagagagagaagaaccgagagagtgagagagaaagggagtgggaaagagagaggaaaggagagagagagagagagggggagagagaaagcgaagagaacaagctgaactg

SEQ ID NO: 15195 - DNA, 2969 bp, Heterodera glycines
  unsure (1)..(2969): unsure at all n locations
ccgtaaataagtccgattcataatggtaaaaaaaaacaaaaacaaagattccttcaaattagttttgtttntaatgtatttttaactttttatttaattaattaatttattatttgtttgttgttatatcgatacaaaatgcaataaaaataaaaataataataataataatactattgtattttattcaaatttatttttattttataatttaaattgtttcttttttgctttttaattttttacttatttattacattttttgtcttcttcaatgcatatatttttctcattaacttttctattctttttaaaattcacggcacttcgtccatttgcgttacgatagggatggattaggaagaatatttgataattttattgttttttgttaattaatatgactatattatgcaatatattctgcttatgctaaatattttcaaatattgtaaattttaatattaatttatttatcaatttaagttttattttgtttaataaaaaataattgaatatttttgttttattatttccatgatttcccgaaggaacttttaccaatctattgcggttttttccatgaatgtctattgagtttcaattaataattttgtaatttattaaacatttgaaatttattttagtaaagaacaaaaactgataatattcaaatcttaaaaccatttctaagtttggcacttcctttgctgatatttattattaaaaaataaattgtcagcaaattgttttccatttttggatctttattctttaagtatctttttatgtatcttcagatctttttaaaatgaaaggtccctctcttcgaatttattatgattttgttaataatttggacggcgtatatttttaattatttatttttattttttgtaaaatttaattatttttttcattaattctttattgtctttctgtccatcaattcgttcattagaatgtttaattgttttggtttttcatttttaaatgatcaattaattatttactaaaaataataaatattcattcatttttttggaataaaccttggtataattaaaaattaattatacaattatcattttctctatttgttactttcttattgttagcttggcaatgtaaaaagcctattgaattcaattaataatttatctttgttaaacttagttgccaaaatcattccaattgacataattatactattatctttttctttttatgtattatttgcaattaattttaattttattttcgattttgttcagtttcattataaattttttttaattcactatgaagacttaccgtgctgagacgaacctaaaaaagtatcagttataataaaaataattaaatttaaatgttataaagtgagtaaatcttataaaattatatattatgtaataatcaattatgaattacatactcattttatgtcacataaataaataatgattttgcaatttaagaaccgaataaatgtaatttttgaaggaaaattcgttgatgataatatttaaaataataaacacttgtttattatttttttacatatattcattcatttttaagtttctagctagctaatactttctctgatatcgatgtttgaattgaaatacgaaaagaaatgttgcgtaaacataatgctaaaatggctgcaaaaaacgctaaaaatactttttttaatattgacggcattaaatttgatgagataaaagctgcggaggaacggcatgaaatttaagaaaataaaaatattcggaaaagcgtggggattttgaatgccaaaaacatttgatcctttcgttccattaatgagaaagcgagaaccacccattcacttccttcattagtttcatactaaaatttaataatatttttataattagggcccggattttgaagcatttgcttaaattttttgctaacttatgacgccctacggagcacaaaaaaatccggccctctttataatttgtgttttcatttttaaggtccatgaataagccatttctgtctanaccctcttggagataattcaagcgttgcatctactaccacattattttacaatttttgccgcttccagttgtatttttgacgcacaaaggagaattccgagttctctatttttgtatagcatccattctgttcccacaattgttttccccattacaagcttaatcgcccctatttttgttaactgtaatctttcaggcacatcanacggatcgtttgagtctgaacctgtatctgttttctttttctgttgtaagcccggcgaacttttattcaggatggataattgcttgtcaatgaatgttcatcaataggatttgtgactttttccaagtcatatttctcagaatccgtcttttaatttttctagttgtaatggttcacactcagaattatgattggaacgcaacataacaagattttttccttgtcgtatcactgctgtcgaaacaatagattggttattttttccttttcacgcaaatacaaacaacttgaacatgaaatatagatgtcctctttattttcattagtttgaatgtattttctccagtttgtttcgtttccaattataaacatattgttggtcagattcctggcaaaacatttttcaactttaagttcaggtgttaattcaacattttttttactggtgcaaaaaatatttttaattttcccaagtaacgttttagtgtgcatatagaaatctgtatgccttttagttgcagttgttgaagcagctcattaattgtttttatttccttgttttcatagcttttgacaagtgttattgcttcggagttttgtagaaattcttcaaatcctgatttggtgcttgccgaataatcgagtagaaatgagaacaaaataagtttaaaaataaaaaatgtgttcattatttcggagttaatgtattaatgcaacatataaagaaacgc

SEQ ID NO: 15196 - DNA, 712 bp, Heterodera glycines
attgaaataggaatgattttggaaatccccccccccccaaaaaatccaaaaatttcggctacatattttcattttttaacatatttcgggaattttgtaaaattatattaatctattatgaaatacaaacaatttatttttgaatgtaccccttaaaaataacaaaaaattagtttttaaatatataaaattgtgtttcttagtctcatttttggcattttgtgcctatttcatcgtttacgaagaattttatgcaattattactttaacatagcggcccaattttgggctccaagtacaattatgctggatttttatttagtaatcagaacgccaaaactttgcaaaacttaaaatttttttgggattttcccttgtaaaatagaagagccgatctcgagttaaaaacataacttcgaaaaaataaacaggattcgatagagggggtcaaaatatgggcctatgcaagatttgaagaaaatctgacccgaggaaaatttttttgaccctagtgaaaatttcaataaatttcaatcattttcagctaaaaatggtcttgacacgcaaaaaaagcgaaaatttaaagaatatgagcaactcaggtgttgaagcaagacaaaagcggaaggaatggcgccgggagcatgcaaaaaaagctggatcaacaccaaaaaatgacgaaaattgaacaaatttattttattttaaaaac

SEQ ID NO: 15197 - DNA, 680 bp, Heterodera glycines
atgttaataacaattaaaataaataatattataaatataggacctttttctcctttaattacgaataaatcaaaattaggaataatcgcaaatatttgtttatttttaaataagtttttaaagatgaataaattttcttaattttttcaaattctattttttgggtttttcgtgtaattttatttaaatttaacgaatttggattttttgtaaactttaattcaaataatttttaaataatatcttagagctggaattttttttaataagattaaaattcatttttcaaattaaaacttatattattttcccttctataaaatactttaattaatttagtttaggataaattcttccatgaatttcttttccttatttttcatacaaacacttagaaaaatttaattattagccttttgtttagcttataaatattttatataaatgatttaaatatttcaaatttaataaattttacatagtcttaatatgcataaacgaattcaataattaaattttctcattttatttgcttttttaaattatagattatttggatttttcttgattggttcagagccccaaatttttttcatttactgactaatagagatcctttgcttttatatttttatatttatatcttaaacaattttttattacagcttccttttgtaaat

SEQ ID NO: 15198 - DNA, 2694 bp, Heterodera glycines
  unsure (1)..(2694): unsure at all n locations
taaattcttccatgaatttcttttccttatttttcatacaaacacttagaaaaatttaattattagccttttgtttagcttataaatattttatataaatgatttaaatatttcaaatttaataaattttacatagtcttaatatgcataaacgaattcaataattaaattttctcattttatttgcttttttaaattatagattatttggatttttcttgattggttcagagccccaaatttttttcatttactgactaatagagattttttgcttttatatttttagatttatatcttaaacaattttttattacagcttcattttgtaaatcattaataagttttgatatttgcaatataattttaattccaaaaaatcatggtttgaggttgtacttctcagcttctctttttaatcattccaagaaatacctccactaataatgaatccaatcttttaaccatttgtccggacaaatgatctcgtccacaatataattaataaaaatttaattctgaacaaatattttatcaaaaggttaatcatttttttggtaatcaaacaaaaataatttaaaaatacaagatattcgacaatataaaaagaatttaaaagaaaagcaagtttttaaattcgaaaatttcataattagcaaaaataacttttaagattttaaattgttgatttgaaaaacaaatttttactttaaaaattaaaattaattgtgtttataaattttttatcttaatcatcaaaaatattaacaacaaagtcttgaaaaaatagtaaaaataatttttgataaattgctcaaatacttttttaatttaaaaatttttaaattctcaaaagatatttcaatctttgatatttaaacatatgcaacaaaataaattttttttataagatataacaaatcagtagaacaaaaaaaaagtttaaaataaaattaaacaattcaaacgactagataagtaaatctaaaaaatattaaacaaatagcattaaatgacccataaatacacaatttattagttctataatagctataagagaattttatttttgcatttaataaaataaaaaataaatatatcaataaaaagtgtttatgcaattctgagttaaaagtgaaaaaatttaaatttttattatataatatacaaacaaaaaaaaaagaatttcaaaaatcaaacaaataacaataaaaaaataatgagaaaagtatattttcaataattaaatctgtaactaataaattggccttgaaaaagatgatacactaaccgattataaatcgtgagaattaaatactacatagaagcagaataataattattatacatatagcaacattcttattttaaaataaaaaggaagaaataattcgaatttaaaactgtaaaaagaaattataactgaaataaaattatttaaaaatttccaaaaaattatattcatttaataaaaataaataaatgctataaatacgaatacaaagacatgtgaaatagagaattcttttgaaaaaattcataaatcatataatttcatatttattataatatttaattttaggtcatcacctaaataagtaacataaattttaattggcataaaattaaattttaaatatttattgttttattaacatcctaaatgtcgggctccctaagtgtcggatccccaaatgtccttcagttcccaaatgccgtttcaccaaatgtcgttcggtccccaaatctcggtatacccaaaagtcgggactccaaatctcggtatacccaaaagtcgggactccaaatgtcgggatccccaaaagtcgggttcccgtatgttgtgttccctaagtgtcagctcaccaaatgtcgttcggtccccaaatctcggtatacccaaaagtcgggactccaaatgtcgggatccccaaaagtcgggtcccaaaatgtcgggatccccaaaagttgggaccacaatgtcgggtccccaagttgcaaatctccaaaagtcgggtagccgtctcaatacttcgcttactgcgtctataatgaataaataatcaaacaaatgtgaattgagaatttttgaaaaaattaataaaacatagtgattttcatattttataaataatttttcaattttaggtaatcacctaaataagtaacataaattatactagaaaaataaattaaaataaaacaccaatcaattgttttatagattggacagggggcagtaggggtcagttccgtatggcctaaaccgtctgagccagttccgtctcgccagttccttcttggtactcaaagggccgttctgtcttaaatataattggaaatttgaaaagaaaaatttctcaaaaattcatgtccaaaagaatttatttattttcttggcaataatttttgattttgaaacgataaaagttgttaacatttttttttcgttctatacactaaagcagtacagaatctacaaacgcaccgaagaagcgcaggagcttttagcgcggtactttcaaatccaacaatgtgattttttatattataatcagggttgtaaaaaaatcgaatatttagtatttatttttaatgaaaaaaattaaatattataactcttttatttgtttacaaaagcagcattttgagtatttttatttatatgtataataattgaaaaaaantatatta

SEQ ID NO: 15199 - DNA, 1025 bp, Heterodera glycines
  unsure (1)..(1025): unsure at all n locations
ccgtggatttnagtgaagaaaaatctctaaatagttaactattgagtagtgaggaaatatgccaaaataatagtgacaaaaagaccgaaatagtgacgaatatagcgatataatttcagccaaaaattgagcaaaaattatttttaaacacttatttcagatgcaaatgaggtacattcgacattttcttggatttttttttctgcgtctcaggtctcgagcatagcaaattgctactctcgagcagacctactaattaaaattgaaataattaaaatttaatgaataataaatattattgtgttaaaaaatgaccatgtccaatatgccatagaagaacatcaatttgtagcaggcattgtttttcatgtttttgtaaattgataccatacacggaatgtaaagtagcttaatttttcatattttaagtttcgagaattttctttacttttggtctcgctatccgaatatagcaaatttttactctagagcagccctaattcaatcaccccctgaaaatatttttattcgtaggtttttttccacgattgcgtttagattttttaatgatatttttttgattttttattattttctttttttcttatttttgctttttttattatttaaaaaaaattaattttaaattaattaatataaataaattaactattaattaatttaaaattaactaattaattaaaaaaaatagatattaattcttaatatattctctttaagacctcaaaaacgaaaaaaagtgtgatcaaaatgcatccgttcacaatgtttgttctttcttcaagtgggattttgtccgcattaaatccctcacagccgtacaatttgtcaaattcatcatgacgaaacagcaacaattccatcgggatgaattttttttatttattaaaaaataaaaaattattatttttttagggaacataaaaattatgaatcataataatttttttgtttaagaaaaagaaatatcatattttggagtaaacagtgttacacaacagcaa

SEQ ID NO: 15200 - DNA, 1318 bp, Heterodera glycines
gccaagaatgatggttgggtattcgtagagcggtggctcgggcaaatcctgatcagacagataaaaaataaaaatttaaatttatcatttgttttttttaattaattattaaaaaaattgcctgatacgaagtggtctcctccgactctgaacaacaacaaaaaaaaaattttaatgaaaatttatttatttaaattaatttatttcgtttctaattttatccaaccgatttgacattaagaaaagtttatttaaggagttggttgaatttaaataatttatcaaatacctatttaaaagcttataggctaaaattaatgcaaaataaaaatcttaattaaataaaaaaaacaatataattaattaattaaattttactattaaattttaaaaaaaaacttatttaattgtttaaatgaaaattaaaaccaaataaaaataaaaccgaaaatttaagcattattgaataatcaaaaaaaaaaatattaaaagaaattaatatttttaaacaaatattaaaatatatttttttctctcaaatcaaattaattatgatcaccttctgtgttgctggtgcggttgttgttgcccatgggcatctttgtaatcgtcaaatttgggcgcatggacaacggcaagttacataagtcagtgtaacaactttggcatttgccgtccagacaatatttgtgcatttcaaatgcacaaaaatagtgctgcttggagcatgaagcaaagtaccattggtctaaatatcgggaatgttctcgagagtcagtctcggcatagattttttctccaagaattctcggcttttagcgatacttgggcatcggcttgtccgatttttcctgggtgcgaatcttaccaaaaaattttatctttcaatgcttttcagtaaagtaacaatggtctaaatttgggaatgctcgagagtcattcttggcattgattgtttcgtcaagaattttcggcgtaagcaattcatggacgttggcttatctgacttttcccggatttggaaggaatcgagaattttctttcaatggatttcggtgtcgtgtctatgtgtgacatgtttttaccaattcaattcattagtttcgattataaattcgggaaaaactaaatgatcgggttgaccgccatgaaattaaactaggattatcattttgggactaatttttggtgttaaatgacgagaattttcaaatcttgaaatcgatcaaatttaaaatggtcaaaattaccgtcgcaaacgaaagatgaacaaattttgtcctcgctagcacattccgtcatgttgccatctgtcgaa

SEQ ID NO: 15201 - DNA, 3341 bp, Heterodera glycines
ccccccccccccccccgtcgcccgcaaagtgccccaaaatgggggaccccttcgcatcgagggggccggtgtaaaagaggtggggggggggtcgccggcgaagtggaaaagaggaaaaattctgaaaaatttggctattttcttaacaaaactcattaaaaattctgaaaatttttcctggcggcgcctaccggcaccgctggccccctttttgcaaaattttcttgaaaaaagcgtgccgcaaaaaaaagtgcttttgaaaaaaaaaaaggtcgtcgatttacaggccgggaccattttgcaaaagcaaaattgaccgctgaccccctctcgacccccccccccccctccaaaccccttcgcaaaaattccggttgaccccccctttttcatgtatgtactcgaccgggtcccagacactacccggactcggttttttgaaaatccaatacccggtacccgacccggtaggtccgggtccaaaagtacactggtaagaaaaatggtttattgtttttttgggaaaaataaaaaaattcaaaaaaccgaaaccgaaacggtataccgaaaatttttcttcggttttttaaccgaaaccgttcgaccgaccctcttgtccggtctctagtttttatacaatatcaaaataataaaatttgaaggaaaaatagtattttttgcaaaataaatattttttggattttttcaggacgcgatacccggattaaaatcttggacccggcttttcaggaccccatcaataccgggacccggtttttgcccaaatacccggacccgtgtaaccctactttaaaccaatctaaaaacatgtttttaatgcgtttcatgcctcacgcaatccaggaaaaaatatgcatgtgcatataattaccaaccctagttattgcaaatttcaaaacataaaaaattttgcaaaaaatgtgtgctaccatctaaacaattaccgtaaaatgaatttcgtaactgacggaagaaatggtggcacggagaaaatgctaaacaatttggaaacaaaagcactgatttgtcgaaagtatggccacacctccttgaagttgttgacccaatctaagtccgcttgtgcgttcaaatttctgcgaaaacgcaatcgctttggttggccatcttttctcggagagtgcaaccatttggacaacgcttggccagaagaaattgttgcatttggcacatcaaaatcatcaccaaacgcagcgggcaaccgaccaaatgatttgattgaattcaatttgttgagatcggtgagaattgttggcgaaatgcgacgaagcaaatggtcgaaattatcaccacgggataagcccaattggtaaatgtttgccgaaaaaattggccaaatttcacgggcaaaaacatcccaaattggttggccattcgtagagtgtgatgatggaatccacaaatataaatcggtgcctcttttgtcgaaaatttggtgattggaacgaagaaaagcgatgacggaatgatcaacgtacctaaaaatggaaggaatgctttcattgccataaaactatggctctattgcagctcacacgaccataattttttttttttttgcaaatttagtgcaccataactttttcaagaagcatccaaattaaacattattagtattattcgatagccctaagaatcctttattagcctgcaaaatttcaaaaaatttcggtgggtttcaaaaaatttatggctgtcggaactctgggattccgactgccgatcaattgatcagcagaattgaagaaaggaagtggcgacccttccccctccctttcacatgccccgcgcaccccgttccactcctctgcccccatttccctccaaattgttaattgtttttctgcgttccttccattccccgcgcacaattaatgaccaatttgtcaaaaccgcaacttttctgccgccgtccccaattcggcaaatgagactccaaagaacgatgaacccccaaatttcccgttttccgcccattttgttcatctgttcattttgtcccccgtttttcatttcgtgtccaaattttcggcccattttgttctgctcacatttgccactttttatttaactttattgttatttaagcggccaaaaatgcccccaatttcacaaccaaaattcattaggcatttttgccgtttctctcccctcccttccatttgcctttaactgtgataaccccattcgtgatcattctttgacccccggttattgatttttgttctgtggccccagtgccctccatttcctgtcccatcccggtgcccaattccatttgtgataattccccggtgatggcatttctgtgatcaatttgtgataattcgttcaccatttcaaaatttttgtttaattacccaagtttgaggtcatttcccggaataaattttttattcattctgtgtctcgtccctgcctgtccctgaaccccgcaccgtggaattcatttggcccgaccccagagcaagtcgggacactaagatgtcagttttcgagaattctgaaattccggcactccatgccgaaaacattgctccaattgacatttgtcggccttttaagcccaaatggggacttattttgtaattcttccgtaccgttttcagttctcactaagatgtcagttttcgagaattctgaaattccagcactacatgccgaaaacattgctccaattgacatttgtcggccttttaagcccaaatggggacttattttgtaattcttccgtaccgttttcagttctcactaagatgtcagttttcgagaattctgaaattccagctctacatgccgaaaacattgctccaattgacatttgtcggccttttaagcccaaatggggacttattttgtaattcttccgttccgttttcagttctcactaagatgtcagttttcgagaattctgaaattcccagcacaacatgccgaaaattgctccaattgacatttgtcggccttttaaacccaaatggggacttattttgtaattcttccgtaccgttttcagttctcactaagatgtcagttttcgagaattctgaaattccagcactacatgccgaaaacattgctccaattgacatttgtcggccttttaagcccaaatggggacttattttgtaattcttccgtaccgttttcagttctcactaagatgtcagttttcgataattctgaaattccagcactacatgccgaaaacattgctccaattgacatttgtcggcattttaaaccctaaatggggacttattttgtaattcttccgtaccgttttcagttctcactaagat

SEQ ID NO: 15202 - DNA, 1627 bp, Heterodera glycines
taaattgaaaagcatttagagcgaattcttctgcggaaaatatggagtgaaaaaatacttccttggcgtcgactgccaggtcgctaaattttgataaattttttagttataaattaattaagggcgagccgaggaaccctgtcaaaagaatggcgcaagaagaggtttctgatgagcctcaaataccagtgaattgggtcctaaaaggatatttttcaatgcttttttaatttaggatgtggtttgtaacgaagaacttgaagagaacatttttggatgcgtatgctgttttacgaaaataaaataatattattaaaaaaatattaagccaaaacttttgggatgctttctccgaccgcacaaatctttggtaaatcagctataatacaaaattgtacttaattttgttagacgagcctgaaggtttgcatgcccaatgacctgagaaacgaggaacaatgtgtatgtatattttattctttattatttattcaaattaatattttttataaaggccgagcctttgccgccaactgaggaaccgccgacaactgcccaaacagttttaattattttttaaaataatttttaattcggttacagtctacgcaaaaaccaccggatgagatcccaattgaaactggaggaggcggccaagtatcataataagggcgagtgtttgtatggatttacatacatattttttaatcaatttttcaaaattaaaaacaaaaatggaaaaaagcgagttttatgggaaaattgtttgatggcacataaaaagttgataaattccaaaatgtacaaatttttacgtttaagtttacaaaatgaaaaattgtttaaaatattattataatttgaatcttttaagtaaaattttgaatttttgcaaatttttggcattttttgtggtttaaagcaatttttggtactatttagtgggtctttgggtgctttttaggcaataatttatgccaatatatagttttttattggtccatacaaacattcgccctaattatagcctaagatggctcatacaaaatttttttgccttctcagaagccttacgtggatgtgctggacgtggataactgcacaaacatggtcaaagaactgtgcaactgcgggtatgcaaattatgcatattgtgtgcttcgcgttggctacgcgcgcaccccctgctgccccagcgattacgacttggtctgctgcgcgaaagtgagtctaagacaaacttaacttaaatacttgcttataattttcaacagaaagccaaatccattgaccttgtccgaatggagtttgaagctcaaggtagggtttaatggggtgaccaattttctccatccaaccatttttcgtaaaataattttcacgtggttaaccttgatttaaaattctcaatctgtaaataagaatgtaaattgataggaaaattttttggccctatcgtaattagctttcatttcatgtacctaattaatccaaagtcatcgcttttgatattttggacacgaattattatttttgacaccaattatagtggaaatatttcatgtatttttcaagaaaggctctagaaaacaaatccaaaaaatttaagaagtcctaatcagatggg

SEQ ID NO: 15203 - DNA, 1624 bp, Heterodera glycines
acagtcctctcggcagcaatcgccttcctgctgatgaccatcactttgccatgatgaattgtctgtcctctcccctaaacgaaatcagatccaataccatgacgattttttctatttaattttgaaacaaaaatttaagaactggctttacgaacttttaaaacatacccataagattttttcaaattattctaaaattagtttaaaaaattcctttttatagaaaaataccttaaatttttttgctccaaattcaaaacctaaattttaatgaatttgtttttttcacaattttaatctgattcattagttagggtttttctgcaaaacccttaaccataaaaatcatgaaaaaatcgtcataagatttttaattttttatttattgagttcttttaatttttgtaaaattcaacttatatcaaagacatataagatattcaacttgtatgctttattttctgtgttgataaatataattttaatgataaattcattgttcttctttggattgatattaaatgtttataaaagctatttcatcaaattaacaaattaattactaagaaaatttttaaaaaagataacccagaaagttaatgagtaaaagttcgtaaaactcggtaaaaaccgaaaattttcaaaaaaccattctttaggtattttctcgattattaataaaaatgtaaccttctgaataaattcaaaatatgccaaaatgagtctttttggggcaaaaattgaatatttatgaaattgtgcccaagttgtagtacgattttattcagtatgctaaaggaatgcactaaatttcaaaaaaaaaaatttaaaaccattccaacttaagtttgacaaaatgttgaaaaatgtaatcaatcatcaaaagaaatataatcaattaaatttcattcattatgatcgataagattagaactcggattttagagagaatgatcaatcagttaattttttgaataagagttttgatcaattaagaaatttaaaatatttgaaaaattttaccattaatttgaaaacctaggtcaatattgttggtagaatgattttgtaattttttttaacgaaaaatcatattgtttttatttgtcagcattttcatataaattctgtcagctgttggttttgttaaaaattgccttaaaatgccaactttctatctatttcagacaacctactttagctattggcttctttttgtatttaaaagctttacataaaaaattgttgaaaagttttctcaaagcaaaagagttttttgggtcatttaaaaaattagaaacgcttgaaaaattttacacataatttgaaaaatttaggacaatcaaattaatggaatgatttttggaaatttttctttttaactcaaaaaattaaaaaaaaagtcatttaagtaaataggccaatcaaaaatgatgaaattaatccggcgattcatgttcttcgatttcttaaaggagcctttctgggtatttgaagacaggcccaaaattggcctcaattttgtcaccaggccaaaacaacgaaacacaagggaacagttcgggtgaagaagcattggcagaaatattaacagaacctgtgaaaaaataaaaattaaaatttt

SEQ ID NO: 15204 - DNA, 2534 bp, Heterodera glycines
aaaatagaacccttataataatggaaaaagtacaccacttcaacttgtccagtggcacagtggtagtgcgtttggttggtgtcgtgttggcacggagtgccgttggttcggttccgcttccctgtggttgatcactgttgttaagccccgcatttatgtgggtggccgtgtttggggttcacggcttaaaacgtcccccagtgatcgccgcggagagcggggcttgatccgacgtgcttttcgttcagcatggcgctttccatacagttttatggagatgtgctgggaacttgctcatggtggtatggtcgacataccaatcggctcgctttgggaggtttggtcagattggtggccacagatgaagccccttggtaccccaaccaaggcgggggttctgaagtatctcgggagttgtcaaacagaggtcgtagtcggcggcactgtttcctcctggcgcctccacagggagtccgtgcggggccacccgaacttttttgcattttttgtgtaactccctaattaataataattactaattatttttcctcccttataaaatgccaatatatttgcgtgcgcggcgaaaagttaaagttattttattttattgaagacttcattaaacttaattaaattattaattaatataatttattttttatccccctctatcaaatgccaattcattgcgcagtgaaaaagaattaatgttttttattttgttaaagactttattaatgtaatgagtttgttaaatacagtttatgcacttaatgatgattggaaaaaagaatcgaaaggttatacagaaaagcaacacaagtgataaaaaaaaatcatatacaaatatgatatgtatgattgaatatgttaagtataagtaatatggaacaacacaacggtttggcaagagaaaaatatcacaattaaaaaatcattaagtgaattactgtaattttctttaataatccgaacaaaaaattttcatgtgatcaatcaagcctgtaacatcggtttcaaattttcggaaatctgaaaatttttattaaataaaatgaaaaaatatgaggggatcgggaaggaccttaaattgacagccggtggcccgcacaacatcttccactgagaacgtttcgtacacctccaccaagctcaacccgtccgttgggtgaacatcaaacacagcctgatgtgaaaatattattgtttttttttgaaataaaagacataatttgttagtaattaaagtgtttaatttggccaattgagaactgaattttagaaaaattccggattaggaggaatcgagaaatcgacccggatcggatttcaagattagatcttgtttacaatttcgggattcttgatccaggtgcttttaattactcggataaggtatcgagaagatcctgaaaggatcaccccctgtatcccggtctctgttggtaaaccacaaaaatttacggcattacaacaaaaagttgctatgttaatttttataaatttcttggtctcgaggcttaataaaattttgaaatttgaattccgtcgcttcaacaaatttcagaatttcgaaaaatcgagaattttttggggagggaggggggaggggcattttttgctacggcattctgctgaccatttcggtgatgatacgacgaacaacatttttgccggtcaacggaagtgtacagttgtccaggatttttggctttccaccctttgcacaatgctaaaacagaaaaagcattgttctatgtaattgaatttgttttaaactttatttgtttacctccattgtgatcacaactcgagagccgggagcaccgaccaaatccatcgctccgcccattcctttgaccattttaccatgaaaagacacaaaattaaatatattttaataaataagtaaatttaaatattgccattttgtggggtcaaaaattttcgtaaatatggtaaagatcaggaaaatttttggaaatttaaacgatttttttttaagaaaattgattaaaaatttgcaaaaaattagccttttttcttgaaaatttttaattttctattttatctccggattttgagcccatataaattcggggcctgttaatggatagcaatagtcaaaacttactggaatcatccagtttgccagatcaccgtatttggatacttgtagagcacccaacagtgtcagatcaatatggccacgaaaattgaaaattgaatttactttttccaattaaaaagatttaaatgtaataaataaataccctctgatcatgccaaatgattcatcggagccaaaagtggaggcaccgggcaaaaaagtgatggattccttgccggcattgatccaatccgggtcctcttcaccagggtacggataaggaccctggagaaattttttttaaaattgtcaaaacaaaatttttttttttgaaatttaattcgtcgaataacggacgacgccaagaatgccattctcggactgcagatgcacatgggtgccggcgcgcaaatagttgggg

SEQ ID NO: 15205 - DNA, 1082 bp, Heterodera glycines
  unsure (1)..(1082): unsure at all n locations
gcatgatagtctctcaaaatgctaattaatacgatccctataaccttgatataaactctatcttttatttntaatatgcatacaaagtttgttgcggttctgatcacttatagactggtgatcaaagtttctataaaactaaaaataattaccgtatttcccaaaatagagctaccgggggctttattttttttaaccccctcaaaagagtccttctttagggggagggcactaattcagaggaggcgggtgactgtataatagggaatacggtaatttgacacaaaattcaaaatactattgtaaaattcaaaaatttaaaatattcttatagctgctgctcccttttcggcaaaacaggatcaaacgctaaaaaaactatcattcatctggtcacttaccgtacatgccatcgcggaactccagcgccgctcgtctggcaatcacttcgcgcgctttgtccccacccaagtctgtgccgccgccgttgttggcaccggtaggcggtggcactttgccatcatttgcgctgtcggcatgtgatcgttgacgatggatcagccgttcaaagggttttcggtagttttggccaagcacaattcgatgcgcataaatggacggaacatgcacctgatcagatcaaaaaaatacatataaaaaaggtaaattaacatgaaatgcgtttaagagcatttcttaaaaaaatttaggaattaattttgcaaaaaaaaaaattaaaataaaataaaaaactcagaagttcgaaaaattttttaaaaccaataagcgttgaaatattttcagaatatgggatgaaaaagtttaaaataggtaagttgattctcttccttttagtatccctgcaaagtattggtgagcttctgatcacttttaagaattaattttgcaaaaataaaaataaataatggaaaactcagaatttcgaaaattttttttaaaaccaataagcgctgaaatattttcaggttaagttagtcctgtaccggggagtgtgcctataaattttggtgagattatattaattataggaagagctaagttcgataaaactttttaaaata

SEQ ID NO: 15206 - DNA, 1390 bp, Heterodera glycines
ccccccacgcccgacctcaggacgggcgcttcgcgcccgttttttattttgttgagaatttctttaagttaatttttttcatattttattagaagaggtacaatgtgaattttaaaatttaaaacaattattgataaaaaaatgtaaattaaaaatttatttattattaaatattaaatcaaaactattttaaataaattaaaaacatctaaaaataagcaaaaaaaatacttagaaaaataatgtgttaccgcccggattcgaacttgcccccgccccctcaaaatgatgcctcagaatccccaatcacacagggattctgaggtcttaacaatgtcaaaagtaaaatctgattacgtattcgtgatcagcgtcataaaatagccctaatgacatgttttttgaagatttttggtgaaaaaatttttcaactcaaaaatcctatactcacccctttggtcccgattccctaaatcacttttatttctataacttttttcaaaaaagtgataaaaagctaaaataaaatttctaaaatagagcaaaaaattgcggatttttgtattttttacttttccaaaataacttttcagaaccgagttcagaatttttttctgaaaattcgaatttttccagaacttctggaataactttttttagattcatgatagagaatctaaataaaagccataaaattctcctgatttttctccatttttttgctcggtgtagaccgtatacttttggtatatatgggcgggcgctgacatgagcgcttcgcgcaaaggacttcgttgctagtgcatgcgcgtttgataagtgatgagcaagtgcattcggctgcttcgcggccttggccgcttcgcggcctcagacgggcgctttgcgcttctaaatattgtggactcatttggccgcttcgcggcctcagacgggcgctttgcgcttctaaatattgtggattgttgggaattttcggcagcttcgtggccttaggacgggcgcttcgcgcccgttttttaattttgtggggaacattcggccgcttcgcggcctcagacgggcgcttttggccgcttcgcggcctcaggacgggcacttcgcgcccgtttttaattttgtgggaacattcggccgcttcgcggcctcaggacgggcgcttcgcacccgttttttaattttgttttggacattggggcgcttcgcgcccgtttttaattttgtgggaagcattcggccgcttcgcggcctcaagactggcgcttcgcgcccgtcttttaattttgttgagaacaatcggccgcttcgcggcttcaggacgggcgcttcgcgcccgttttttaattttgttgaggacattgggacgcttcgcgtagaagaggtacaacag

SEQ ID NO: 15207 - DNA, 3321 bp, Heterodera glycines
  unsure (1)..(3321): unsure at all n locations
aaatcgaaatcncggtgccaaaaagtttccataaattgacctttggaatccgaggccccgaaattgccgtaaatcgaaatccggtgccaaaaagtttccataaattgatcattggaatccgaggccccgaaatttccgtaaatcgaaatccggtgccaaaaagtttccataaattgatcattggaatccgaggcccccaaatttccgtatcctgtgccaaaaattttccataaattaatcattggaatccgaggccccgaaatttccgtaaatcgaaatccggtgccaaaaattttccataaattgatcattggaatccgaggccccgaaattgccgtaaatcgaaatccggtgccaaaaagtttccataattgatcattggaatccgaggccccgaaattgccgtaaatcgaaatccggtgccaaaaagtttccataaattgatcattggaatccgaggccccgaaattgccgtaaatcgaaatccggtgccaaaaagtttccataaattgatcattggaatccgaggccccgaaatttccgtaaatcgaaatccgatgccaaaaattttccataaattgttaattggaatccgaagtccccaaaatttccgtaaatcgaaatccgatgtcaaaaattttccataaattgatcattggaatccgaggccccgaaattgccgtaaatcgaaatccggtgccaaaaagtttccataaattgatcattggaatccgaggccccaaaatttccgtaaatctaaatcctgttccaaaaattttccataaattgatcattggaatccgaggccccgaaattgccgtatatcgaaatccggtgctaaaaagtttccataaattgatcattggaatccgaggccccgaaatttccgtaaatcgaaatccgatgccaaaaattttccataaattgttaattggaatccgaagttcccaaaatttccgtaaatcgaaatccgatgccaaaaattttccataaattgatcattgtaatccgaggccccgaaattgccgtaaatcgaaatccgatgccaaaaagttctttaattttcatcacttgcaattcgaatgccaatctttgtgataactttgacctacaaaattgttttctaataattatgcatttattgtccattaaacatcccattttggcacttttcctatgcatatctgtttaacaatttgccgaactgtatattatttattttatatgttatttagagttgattgggaccaggattttaagaaatcgggggacccgtgcctttgcgtggttctactgcactttatgagccaaatcaatttttatgagttttcaatggcatttttatgagtccaaataaattgttatggcgctttaattattcaaaattctaatgtgtaataaaaatttttttttataaattaatggcaaataaaaatcaaatttatcaactaaaagtcgatttttaaaaacgctttttcaattttgcacatttttcaaaagagaagatgaaatgccgaaaaagtggcataattatttagtagcaaaaagtccaaaatagtgattcctagtgacgaatagtggcatttaaatgagattttctatttttagtgcatttctcagctaaagaaagccgcagaaaaaaaagaagttaaaaaactaaaaatcccagcaataattatgggcccaatcacaactaaaagacataagactaattatgggtagttagttgcttgcttggactcattttgactcatcaaaatttgattggacaattaattatctgaagtcggcgttacgcgcaaatgcccgaactgtgtcgagggataacctgtaaaaaaacagttttggttcagaattccgttcttgacaacgctaattttcccgtggttttctcgattgccctaacgggcacttggctattcaatttggcaatatgtacccaaatcaaatcgtcatcattgttcaattggcttttctgttttataatcagctgctgtttatgattgttttaacatttgatcttgttgtattattgatcacacatatttaataaactttttttttataatgtgactcaatttgtaatcagcctgacaagcggtgtaaagcgggcatggaattccgagacacgtgaagcccaaaaaatttcttaaatcggaaatagcatttctgaggctaaattttttcgaaaatatcggaattccgtccacttcaatggcacgaaaatcgtaattcaagacaagaatgctgtatctctaatttattctcgtatattgaatggtttttttttgtttgtttaaatatgtatgtattgtatgatttcaagagaaataaaatatttaatattattcattttatgaatgtattcttctcaatgctctatcataaaatatgcaggcccgtagccagaaatttttttttttttttgctcttcgagatcctagaaatttttccattgttatttcttagaattatcagcgccgaagcgaaaaacagggatttgtagtgggcttgcgcctaaaaatgacaatttgaaaattttttttttggaaattttggtgaatttgtaacaattttgtataaaatttcaaaaatttgcccatttcttgaatttttttgtttttcattaggggggcgtgaatcccccccccctgctacaggcttgaaaatttgttatttcttacaaattcatgtggaatataaatgtatgtactagctattaaaaacaataattttaattaggtgtctttaattgttgaatgttatgcctatatgtattaagtttccatgcataattagtgtttcgttcgtttttcctatgtttaatgagtgaaaaattgtttattgtgccatcaaaatgtcacccaataaatttatttcgctacagaatgtcaccatgaaaaatttctgaaacgaaaatttcggaggttcagcccaaatacatacccactaaaaatggaaattttgaaaattattaaataaattagattaagccttataaatggtcaaacatatttaaatttttttttgtgtttcgcgatttttggaaaacaaaattcactgaaactttttttaaaaaacttcccagcgcttaccggaagaaaggctttcgtggaataacaaattttgaaaaatctaaatataataaatgaaaaaaaaagttttacggaaattttctttacattcgctaattttaaattcaattaaaatgcttanaaaattaaaatgaatcgataaatgaatatgcagaaaaccatttgctagtcatttaacagtgttgaaacaaagaaacaaaaaactgctatgattaaggaaaattac

SEQ ID NO: 15208 - DNA, 3958 bp, Heterodera glycines
  unsure (1)..(3958): unsure at all n locations
aggagaagttcgggttcgaaacaccatttttatttcctttttattgtgattctaaaaggattacgtgcaaactcgtcgactccgtcaactgccgaatcagccgtcgtcgaatctgccgcgggtccgtctacctcgagtgggcttaccaatggcattccgatgttgagcattgatcgtcccgctgcgagttgtggcagtgcatcttatccaaagaacagggataccataatgccgcaaccgcccgtcactcctagcaaccaaaatgaagaaccattgcccgagggatgggagacgcggatggaccaatacggacgccgttattacgtggaccatactacaaaaagcaccacatgggttcgcccgagctctatgccattgccacccggatgggagtcccgtcgtgacccgcgggggcgtgtttattatgtggaccacaacacgcggaccaccacttggcagagaccaacggcggacatgttggcggcgcatgagcaatgggagtcgaaccgttcacaggccatgcatcagtgggagcagcgttttctttacacggtatttgttactgaacaatttaaaaatgccctcaaactttaagcatcacgatgatcctctgggaccattaccggagggatgggaacggcgtgaagacccaaacaccgggcgtcattactttgtcaaccatcagaataaaactacgcaatgggaggacccgaggactcaagggtcagagtgattagcgcaattatatttatgattacatggattactgtctttaggttaacggatgctccgctgccggaaggctgggaaatgcgtatcacagagcaaggtgtgccattctttatcgaccacaacaacaagacgaccacctacaaccacccgcggactggtcggcctgttggtgtgttctttttgttcctacccaaagtgattgttcaatttcagggcctcttggtggtcccggcttacacatggctgccgacaaaacattcaaaaacaaagttgctcagttccgttatttgtgctattcaaacagcgtgcctaaccatgtgaaaatttctgtgacaagaaacaatttgttcgaggattccttccaagaaataatgagaaaaaaccccttcgacttgcgtcgtcgtttgtacattcagtttaaggcggaagatggactggattacggtggaattgctaggtattttgggttattatttgtttttattaattgactaaataataataataactttcagggaatggtttttcttgctctctcacgaagtacttaatccgatgtattgtctgtttatgtatgccaattcgagcaactacagtctgcagattaatcccgcttcttttgtaaatcctgaccacttgaaatattttgagttcatcggtcgcttcattgctatggtgtgttgttgtgacccaatttactatcgtaactaactattagttttacaggcacttttccatggaaaatttatctacagtggtttcacgctcccattctacaagaaaatgcttaacagaaagatcactctcaaagacttggaatcggtcgacactgaattttacaattccattgtttggagtaagttaacagaaaacgtcataattataaattattaaaaataaaagttcgcgacaatgacattgatgaatgcgacatggaattgtactttgtggttgattatgacctacttggtgaggtcaaaacgcatgagctgaaggagaatgggactgaaattgctgtaactgaggccaacaagaacgaatatattgaactgctggtggaatggcgtttcaaccgcggaattgagcaacaaacagtggcatttttcaacgggttcacttcggttttccccctccaatggcttcaggtatgaacttttgtatttagcccttaatttatattgttttttagtatttcgatgaacgtgagttggaactgctgttgtgcggaatgcaggagattgatgtcgatgattggcagcgacacactgcctatcgccattacgctgttcaaagcaaacaagtgatttggttttggcaattcgttcgctctttggaccaggaaaagcgttcaaaactgctccaatttgttactgggtaacttacaattagtttttaaatttactgactgaatcgttatttcacttttcagtacatgtcgggtcccggtcggtggtttttcggaacttatcggttcaaatggtcctcagctgttttgcattgaacgcgttggcaaagaaaattggttgcctcgttctcatacttgtttcaaccggtaaacaaccgatgcttatcaattagcttcttattgtcttcatactgatttaatttaggcttgatttaccgccctatcggtcgtacgaacagttagccgagaagttgacagcagcaatagaaatgacagaaggctttggcaacgaataaaaatggggacaaattgagatatcgactctctctaaataaaatgtgtactgaccttgattcagaagcattgtggccttttatttttagtgttaaggtattattgataagcccaatgccacccgattgtgagccattcattgctgctgtttttgaaaccaaatatgcttatcttaataaccctgtgatataatatgattggaaacaacttaagcacagaaccaaatttttaattctgcatccaatgcatttcaatttgtaagactactttcaaagcatcctaaaccctccctagatcgattctgtcattaattagtcaattttttatattacattacaaatttgtattgaatgaattcgatgaggatcacaagcctttaaaaacattcttgtctttttgtttcacctttaaattgaaattgcctttattatacagcaattcgagtgctacaaatagttcgaaatggtaactgcggaagataccgttaaaacaaaggaagaagaccccaaaaaaacgacaacggacgacggatcgagttcagaggaagaagtgcccgagctcgaagagggcgacgttactgaagagcagaaaaaagttgctgaggcggccggactcagtgagcaggtggctgattgattggtggtgtcatgacaactcgtacaaatgcttacaatttgactaggcactttcgaaacacaaattggacaaaaagttcaaacaaattaacattttttgtcttaaaattttttaatgtaggagttgccattaacctgattggtttgggcagggagcccatcgaggcattgatgtgctaaatcaaataaatcggaacattttaaaggttgccgaaaagggctccaaacaatcgcgttctgaaaagaaggctcgtaaactattcagcaaacttggtatgcctttcaaagttgttcattttcttttgtttataaggcctcaagcaagtgcacggcgtttcgcgcgtatgcatccgtaaatcgaagagcattttgttcgtcatcaacaagccggacgtgtacaaaagtccgggctccgacacatacgtcgtttttggcgaggcaaaaattgaagtgaggcatttgccatcgttcgtttttcagcttggtatttttatttggaggatttggcacaacacgctcaaatcactgacgtggagaatttgaaaccgccctcaatcattcgcgatgttcgcaaccgaatcacaccggcggaggaggaaagcgatggcgaagaggtcgaaagagtactaaaaaaattgataggaacatggagcctggacattgcgacaatcttattctctctcacatctaaatactaactaaaattgtgcttttcaggctgatgctactggaattgaagaaaaggatattgagttggtgatgtcgcaagcaaatgtttctcgaaacaaagctatcanagcattgaaaaaggctgacaatgatttggtgaacgctattatggtgagtcatccgattgaatgagtgacattcttttcgtatttctattcataat

SEQ ID NO: 15209 - DNA, 2045 bp, Heterodera glycines
  unsure (1)..(2045): unsure at all n locations
taaaattgaaaacgttttttttaatattttactcgtaaaaatcattcacaaaagtataaaaaatttttttttaatatcaaaattcgtgggcacttcgtctgacagtataaaaagtgccattcccgttattctcgacggcattttgatggtgccgcattttttgttgttgtgcccgacgaggctgtatttcacgttcctccggcctaagttcaatactttgatgctcaaatatttgtcgtgtggtgccaacattggcgattgactcgtggctaatttgttgccgaatttcatccaaattatacctaaaataaattaacaaacaaatgatgatctaattaaggaaattattgaacaataaattgcaattaaatagtaaattttctcattgccatatttaaaataaattttgaaataaatttaaagattattttttaatagggttaggtcccgacccgatgctgagaatttcaaatgtcgtctgttgcgctccaaatcggagaaaattatttttttaatgactttctaatagtttttcctgagaaaatcgttatttcctttttttgactttttataaaaattttatttattttttttgctttagaaaattttagttttttttttacgacccatctatttacgaaaattttgctccccgatgaaggagttgctcccctacatttctaaatttcttcagccagccccaacaaatttagtcggcggattgcctcgccgatccccgacttttctctccccgaaggtcggggcttaaccccatttaaaattaaaaaattattcattttttgcaaaaaaaaaaaatctcaacacaatttaattttctgttcatttttattttaccaaggcgccttttgccggtacaaaatttcacatgcgcgtgcctgtgccatttcttccgggttcttaggccgtgccggaacaaacattcgttttgcatccttttgaagctgtttggacacttcctgctcaatgtatggcttgtgcaattccagctatcaaatttaaaaattaaataatttttattttttcaaagttttataactttggcatacggtgccatccgctcggtctccatcagtgattgatgccgatattgcggaattcggctgtcctaaattaaaggtaaattaaattaggcaaatatcagttttttggataagttgttcaccactggaatcatctctggcgttttatgtgatgccacctgaaaatttgaatgatgtatttgcgaccaaaagttttaatttaaagttttcaaaaaggattaaaaacattttattatcattgaaaattagacaatttttaaatgttccaagcaatcaattgattttttcatgttagcttttaaaaaccaaattcaacaaaaaaacacagtcccatgccttgatccaggccatgataaatttatgagaaaaaaaaaattaaaatttcattttattttattttctttaatacaatttatttcaatttcctaattagccaatcatttataattgaagtggaatatataactttatttaccacattggctctaattagttaatgatccattttaatcatccaatgcttacaagtgaagcagtaagcggatctactgagcgccatttcgggaacaaaaattggcgccgagcaaacagcgctgcgttgacctgttcctcgtactcaaaaaaaatatatgaaattttttaaaaattttacaaaatttttttacttctttttgttcgctctcctcactgatccgctcctcccacattgatcgcattgaagacaaccgacggcccaccagcagctgtgttgcttccctctgctgctgctcataatcagtgttgtcgccttgttgctgatcaagaatgtggctgatccattgactngtgttcaacggaacaattccagcagaagcagcaccagcagcagtaagttgggtttggcaaattgtgctgaaaaaacaatggaaaatattaatattgtaagctaaaaattttataatcaaaattgtttatttaatttttaatttatctctttaggaaaag

SEQ ID NO: 15210 - DNA, 1625 bp, Heterodera glycines
atttcttcgcggcggtcacatgctgtgccatccgtgtcgaatgttggctcgtgtcaggcgggcttgcccccttgaatgttatgtgctgtgacacgtccggactttccatgattgatgacaaattactgcttgacaccatggatgatgtagcggttgaaatgtgatgttgaatatccataatttggaccaaataaatgtgaataaatataaatgaaaatttgtattttttaaacaaatattttttgataattaaaattaaaacaaaaagtgaaaattttgtattttttgataaaaaattataaatttaatgaacggataataattatttgtattttttgatatttagaattaaaaataaaagtcaaaaattatatatttaataaaggagataataattatttctatttaaaaaataaaaattttcaatagtaagaatgaaaataaataattattgttgcctttttaaattgctaaaaatatttttacaaaataaatatatcattatataaaagttaaattcataaaaatgaaaaatcgaaaataaaagaaataaaattcttataccattaaaaaaagaactttttttattatgacaaatctttgtcaaagatttatatattagcaactaaagtctctactggctttatctcttcaactgcagccgatgcttcaaatgtgtgtttgttaagcaaacatcgaacagtgagtgagtggggcttaacttgcagccgaaccggatcagctcagatcggatgtccacagaagcccatttgtattgattggtagcaaaaaaataatacattttttatttcattttttaacttttatatacatattttttgtttttaaaatggtagtatttattgtatttaaagtcgccggtagccaacattacataaatgataatttataattttaaagagttatttttgaaaattttaatcgatctaaatctgtttttttgagtttaaggggggggggggcggcggctaaaaaatgctaatgggcaaaagggggctcaaaaaatgattgattttttttttgtgatgagctattctactaaaataaactttaaataaaaataaaagaaagcttttttaatttaaaccaaatttaatatttacaagaaaatgaatttatttaaaaaatgccgtttaataaatggttttttttcaatagttttaatggaataaaaaatattttttatataattttcgaatgtttcatttttgaaaagtgccacgagcgtataaaataatgaatttgtcatgcaataattccatttccttgcgcaaagcaccaatttgtgtgattttatcatcaattagttgcatttgtgttgcattattgggaagcacctgcagcaagtcatcatgaacatctgtgaatataaatataaattaatctgataaaaaaaaatccttcttgataaaaaaatattttaaacaatttttttattatctaataaaaatggaaaactctgaattttgaaaaatttttttaagccaataagcgttgaaatattctcaggttaagttagtcctataccggggagtatgcctataaaatttggtttggttttattaattatagaaagtattaagttcgataaaactttttaaaat

SEQ ID NO: 15211 - DNA, 3626 bp, Heterodera glycines
  unsure (1)..(3626): unsure at all n locations
ttcgttcacaaattcctgctttttcttttcataatcttacttgagtttcttttatttttatttaattttaattctcttttcaatttataaattttctgtcgactaattcccaattttttcgcaattttttgctcaattttattccaaatttttgccgaatattttccctttttcttaattccttctctaattgcgtgaaatttgtgaataatttcgattttttgttgaacatccaactgatcgttctgatcagttgattcattttgatcattttgatgaaaatttgcattttgatcagtctcattttcattttcatctcctccaattattatttcattttgccattcttcgccaaatatttcagcaaaagttggtcgacattttttacacagattaactgacaatgttttgtcagttgaattgtttatgattaagaacacaaatataaaaaggagaaaaagcatcactaaaaaaaataaataattaattaattaataagtttttaatatttttaatatatatatatttgtattaaaattaagctaatttcttcggaaaataattttttatttaatttttaatgaatgtggagaagcattgccaaaaatgcgatcaataagtgaaactgatcatcaatagattttcttaataataaaatattaataaataatattaaaataattaaagccatgaatttcatcataatttcaaatgccatttcgtaattacgtcccattggatgttttcacacttcatcactagggcttcaatttttatttgctgagctccctatggtctgaaatacacgaaaaacaagttgttgttgttttttggtggttgttaaggtacttttcgagttattagggcctattttctaggtttttctttttagagcctaaagcctaaaaaatttaaatttatataaatcataaaatttttacaattatttgtcagtcacaaaacaatcgccggggggggggagggtaattaggcgcgacagacacgaagacaagcaaaaaacactaataatatttattttgattgcgtttaattactcaagcatgttttttggtcaatgttctgtcacatcgaaatatttatacggtgacggaaaagaaaaattttttttcattttctccaattatttcatttgcccatttttcgccaaatatttcagtaaaagttggccgaagttttttacaaagattaactgacaatgttttgtccgttgaattgtttatgattaacaatacaaatataaaaaggcaaaaaagcattaaattataaataattaattaattatttttgaatattttttattaaatatatttgtatttgaagaatcagtcagcccacctaattacctaattaagtgacaaaatgagcggaaaaattaagaaaatgaacacacaatgaaatgtacagagaacagctataaaattaaaataaaatcagaaaaaccacatttttgagtggaactacttattttatttttctattttttattattttatttctcactcacaaaacatttgccgcggggggtaattaggcggtgcggcggacacggaagacaagcaaaagacagtaattaatgataatttatttggttgcatttaattactcaatcatgtttttttggtcgatgttttgtcaaatcgaaatttatatggtggcggaaaagaaaattgggaattttttttttaggggtttttctacaccgaaaacagtaaaaaaaagaaattgacaattttaatttgtattggtcaattaaaaaacaaacatataaaagagggaaaaattataaaaaacaaaaattagaataaaaagcatcatttgaaaccaatacaaataagaaaaacgaaaaattacgaattattttcctttttccatttctttagggtggcaaatccaattttcaaaatgccagcaatttctttgtcacttaaagacggattttctcgcttcattttataataaacattcattttgcgcattttttcttcattggagtatcgaattccatctaacataaataaataaaaaatattaaaaatttaattaaaaatatacttttgcccatttcaatgccaaattcttttttccatttaatgaatgtttctttgtgaatgcccaattctttcgcaaattgcttctgttttccattttcggacgttcttttaatctcgtcaattcgtgcaataaattccttctttttcatttcgtaataattttggtcattttttatatttaatccaatttcttttttccatttgtaaattttctgtcgactaattcccaattttttcgctatttttaactcaaatttattccaaatttttgccgaatatttcccctttttcttaattccttctctaattgcgtgaaatttgtgaataatttcgattttttgttgaacatccaattgatctgtctgatcagttgattcattttgatcattttgatgaaaatttgcattttgatcagtctcattttcattttcatctcctccaattcttatttcattttgccattcttcgccaaatatttcagcaaaagttggtcgacattttttacgcagattaactgacaatgttttgtcagttgaattgtttatgattaagaacacaaatataaaaatgagaaaaagcatcactaaaaaaatataattaataattaattaataagtttttaatatttttaatatatatatttgtattaaaattaagctaatttcttcggaaaataattttttatttaatttttaatgaatgtggagaagcattgccaaaaatgcgatcaatatttatcataatttcacgtggcatttttaaaagaaataaaattgagataattgaagtaaatttgatttgaaaattttcattaatttattagctttaactttgggttttattaaataaaaatttgaaatgtaaaaattttttttaatattttcattgaaatttatttattattaaattgattataaattaaattaaacaagttatttttgaaattcactgaagtcataaaatattacaaggaaaactttttctgtggttgaacaaattacaataagccattttatacaaattttgtaaacattataaaataaaattgttggctaaataaagcaaaaaaaaggaaataagaatagaagatatctcaaaaaaattttgtatccaaaatttatgggatggttcttaatgctttttgaactgagtcttcatagccttatatgtgaaaattaaataaatcaaagcaaaatataagaaaattcgaagcttttttatttaaaagttggttaattgtgtaaaaaaaatcaaagaatttagagagcagcacaccactaatgatttcaaacaaatggtattcaatttaattattcaaccataagaaaagatagaaacccataaaatttgaagaaaaatctaaaaaaactttcattactgagactgaaaaagtggaatgccataaaataagaagaaaagggattttaagcaaagaatatgggatatagaaatccaaaaataaagtggaatgccataaaataaaaagaaaagggattttaagctaagaatagacacattcaaacccgaaatcaagtgaagtgccaantaaaatca

SEQ ID NO: 15212 - DNA, 3226 bp, Heterodera glycines
ctgtaattatatctaattagtagcctaatcataactcgccgattgttcaaatgaccttttcgcgtatttcggacctgcataaacacaaaaatagtgtgctgatcgtgcaccaaaaaggtgtctttatccacagtaaacgcttcccaaaggcagtcatcgtactttggggtgccattgcgttgggttactgtaatgccaaagaactgaccttttggttgctcatggaagaaccctcgcgcggaattttgctcagctgatcatccgcgggtgaataaatgtgcaaatcatgggcatcatctgatcagcagaacatcactttgcactcaagaaatgttgttctccaaataccgtaaaaaatggtccgaattccgtccggttcactgaacaacattcggatttcggacgaatgtttgaagtcgctgacaaaacgaccatgggctaatgagtaataattgaggaagcgcgactaaatgggggggggcaggaggaatgttaatcccctggctttttattggccaatttggcttgtcccttttgacccgtgtggagtaaatgaagaatttttctgatagatcggcgtccaaaatcacatcacgcggattcgtctcgttggagttgggaaaaagcacgtcatttgtcatgtaattatcggagggatcggaatgatcgctttgggaacggatgatctgaacagagggcatttggacaataccaagcgatcagtgatcaaaagtaagagtgataaaatggtaagtgatcaaaagcgattgattaggatggtattaactttgtgcaaatgcacgcgattgtccaactgcgccattacaaaatcgcggttcagcttcatcttcacaatggtcgtcatatagtcatgttcgtacataaatgaagtgccattgcgcttgatttcataaaaccatgctttgctgttcagcacaatggcaatgtgtttggcaccgacggcgattagcgaaggctcaattttgatgttcaaattctgactgggttgctgaagggggaatagatgagctgatcagtttggcattgatcagtcttagcctttggccagatgagttaatcagtttggaaatgatcagttttcgatttggcattggtttttgcaatttgattttcccttacaatttctccgtcttggtaaatgctaatctccgtcaacgacgccaaaacggcgatatgagtggacgaagcggcggcgagcattggcaatttggtcagatatacacaaacggcacccgaccgtgccgaaaccgccgtcatggaaccatcctccgagcacgcgacttcgaccagtccgctgtcgtccgagtcgacgttgaccaagtcggaaatctctcccaaatccaccaagtcgcgtcctttgagcctaaaaagagatcttactcaggcatttcgtggtggcaaattcttacaaattgtcgccgatggaaaacattttgcccagcggctcattaaccgtaatggaggccaaattggttttgtattcctggatggagaacaattcctggctaatagactcagccgaccgctcagctgacaaacagacgataaagccttggtctgatcaaaagaaatgccaatggaaatgaaaaaattgacaaaccaaagccaaccaacaaatttccactgccaaacctaaatttgaaaacaatcgaatccaatcttctgtcagtgccacgccctctctcaccattctgtgcgcaccaaattgccgtatcgctcttggaattgcaaattggtcggtaggctgggattgttcagccgaacgatcatcaaattgcgacgagagatgatggcactgatctgatcggtgggatattttattaccttttcataggttgatcaaacattctccggcattttctcttgcgattggcattccatttgctaattacccccactaattgctctccgccctctcacaaagtcttcctcgcgttcgccggaaaaactgcggaaggtggtgagtttcaactccgcgatttcgccgttgcatgtgaaagtgttcagcgtttcgccctcggcgttgttcatcgtaatcgcagtgtcctccgacgcgagcacaaaaacggtgccctccctattccaaacggctgatctgatcgctttttgatgctttcccatcactggcactttccttttaaagagatcttgcttcaaaattaatgcttttttaaatggcaccgtgaaagtcggtaattgagcagaatgaaattgcctttgttgtccccgacgagtaaaacggacgaattcggagcccaacacaaaacggtcggaagagccctaaagagcggcaaaactcacaaaaacagtgccaaaatgatcaaattgactttgccccggtggacacgtcgacagtgttaatgtgattggtggaacattcgtagacaaccgaaaatggtaaattctgttaaatccacgctcatttgtcagtgccacgggtcggtatttcgacagggaaatcccacagttaattttgtccggtctccagacccctgcccgatttatgaaaatgagattccgccggtcctgcagtttacccaaagtaagccaaaatgctgggactgttcccacgacttttgttcgtcctcggtttttaaaaatgcaattcccgttcccaatcaaactaatgcttttccagcagaaatgttcatcgttcccaaccaaagttgaagcgcatgaatttgcgatggccaaaaggtccccagttgaatcccatttcattgtggtcacttccctaaataaatgattttctgtccaaattgccattctttgcttcgtcgctttactcgttgatgttaaactcttcggtcacttcgctgaatcggttaagcaatcgcaccgttccgctgcttctgttatgatcaaatcacttttcacacaattttccatcttcttttttgacaaaccccgcgatcgcaatgctattgcccccggggcgccattcaaaaaggggggcacccgggccgtacaattgggggttgtgttcgcggaagacgagctaaactaatgagacaattagcagggtgagtaatgaacaaaatgaacaaaaattcaaatggacgaaacggacaaaccttcattcgaagttctgctgatcaacagaaactgttcagaaataaccaaagctaatttgatgaatggttggcatggcgacgaaaggaaaagtggcgaaagcatttgaccatttttgggtgttccttttgta

SEQ ID NO: 15213 - DNA, 1067 bp, Heterodera glycines
  unsure (1)..(1067): unsure at all n locations
aaaaattgagaggaaaattggaaaattattaggagcaaatcggcaattaatacaaaaatggaaaaaagaattaaatctaaataaaaataaaataaaaaaggaattttatgagatgaaaaagagtgaattcattgaacgatttgatgaatttaaagaattatatggccaaggcaaacagaaagaatttgcgaaggaattgggcatttgtgaagaaacatttttaaaatggaaaaaagaattggcaccaaaataccacaaaagtaagcgaatttctaactttttaaaattatttattattttcagcgctaattaaaccttcaaattatgacaaattaaaaaaagatgaagcaatattttgaaattaaaggaaaattttaattttatttgtttaattaattaaaaaagcaatttacaacatttgttggatatgaagccaattatggtcaattaattattttttttgaattatgtgcccaaaaaaaataaatcattttgagtaaattgctacactttccttttaatttattttttccataaaataaattattttataaattattattttttgcataattatttcttaaaaaatccgagtaaaaaaattgatttccatattatgtatgaattacgtcgtgaatcacatattaatttttaaaatattgttggaaagaaaaataattgcgtaataacatttaatgcgaataaaatattaaataaattcatttaatgcaataaattcaatttccaaaagtaaaaatgaatttgtggcatttattatttattatatttttctttatttttgtaattaaatccggcaaaatccaaccaaattttgaagaaatatttggccaaagatgggacaaaaatgaaagtgaagaaattgtgataataaaaattgaacaaaacgaccaaaaggagcaaaatgaaactacgggcattgatcaaattggtggagaaaatggaacggacccaaatgatcaaccaaaaagaaaaataattttgaaatttgaagcattnattnngaaaaataaagaaaaaggaaatatcaaagaaaagacccaagcaaa

SEQ ID NO: 15214 - DNA, 3009 bp, Heterodera glycines
aatatcaaagaaaagaccaaagcaaaatggagagaaaaattgtaaaattattaggagcaaatctgcaattaatacaaaaatggaaaaatgaattaaatttaaataaaaacaaaattaaaaagcgaatttatgaggagaaaaagcgcaaattcattgaacgatttgatgaatttaaagaattatatggccaaggcaaacagaaagaatttgtgaaggaattgggcatttctgaagcaacattttggaaatggaaaaaagaattggcaccaaattaccataaaagtaaaagaaagaatataattttagtgaaattaaaaatgtaattttttatttaagaacaccataccaatgatgacaaagtgaaaaagatgaagcaatattttgaaattaaagaagcaaacccaaaagtgagtgacgcaataattgccgaaaaattggcaattggattttcaacgatgagaaaatggaaaaaggaatgttcatgaaccatttgatcagtgattttatttgatcatgattttgatgaattatataaggataatttgaaaatttacaaaaatttatggttataaaaatcagccaaaaaaagataaaaagcccaaataaaatttataaaatagagaaaaatctctctccgctatcaaatagtaggggggggggggggtcgacccgactccatacgaacgaagtccaggggggagtcgacgggagtcggagaccaaaattttcgaagtactccagtcatgtaaatcaactttttttttttttgcttttcaaaacggctttttttggggcgcgctttttccaaaaaaaacttttggggaactggaggggggagtccggtggtgccgatagacgacgccgggaaaatttttaaaaattcgagtgcgatttgttaacagatttatgccaaaaaattatcaaattttgcaatttcaagctaaatttttgaattaaaaaacgaaattctatttcgtataaaattacgatatgttactcaatttcgtaaattttttgaattttttataagcaatgattaaattttaaaagattttgttaaattgtttaaattctttttgcctttacaaagtcgcctctctcttaccccttcgtctccgacctttcccaacatttttcacatttttgtcccaaccaatatgaagtcccctcctcttttgggcccctcatatgaacgaagtcaggggggtcgacccccatgatttctctattttgccttggctttcgccattccttcggtcgccgccttggccatttttttcgttgcctcaataaataataatttttaatttctaatcaattaatttagtcaaagcaatatattctgaaataaaaattattttcccatacaaataattcctaatttgaaatgaatttgtggcttttaatatttattatattttgtatttataaaattgagtccagcaaaatcctaccagattttgatgaaatattcggcaaccggtgggacaaaaatgaaacagaagaaaaagcgataaaaattgaacaaaatgagaacacacaatcagcagaagttggtcaaatggatgaagaaatggaaaatgatcaaaaaaatgtcaaaattaatcacaaaattaatgatgaagcaactgatcagcaaaagagagaaattgtcaaaaaatttgatgcaattagagaaaagttgagggaaaaaagaaaatttgattggaaaatccgaaacaaaattgagacaaaaattgcgaaattattaggaacaaatattaattcaatatggaaatggaaaaatgaattaaatttaaataaaaacaaaattaaaaagcgaatttataaggagaaaaagcgcaaattcattgaacgatttgatgaatttaaaggattatatgcccaaggcaaacagaaagaatttgcaaaggaattgggcatttctaaagaaacatttcgaaaatggaaaaaagaattggtgccaaaatatcataaaagtcaaagtaagaatataattttagtgaaattaaaaatgtaatttttatttaagaaaaccctaagaatgatgaaaaattataaaagatgaagcaatattttaaaataaaagaagtaaacccaaaaataagtgacgaaataattgccaaaaaattgggaatttcacgagacacgctgagaaagtggaagaaacgatttgctaaaccactaattgatcagtgattttatttgattgatcatgatgaatcgtcattttattcaatattatcaattattttgtgtctcaaacaattgcctctatctcataattggcggttcttttctttgatgacccctccccctttaattacgctctcggggtcttgctctcgatcactttattcacatcgggcctctccccccgggcagtatctgttcccgagccgaattattgtaggtagagagcctaagaattgtatcattcctttcccggaataaagtcgttactgttgcatactgtattgaaatggtaataatgggatataaaggagtctacagtaagccgagggcattcattgtcatggttttgaaagggaaatacaaaaggatttgacttttaaaataatttggcagcaattcttttttccatttttgtattaattttcgatttgttcctaataattttgcaatttttgtctcaattttgcttaggtgtttcctttcgtatttccttttttctctcaatctttttttgattgcctcaaatttttcgattatttctctcttttgcagatcagttgcttcatcattaatattgtgattaattttgctacttttctggtcatttctcttttgatcaatcgctgcgttttgactttgctcgttttgttcattatgttcaatttttatcatcaatttttctttgctttcttttttctcccatccgtcgccaaatatttcatcaaaattcggtcggattttgccggattcaattacaaaaataaaagatataataaataaaattaaatgccacaaattcatttttacatataa

SEQ ID NO: 15215 - DNA, 1916 bp, Heterodera glycines
ttgatgaaaaatggtatgcgattacgatgtgtttgttctcttgaatgcatttcttgtgattcgtcctcttgatcactatcatattctttttcatcttcatcttcttcttctccggcttcttcatcatcgttttcttgctcttcatcaattgattcattctcttggtcggattctgaaggggaatttggtttgagcgctttcagccttctttttacctccaaatttatatccttaattgtgtcaaggatttcgtcaatttccttaattgtttttaaataattatgcttttcccggaatattttttgtagtttccattcactgttccattctgttttattcatttgccttattaaattttgccatttttggtgcaaaatttttaatttttcaaaatttggttcaattctttgaatgatttctttagttttattaaaaattcgagaacagtcatcaaaattatttttatcatactcgaaattcccatcttctatttttgacttaattttctgtatttcttttattaactagcgggtgcgtgaaccgtcggctatttagctgggaaaaagcgcttcgcgctttcggagcttcgctacctagatttgatcgaattggttggagagatttttttgaatttttaaaaaattattaggggtttttagtccacatcgaggctcacgacgggcgcttcgcgcccgttttttaaatctgttgaacttatacgggcgcttagcgcccgttttttagcttgttaggcgcttcgcgcccgtttttcaatttttgttgggctttgacgggcgcttcgcgcccgtttttaaactttgttgggctttgacgggcgcttcgcgcccgtttctaattttgttgggctcataggggcgcttacaacagtgatcgccccgtttttcaaattttattgggctttggcaggcgcttcgcgcaggtttttaacatttttgttgtgcttatacgggcattagaagaggtacaaaagtgattagaagaggtacaaaagtgataaaagaggtacaaacgtgattagaagaggtacaaaagtgattagaagaggtacaacaacgtgaaagaggtcaacatgatttaaaatgtaataaataagtaattttttttattaaatattaaaaatcgaatgcattttaattttaaattattaataaaaaacaaagttgaaaattaataatatttattttatttaaaatgaaattaattttttaaaagaggtacaacagtgataaaagaggtacaaaagtgattagaagaggtacaaaagtgattagaagaggtacaacagtgattagaagaggtacaacaacgtgaaagaggtcaacatgatttaaaatgtaataaataagtaattttttttattaaatattaaaaatcgaatgcattttaattttaaattattaataaaaaacaaagttgaaaattaataatatttattttatttaaaatgaaattaattttttaaaagaggtacaacagtgataaaagaggtacaaaagtgattagaagaggtacaaaagtgattagaagaggtacaaacgtgattagaagaggtacaaaagtgattagaagaggtacaacagtgattagaagaggtacaacaacgtgaaagaggtcaacatgatttaaaatgtaataaataagtaattttttttattaaatattaaaaatcgaatgcattttaattttaaattattaataaaaaacaaagttgaaaattaataatatttattttatttaaaatgaaattaattttttaaaagaggtacaacagtgataaaagaggtacaaaagtgattagaagaggtacaaaagtgattagaagaggtacaaaagtgattagaagaggtacaaaagtgattagaagaggtacaacagtgattagaagaggtacaaca

SEQ ID NO: 15216 - DNA, 2132 bp, Heterodera glycines
cccccccccccccccaaaaaaaagttttttaaaaaagcgcgtcgcaaaaaaagcgtattttaaaaacaaaaaaagtcgtcgcctggctaaaaatcgcaaaaatctgccaattttcggtgaaaatctgttacaaaatccacttaaatttttaaaattttccccggcggcgcctgacggcaccgccggctcccgcgttcgcgaaatttttttgagaaaaccgcgccgcaaaaaaagaggttttaaaaagcaataaaaaaaaaaaaaggtcgtcaaattgcatggctggaccccttcgctaaaatttcggttgacccccccccccccttttccatgtatgttttgaaaataaggaaaaagtaaaaaattattaaaacattaatttgtctgtttaattagcgggtatgtgaacagttggatctgctgagctgcgacaaagtagagcggttggagccgtttagtgacgcctaaaccaggacgcgtatctgtccttatttataagatttgtccttatttggagggtccaaatcttacaaaataaaaatgtccttatttgtaagatttgtccttatttcgggctattgttcttattttgttcttatttcttaaatatattcaaaattttgaaattttatggcagaatgtcactattttatcaagaaaatataaggtttgcgcaaaatttggttattttttgacaaaaaactgttagcaaatcgcattaaaaattacaaaattttttcccggcggcgcctatcggcgccaccggaccatctccccccttgttccccaaaagtttttgaaaaaacgcaccgcaaaaaaaagtatttttaaaggcaaaaaaagtcgtcgcttggcttttaatacaaaaattggccttttttggtgaaaatctgttaacaaatcagaattaaattacaaaaaaattttccggcggcgcctatcggcaccgccggaccccctcccctcgcacttcccaaaagttttttggaaaaatgcgccgcaaaaaattgttaaaaatctgattttttttatcccgaatgcactaaaattttatgatttgctaatttcctcccaaaaattgttaaaatcgttaatgggagacaaaaatataatatttgatacatttttgatcgaataaattgtaaaaataactgatttgaagcaattttgcgaaatgttcttatttttgaccctaaaatcatattttttggccttgattcttattttgaaaaattttcgatacgcgccctggcctaaacgttcgtttttcctatttcggtgtttttctgttttcctattacccaagggtgcctgttttcttctattttgggatttttagaaactgcggtcatatgtgaatactattagtgaaattgtactatactcctccacattcactgctttcgactctcgatcagcccaaaagtaggagaaaacggattaaacgatacagaaaacggcaattgtcgaaaataaatcttccattaaataaattaggcgcttaacaattagctacttttaaggaatggataaatgtatatttgttttttttgaccaatcccttttatttatcgttaaatttccatccgaaacaaaaagcatgattatgggctgctaatcagtttgaacttttcccacgtgtcaatcttcgctctgttcgcaattagtgccgcgttcggctggctgagatcggcacacacaaatcggccattagccaccgcttggaatgcgacggagtcatccgaattttgaatgaggcgaaatttctcccatctgtcttttcgttgtctgtcggcgttcaatttggcccaatgcaaaaggtcagcacacacgaaattgccattggccattgagcgaagggacactgtgccgtcatcgttgatgaccatcagaaaccgctcccaatcgccggcactttccgctcgtgccgccaaagagagtgagtcggcattccatgccgaaataaatttgttgttggcaaatgcgtggatgaaaattggcttcctaaaagcttcctcattttaacggctgatgtaagggaaacaattaaaaataaaatttaaaaagcaactaacccgtcatcgcttttccgtttatttttctgctgcgaaaaatgctcatcaactgaaaaa

SEQ ID NO: 15217 - DNA, 1512 bp, Heterodera glycines
tgcgttttaaggctttggatggttccgtcctacagccatttggccacttcggtcccgggtccataactcggcccaaagtggtttccgccaaaaaattctttcggattcgtgcattacagaccgataagcatcgaatgatcgataatttggtgaggcactagtattcttcaattttacccactggcccggaaagccagagacgccggttcaaagccggcccgccccatagttttccctcaaaggcttcccaaggtcttcatatgttaagcctcattatgctaattggtttcattatgctaattggtttcacttcgtcgcaatgggcaaaaggcgcagcgtttctttgaccaccgcttcggtgtatttcaattggctcagctgctcataagttgggtccttgaaaacgggaatttatttattcaaatttctacacttctcaaggacgacacctcgtcgaagcacaccgagtcaatttcctcttggactttctcttgcacttccgcgtgaagggccaacgcgtggcaaaccaaactcagcgtatttgcgcttgtgtcgaagctgtacagttcacgtttagcgtaattggtggattaatggagattgggagacaattagagaaaatacggcggtaaccaatttttggttcaagaaatttaagaggccgtgaatttgggaattttttgggccttcgtaataccacaaacccggcaagcagaaacatcaaaagctgcgacgtaatctcttccaaagtgcaccgctttgctactctctgaaaatggttgttgtcttaacaagaaaaattaaaaaaatctcgtttcttgactctcaactcgagaaaagtctcggggtttttttggtcttggtctcgaggtcaagtctttgtttcggaaaataaaattataaaaaaaattggttaggaaaagcctaaaaaaattttaaatttgtagaaaattttaatccatttttaactaaacaagaaaaatttaaaaaaatctcggtcccgagtctctggttttttgggtctcggtctcaagtctcgggaaattgttggtctagagcaacattaataaataccttattattcaattttaatttttctggatttttcttttcgttttagagaattgaaacactgatcccgaaagcccactattttgctcgagtcgagaaggttcgagaccaatactctcgacttgactactagcgtcaaccagggatggcacggaattccgatttccgacttccgacattttcggggtcggaattccgaccccgaaatttttgatgaaaagtcggaaaattttcttctgataacaaaaacgcaaaattacaaaattttcccggcagcgcccaagcaaaatattcaaataaccaaaaacatttttgaaacaccttatacttggttaagaatttagaaaattctttattatattttatattttttgaaaaatttatattttttgaaaaatttccgatttccgacgtttttggggtcaaaattccgatttccga

SEQ ID NO: 15218 - DNA, 1621 bp, Heterodera glycines
  unsure (1)..(1621): unsure at all n locations
cacgaattaaaaaaggcttttccatgtttgacgttgctttgataaatatgtaattaagcaacaaaaaaagaggaaaaattttcttatgaaaagcctcaaaaaatgaatttaaattataaagagttataatattttgaaaaaatctcgagtttcggctcgagaaaagtcttggatcttttttttgctgaggtcaagtctttttctcgtgaatttccatctagaacattatacatattaaagactaaatcattcatttatatttttctgtatcaaattagagaattgaaacccggatccttggaagccccagtattttgctcgagtcgagaaggttcgagaccaagactctcgacttcactaccgccaccaaccccttcccccttcctctcttttcccacctgctgaagtgcccttttacttggcattgcttcaccctcgttttggcattaataccttctttttatacaataactttgttgatgttcgaacaaaccctatgtttttggtatcattcgaaagcacaaaggataaagaagcaaaaatatataaaatctcagcgtttaggcaattgccaaaaagatttgattaattaattaattgttgtttggtcgattggactcataaagtgcaatagagccgaacttttctgtatcgaatttagaattgaaacgttcatcccgaaaagtattttgctcgagtcgagaaggttcgagaccaagactctcgaacttgactactagcgccaaccccttcccccttcctctctctccccacctgaagtgccgttttgcttagcattgcttcgccctcgttttggcattgctccgtcagctgctgctgttcgttctgttccgtctccaaaaacaggtcaatgaagtcgactttcgctctctgctgctgctgttgttctccgctttccctcagctttttgcgtgcctttaattcgtccattagctgcttcctcagtataattagcgggtctttgcgcaatattccgctccaactgatgaacggttccaaaaaatgaatgccgaaccacgggaaagcgaagccgacgtaatcgaacggagtgttattgtatttttgcatcgactcaatcgccaggtgtgccatttcagtctcaaactgtcgcgactcgcgctgccccaacgccacgcgggcgatcacatcgaaactcatttctacgaaatgcctacaaaaacggagggggggggggtaaataaattttgactcaaaacattgatggatttaattgatataatatccgaataacttggaacagaagcacccaatcaaagcacagtttgtccctaccgtaaccgtagggtcgtgaggcaaaaaggtatggtatacggtatgttaaggttggcgactttagaanaagttacagctaatagagaacatttatttgttagtgcaattgaatgatttcaaaaataaaaatttagttactcttctctttagcaaaataatgtttggcaattttctatttgatggntttgagaaacgtccgtcccatggcaccctccgaacggtgcgaatcagggatggtgcaaaaagaaaaataaaagcgaaaaaagcgaaaccaaataaaaaagcgaaagcgaaatgcccaaaaagc

SEQ ID NO: 15219 - DNA, 1530 bp, Heterodera glycines
aaacgaaatcgttttaaaatattcctttctggacttgacttggtttcttgatatcgaagctgttttctacgctatttctaaaacggttataccaaaccccagatttttgaatccggttttcagaaaaaatgccttgtggtgaaaacaatatttcacatttcactccataactttgtgagttcggcacggatcgagaccgggataagaccattggaaagagcagctcgagctctacaagaaggtatggaaagaaaaaatagttatttctgggactttttcagaaatcagaattaattctccaatgtggcccaaattttaggcccccagccacagccccttgcttctcccagttttaagtcttggatttgtcaaataaattcaagacttcaaattaataatcaaaaattctcttaaaatttttttgaacccaattcaaaaaaggaaaaaaatttgcagtcaaaaaattattcgaatttctccaattttgtttccataatttccgaaagttattcggtatcataatgccaaaacaaaacgaaatcgttttaaaatattcctttctggacttgacttggtttcttgatatcgaagctgttttctacgctatttctaaaacggttataccaaaccccagatttttgaatccggttttcagaaaaaatgccttgtggtgaaaacaatatttcacatttcactccataactttgtgagttcggcacggatcgagaccgggataagaccattggaaagagcagctcgagctctacaagaaggtatggaaagaaaaaatagttatttctgggactttttcagaaatcagaattaattctccaatgtggcccaaattttaggcccccagccacagccccttgcttctcccagttttaagtcttggatttgtcaaataaattcaagacttcaaattaataatcaaaaattctcttaaaatttttttgaacccaattcaaaaaaggaaaaaaatttgcagtcaaaaaattattcgaatttctccaattttgtttccataatttccgaaagttattcggtatcataatgccaaaacaaaacgaaatcgttttaaaatattcctttctggacttgacttggtttcttgatatcgaagctgttttctacgctatttctaaaacggttataccaaaccccagatttttgaatccggttttcagaaaaaatgccttgtggtgaaaacaatatttcacatttcactccataactttgtgagttcggcacggatcgagaccgggataagaccattggaaagagcagctcgagctctacaagaaggtatggaaaggaaaaaaatagttatttctgggactttttcagaaatcagaattaattctcccattgtggcccaaatttttaggcccccacccacagccccctgcttttcccagttttaaggcttggaatttgcaaaaaattcaaaacttcaaaaaaataattcaaaaatctcttaaatttttttgaacccaattcaaaaaaggaaaaaaatttggcgtcaaaaaa

SEQ ID NO: 15220 - DNA, 1744 bp, Heterodera glycines
tcactctccgccccctgctgatcagaccgatcaccctcccccttgctgatcagaccgatcactctccgccccctgctgatcagaccgatcaccctcccccttgctgatcaaaccgatcaccctttccccttggtgatcagactgatcatctccgcctcccccgtcagttactcacccggtcagcaactcccacagtacgacaccgtaactccatacatcgacgcgttcattgcatggcttgttggtcaacatttcgggcgacatctgtggtgtgaaaaattaaattaaattaatttaaaaaataaaataaataaaaataaaataaatattagacccgaaattttggaaaatcagaaaagatcagatcagtatcatgttctggaccaaaatagaaaaatgaaaaagtaaattcaaaaataatatttgtatgggtaaaaaaattcgtatgatcctctcaaaattactcgaatcacaggatcaaaaagcggaaattgacaaaacccagtcccgtgtttcaatctcaacaaataattatttttatttaatgaatagaaacagaaaattaattagttaattaaaaaaattatttattaattaaaaaactaacgctattaatgaataaatattttaaatgtttattttttttaatttttaaaaattaaaaaaatattacaatttcattttctgtaattattcacttcaaattttacccattgtgaggtgccgcaaacgctcatcacaacgctggccatgccttgcaaattttgggtttgcgagttaagccttaaaaaaattttcaaaaaatttctttgaaatccccctaaaataaaagccaagcccacctctgatcccagctgtacagggagccaaaatcgcaaattttgacggtgttatttttgtcgatgagaatgttgggcgatttgagatcacggtgcacaattttcaaggagtgcaagtagcacataccttcagcaatttgaacggaacaattgatgaacatcgactgaaaaaatgaaaaattgaaatattttttaaaaataatttttgctttttagggttcgattttttgaaaaaaaggctggaactgaattccatgcttaaccttggcctggatttttggaaaaagatgcaagaaaaactaggttcaggaaaaatccaggcttgtcatggcctcggtcggattccatgttagagctggacctgaattttccggaaaaaacccagaaaatccagttccaaattttttttttgttaaatcataaaaattgcaattaattttaatgaattaattcaataaattgctaacgaacaaaaatttaaatttttaactttatgaaaaattaattatttttaggttatcacctaataattattactttaattcaatatcaaaaattataattcctttttataaagtgacattctctcaacaatcaaacaatttaaaatttttatttaaataataaatttttaattattttaaaattttaccttcgaaatgttcggatttcgccgtaagtgctcaaataagctgcccttttcacagtattccatcacaatgcacgggaaatgctctttcgtacaaattcctctggaacaacaatttaaatttattttttggcgcctttcccaaacaaaatgccaaacaaagttttgatgacattggcatgctcaaggctgcacaaccgtttgatgtccacctcggaggtacggttcaactttttgagcgcaatcattggccacg

SEQ ID NO: 15221 - DNA, 2224 bp, Heterodera glycines
ttttaattaatttttatggtaaagaaaaaaataaaaaaaaaacttaaaaaaattggaaaattttgggtaatgcgcgatcgcaattcgcggcaatttttttgcgcgatccgcccccgcggcaaatgaaatccgcgggatcatgactatatactttggatttttaaggcgcgaaaaaggcttggtttttttgcccaccatctatttaaaatttaaaaaacgtcaacaaaaagcgcacgccatgcggatccattcgattatattttggcccaaagtgttgttttttaatgactcccaattccttgcagtgattccgacataattggaaaaacaaatcctaagaaaatgaaaaatttatctccaaaatttatttatttatttcttgacaagaatttattttaaaatttttttagctcaatactgatttgacctaatttttttacttttttgaataaattttgtcttttacacccctaaattcggaactttttggcacctattttgggggttttttagaacctaaaacttacctattttggcagtttttagcacgccttagatatcagtccttaggtccacagagtttgtcctccgtctatcgaacgagtttggcactcgccgcaccgtcgtattgtcatcgccactgtcgcccaaataggtgacgctcgccggcgatgcgctggacagggaaatggtagacaacgatggcgagcagttcagcccagccgccgagtccacaacagtcgcctcctccaccgacggcggcggcggcggcgacttcacccagtcgccgtcctcgctggtggtgttgtgattactgttgtggattacggtagtgttgttactgtcaatttcggtgttgttgttattgttactgttgctgttgttgccactactgctatttgtgcccgtgacgagagatggtgcgttacccgtgacggccatttgggtaattaagggtaattaggctgaggtgaaaagattcatagatggttttttcgcagtttgaaactatttttagctaaattttaagtcaaaattaattgaatttaaaaaaaaccgccgagggttaattaaaatcaattattaataatcaatttaaagtaaaaggttgatggttgggtttttgaccaggtcgagactcttgacatatatttgagtcgaacaatttaattgtcagggtaatgatatttttaaaaaatgattaatatgccttttgggaaggaataattaaaattaataatcaattacccctccccccccccccgacagccccccaataatcaattaatgtaaaaaatgacaaataaatcgatgaaattgattgggtgaacaaacaaatctaagtgctgagaaaatttgtggtttaaaaattaaattatcacaatattgccaatcattcagccaattttcattcaaaaagttaaatttttaaacctcaataatttaaaaaaaattttccttgaaatgttaaaattgcaattaaattttcaattaaattaaattgcatttgttcggtttctcctgcgggggttggcaagagggggctgatggaataattagtgatcaacaaaaaataaaatcggcgaatttgtggcaaattgatcaaattaaatgagacaaattgtcgagccaatcaatcttctagattcaatttagaaaaaatttcttactcaattaattatttgtttcacaatagaagtcgaccctgctctatcgaatggtaccaaatttatacccattttccgagttacagttcgcgaggttcccttgtaagtcccgaattcaaaaatgtcatggcaacgcatatacatatatcttgggcaatttgtaaacaaattttttttataattccaaaaaaactagatttttcataaaaatttaaaaacttgaaaagtaagcaaaaataaaaattaaattaaaacaaaaaattgattatgtactaataattagtcaattatacggtgctaggtcgatccacaaaaaaaactcagtgtgggcgatgcgaaaaaaaaaactcaatgattgataaaataattaaatttaataatgcgataactaaatgcaaataaacattttatccatcaattatatggaagtatttcaaatttttacccctacaatgaataaaagggttagtaaattattattttatttaaaattagtactattctattaaattcttatgaggggtacaagaagaaggtcgacattttccgcccataga

SEQ ID NO: 15222 - DNA, 2370 bp, Heterodera glycines
gggaggggggggggggggggggaggggaaggccgaaaatgagtcatgccttcttccacgtggggaaagtgggacaaaaacgaaacggacagaaaggggggagacgggggaatgattaaattggccaaaggtttgcaaatgaataattaattcgtcgcggagggctcagaataattgcacgggatgagcacaacactttcgaaccgaatgacgcgacgaggcaaacgacggaagccatggcgacaatgccaaagaataaataataaattgcggagagtgccggcaaaagcgacgaattcatttggcggatggaatgcccaaatttgatttgtgtaaacgtaacggaacagacccaactcaacgacgaattcgatgcatggaaaaggataaaggcacaatcgacgggggagggaattcaaacaaagtcgaaagccaatccaaaattggagttgcgattctttcgatttgattgtttccatagtgcggaattggtgtaattatatggaaactaataagtatttttaaaaaggatcaagaagcatttacttcttgtggatttataattaaaattagggttatacgggcacgggtgcccgaccgagcaagacccggacggccggctttttcggtaagggaaaggaaaactagaaaattaataatatatatttttttttaattctgtaaaatgatagtttatacaaattatatttaaatataattaaaagactgaacaaatcacattcacttcgtttggctaattttcggagtccatgaaaaatccgtgggccaatccggcacgggaaacaatggcatttcctcggcgccgttttgctgctgcacgtccattagtcggatttgaatttccatgctaagcaaacggtcgagctgccacaaacggtgaccgttcagtttcgacgacttttccgtttggcattttgcccacctcttctctgatggaatgcctctgaagggccttttggggccaccgcaaactttggattccctcaagccattgcaaaaactccgactcgtcccctccggcggaacacaaaaaataatcggtgtcttccgcaagagacggcggagagtccaactcgagacaaagcccaaaacttaggggggggggggctggaaagacgggaaaagcacgaaagaacggaccgaagcagtgattggatggcctttttgtgcactttggccccaaattgttggccaagtcggacagtcaaatcattgccgtggtaaacagcgcgaatttgagaaacggccaattttctaaaggaccaataaataaacaaaacattttcggaaatcaagttgtgaatgttcttaattttcataacaaattgtatcaatctttccaaaatttcttgttacagaatttttctgggtttcgtttttcaaaaattctttttttcccttgaattttcgtgctccgggggaatccccaaatgccttcgattcaatttcttcttctatacttttgtgtgtccaatgccaattccgaatgctttccgccgcccatccgacagtcccaaaagtgaaaatgcctttgtctgtcgtccagtcgccaaaaccaaaagtgactgcaaaggctttgctgatgcgaactctgtttaaaaggtcaatcaaaaaagaaagccccgaagagattcgattttatgagaacatttgcgctgttttgggcgttcgaattgttcactgtcagctgattactgttgagcatttgtgggaaaagacgtcgaaaggtgagacccttcttaagaaagttaatgcgcaattggaggaccatccgttcgaattggggccgcaaatggacacggagaggccgaaagggggggggggggaaatggataaatgaatggaaaaatgaaaagaccgggaaaagtccatgaaatgtatgggattgtctgatgaactgactgaatttgtgcgccggacagctccaactcttccctggccatttcctcccttttccaaattctttgcatgccaaaatacgaatatttcttcctcaacaattccccctccaatcgttccatcgtttcttcgtcctccgccattgccctttccatttggtcttgcacaacactcaaaacctttgccaggtcatccatcctataataaatcagtgattgtgaacaattgccgtcgtccgtgaaaatgccgccccccccccggcactttgcgtgcatttcgccccacgtccgttgaaagagttcgaccaaaatttgaaaaagcgcgtaaaaagggcgctcatttttcagaacaaaacgccaaaaaggcaaatggcaagggccgatgagagaagctgaaagaacacaaaacaaagaagtaaaaaaatgagaaaagcgccaaacccgaaaaaggg

SEQ ID NO: 15223 - DNA, 457 bp, Heterodera glycines
gaagcaattggatggcaaaaacgcactccaaaagggcacagacggccaacgacccggggggcgtggaaagggccaaacggcaaaattcggaacggtcggaaccccaaacagaaacgacggattggggagcagcatcgcaattggtgaacccattctgaaatcggaatttggattatttgaaaagataaaacccaccaaaacgtaagcgatttctttgtccgacggaattcgcagcgaaagtgcgcggacctcaaaagaaacgaacgattcgcaagcgaagcactaaacgaaaggaatgacctcgtcgaagcgaatgtgctgaagacgacccaattgttggcaaaggccggaagaagccgaggccaacgaattgggctgacttttgcgcgtcttttccaacgttcgcccaattgccacaatgaatgggcgttcatggagaatctgacaaaacggggaa

SEQ ID NO: 15224 - DNA, 2250 bp, Heterodera glycines
gctcaagtcggcaccattcagggaattggtcaaacatttgttcaacaactaaaagtctcagttggaaacactgaaatttacgacagcggaaatttgtacccatataaggtttacattacgaacactttcgtttccgatgaacgtcaaaaaaagcttcctcgcttcaactggtcactatgcgacacgcacacacgacagcgtcgctgatgagggctttaaagctcggtgtaaaatttttgagggtgggaagcgagcccaatttctttcacgtctggactttgacctgggaaaccaagaactttatttgttgaacaatttggatcttttatttacaatttacaaagctcgtgacactttcatcatgcagacattgaaagcagacgatactaccagataccgtgttagagtccatgacgtaaaactgtatgctaaaatgattgatgttcagtcatctttgaatttaagtatctacaaaacgcttgaaaaacaaccagccacatatgcagtgcgaaaaactgaaatcaaatcatgctttataagtgaaggtaggtttgaaattgactacaatgtattcagtgcaacaattcctcgacgtatgacaatcgcacttgtcgcaaacggggcatttaacggaaattatgctctctctccatttaattttaaaccgtttgacattcgagacattgcagtgtatgctggaggcatgatttacccaattgttccatacaagcttgactttgccaaagatatttttgtccgtccttttgttgacatgtatgaggcacttggcatggctaattcagagcgttctttcgacatcacaaaagagcaattcaaatctggttggaccttttttgtaattccactcacatcgacgctcgacgatagcacagggtatgaactcttaagaagcgggacaactagcattcgcgcaacatttaatagtgcaattcctgagggcggagttgaaatgatagtgctgggtgaatttgaccaaatgataatgatagactacaaccgtcacattgtttccgattcaaagcttagttaattaactgtataaataagatgcataatgcgaaaaatgccaccataaaaatggccttcttaaacactacagtcaacgccagtttaaagccagagatacaagtactaacatttgaaaacaaaagcgttcatcctaacctcctcgtgcaacttctattgcttgcccattatctcattgcttttcccgttttcattttatgctggtattctttgataaattttcttaagagaagaggacatatttctcagcgtgatgccaatgagatgatggatgatttgcgaaattaccaattaccaaaaaattcatcaattatttttccaagtttatcaataaagaaatgattaacgcacaaatattcaaatttttttcacatgatcccctttcagccttgatgaagatcaaaactaaatttaggagtgctttttccttcttttgaaaaattagggttacgtgacaaacgcatatgggccaagcttttccaacaacgttaattggattgttatgaggagagttgacgatccaccactcggatagagccaactgcaaatctctctgtgctcattacgaaaaattgtcaacgtgcaatcctgtctcatggtgaattcacgaagaaaaaacaaaattgcaatcacatcaagaccattttggagtttgtgtctcatcatcttcaacaataaaatgcatttttaatggatttttaaaaaagtaaaggacacattaaatcctttttttttgaagctcacaacaaaatgaatccgttatctatctatctatctatctatctctctctctctctcaacttttctttgtttttttggtagcaatctcatcaacgtcatcatcatcatcatctttttcttttggcacatcactgtcattttttccagggcacttcttgaacaaattgacaatccaatcaaatccagtgtaagtctgactgttcgcctatgttgtggtttgtcaaatatgtaataaattgcaaaaaaaaaacaaccttaatgttgactttcgcaattatcttcacagcaatcaaatcgtccaaatgtttcgcaaggctctccggctccttctccttggcgagcaattcagcagctttcattcccaaaaactcttcggcaacactcgaaaacatggtgacacgttgagcaatgtctgcttgttcaacatcctgcagcagaagacggacaaacaccgtgtggatg

SEQ ID NO: 15225 - DNA, 5109 bp, Heterodera glycines
  unsure (1)..(5109): unsure at all n locations
agatgaaaccctaaaaatggacaaatatagaacaataaataatatgacagtgaacttaaaaagtggtatttaccaagagcactgagcgaaaacttgaattttccaaaattgatgccaatacgaagccactaaaaagtaaaaattatgtagaaaaaacatccaaatttaaacatttaccaaaaggaaaaggatgataagcggcgaagcacacaaaacagaaaacatgtcagaaactagaacagatggtcggggttcagggctgcggaaggtgtgagaaatttccggcagaagatcgtaattgacatgagacgattttggcgacatcgaagcaacaaaaataaatgtacgacctaaaaatgccaaaaatcacacaagccttattctgacagaaacactaacaaaaaagtacctaagtccaagccaaaccccaaaaaactacgtaggttttattttcagcctttcgcagatttaaataaaaatacataatgccacattaaacttggcatttaaaagaagcactaattcaaatgatcagtcgaaagcaaaacaacaaatggacaaattgcttgggaaaatttttaaacgaaaacaaaattgaaagaggtaaattgaaattgaaattaggtacatatgtgtcatttattctttttttttattggtaatgcattttcaattacctaataaagtaatgcattaattttagtcattttttcgcatttttatatgttttcgttattcccgtctgctctttttttgcttctccaccacattgacatttattcgactgaccaaattgaggataagaaaaatagccacaaggaattggataccgaaatccgtacgctcttcaacgaaacaaaagtacggattttgattctttgggtttctttgaaatacaaaacaatcaattagagttcgacatttttaaaaaagcctggacctggattccttccatgttggcctggacctttggacaaaaaccctgaaaaacgccaggtcctaagaaaaatcccggttgaaaaaaaggacatgtacctggaaacaaggaaaacccatgcctacaaactctataaccatcaaaaagcgtgttaaatacatttaggattatattccagccgcttttcgactacatgacgacgaattgctgtgcaaatgcaatcattttgcgacctgcggtaaggtaacaattttttttttgcttgttttatttttattttccttanatttctttttcttgttgtcaggaaggtgtggcgagttatgttggtgaacagtacatggacgtgtgccggnctggtcgaggcggatactgtagtcnggtagtgtttttgaacgcggatggcacatttcggggagtcatcacattcgtgagtntcctaaaaagtttttatataggtatttttgaagagcgattgaaaatttaacaaccaagttttcccagtttatttatgatgaaaaatttgcagaaggagggaccaactccaattaacaactaattttaaatttttggttgaaccaaaaaaaaattgactaattttttgggggaagtggttggggaatttggtttttggggtttaaaatttaaatttccgggcctttttttttcgaattttgcaattcaaaaaggcccaaaaaaaaaattttaaaaacaaaaaaaaccttaaattggggccttaaacagggggattttttcttttttttttttttttttttatattttgttaaaaaagaaaaaaacccggcccccgggaagatatcccttttccctccccaaaaattccccccccccccccccgggggaaaaaaaaggggggggggggggggggggggcggggcaattttttttttcaccacccccacccaaaaaaaaaaaaataaaatttttttttttttttttttttgttttttttttttttttttttttttttttttttttttaaaaaaaaaaaaaaaaaaataaaaaaaaaaaaaaaaaaaaaaaaaaaatttcaattaaacactcaaaattttcacgaatcaatttttaaaaaaagggtttattttgggaaaaaaaaaaaattattttgcttgttttttggaagaaaaatgaattttctcttaaaaaaaaaataaaatttttttatgtaacaacgcaactccttttctttaaggtgaccaaaaattcatttttggacaaacaaatttaattatcccacataaatgtggcccatgtaaatataaacagaaaattatttataagttcattttttaatgctgaaaaaggaaaagtttgtttcaattgttggcgatggaaattgtttttatcgtacactttctttattactgagtggtgatgacaattataatacggctaaagaaatacacctagatttaatggaatttatctggggactcttgcggctattgcaattatttcggcaattgttctaactccaataatacttggttcggttgcaaccggcattgtaattggttatactttaaaagatggaagtggtcgtgaatgtatgaatataaatttaaatttaaaaataataaataaaatgataattaaaatattaattaataatttaattataaatgtggaggtaaaacagaaaattaattgttgattggtgattaaaaatgagagtttaggaattaatctcatgatcaagcagtgaaaatggtgaaaaatcattgctaagaatgctctaaaatgagtagatgtctacggatgcttggaagtggtgtttatgaaatgatcaagtaagtgtgtgagtgatcgtgtgattagggacgagtgagtgattaggaacgagtgtgtgatcaaagagagacatagagagatcggtgtgagtgagtgttaacagagagtaagtgatcagaaaatgatcagagtaagagttagaggtcagatagtgattgggaactaataaatgatcaaagagaaaaaataagtgatcacaagttagtgtgaaagggtatgtgagtaagtgattgcgtgatcagaaaaataatcagtgtgtgagtgttcacatgtgagagagagtgatcgggatgagtgtgatcataaagaatgaatgattagaaaatgatcagagtgagtgaatgtagattagagtatgattaaaagtgagaatgagtcattataaagtgaaagagtgattacaagtgagagtatgatcaaagagagatagaagagttatcagtgtgcgagtgagagtgtgattgaagtagtgagggattacaaataaatgattgcagaaagagagagagtaattggggtgatcagagtaagaagtgtgtgatattgagtgatcagaagctgccagagtgggagtgagtgatcagaagatgataagtaggattgagtgatcataatatgatcagactaggacaaagtgaccaaaagtgatcgggatcaaaaattatcaaaatgatcagataaactgtgcgaatgcgtgtgaatcatcggaaagagaaaatatactcagaaaatgatcagagtgagaatgagtgatcagaatgatcagaagatgatcagagtgcgaatgaatgatcaaaataacaagcggcccctatatcttaatgattagtaggtgttgtgatggggcttgtgagtgagcatgtgtttgtgtatgagtgatcgtgttaatgtgcttatgcgtgcacgtgcatgtgtgtatgcgcatttacatttagatgtgcatgtgtgtgcgtgtatgtgcgtaggtgcatgcgggcgtgcgggcgtgggtatgtgtgtgcgtgcgtgtgtgtgtgcatgcgtgagtgtgtggtgttgttaaaattttggtgcaaagtgcatgtgatgtgcctgaaagtgtaggtgcaggtggttgttaagtgcaaatgtgtgcgtgttttcggtgcagggcagacacaagattaggtgaaaatgtgtgttatgtgcacgcgttatgggtctaggcaggtatgtgtgggtgtgtcaggtacaggtgcaagtgtgtttctttgcaactgcaggtgaaatacaagttaaatgcaaatgcatgtggttgtgtgtgtgctatggcgtaggtaggtgtgtgtgggtgtgtcaggtgcaggtgcaagtgtgtttgtttgcaggttcatgcgttcagcgtatgtgcaaatgctgtgcgtgtgagtgtatttgtgcaatgtgtgagtgtctgcatgtgtaggtgcagatacgtaaggtgaaaatgcatatgtgtgagtgtatttttggtgcaggcatgtgtgtgtggtcaaatgcaggtgcaagtgtgtttgtttgcatttgcatgcgttccgtgtacgtacatgcgtgcgttctcatgtggtgttgtgtaaagttaatgcaaagacaagtgcgatgtgtgtgcctggaagtataagtgtaggtgcatgtcaggtgcaaatgtgtgtatgtcagatacaggtgcaagtgtgtttgtttgcaggtgcaggtaaaattgttgttttggtatgtaattgtaggtattcatgtccaaaagataggtaccaaaaagcaaaatacacataaaaataaggagtttcatatattttttgcaaaaaaaatgaaaatatggtaaaaagtagaaatgaatatataaaacaaaaatgatcaaaaatgcaaaaataaaatgaataaaaataaaattttaacaaaaatttattataatttaaaatctccgggaagtttcgctgggattcaaaaaattttaaatgaggccaaaaattgacccggaaattacgaccgatgacgtaaataaattcctagaaaaacagagaacatacacgattcacaaacccataagaaaaaaattcccgagactaaagacgataccgagcggcttccataccgattggcagtgcgatttgtgcatatttgaccagttgaaaaagcataacgacggttacaaatatctgttggtatgcatcgacgtgctgagtcgaatgatcttcagtgcaccgagccaagtcaaagaagagtgaggacgatgattgaggcttttgatcgggtgttcgaaaagtctaaaattatcccgatgaaaatatatagtgacggtgggcttgaattccaagcaggaaaaaatgaaaaaatattttgaggaaaaattcatcatcaaaaatgta

SEQ ID NO: 15226 - DNA, 3950 bp, Heterodera glycines
cagctgaactaccgatactgtattctccaaattgttcgattaaaaggaccaattaccgttcaattgctccattaatattcctctcggggaagcttcttctctatctcaattgcataaaatgcgccgttcgaaagtcttcctccggtcatgtgtttgattacgagaaatgttgcggacttttttttgggatgtcactctcgagtagcgaatcgacaaaaatctctattgggtctcgttctcgaatctcagggccccggttaagtctcgattcgagtattattttattaccattttataaattatttaacacatttttcactcgctcaccgtaaaaaattcgtctccgtcccggtagaagaaaatggtcttggcccgaaagttattatccgcggcagcaagcgagcgggacgacacttccttttggcttcgggaacgagcgagaattatctattaagtgtgattagataagtaattaaaattaaattgcatcttttttaaaggttcgtaattattctctaagtcaaccaatttttttagtcttttttaagctctgctaattattctgtcactatcagttaattacccaatccattagtttaatcatcacacaatttatcacaaccccattagtcactgcactaatctcccaattattgaccattgatttgcacactttgccagccgctggcgaagtaaccggcacgtttggaagagggcgatttgcagcagcaggaaatgggaacagattgggcaggagagaacctaaaaatgaataaaatgcattttaataagcacagtattaatgatcagaaaacaccatagatggctttaattgtccaacacaactaccgtacccttgttgacccgcccattttacagtaccctctagtgaatggcgcacaatttggctgcgtctacgcttctgctgttgtcgcgttttctgcgctctttttgagcgattaatattactaatatcgtcgccgtccaacaatggcagtgacggcttcgttgaatgaagggtgttttctgcaaattcaagaataattttacaaagaatttttttgttaattattttttagcaaaaaacgagagccgagaccgagaaaaagaaatgagtgagcctaggagtgtctattcttaacaaaatcgtaaaatttaaaaatctttgcggaacagattggcacttcgtacgcattttttttttgaattttttcgttaaaaatccggtaatagtatgcgtaccaggtgttttcgacagtgattggtttcgaaagcagttgatttcgaaagtactttttaattaattttctacatgatttattgtacacatgaatttatatgaatatacaatttgcatatacaaaatttataattgaagtaagtaataaaaaataagagttgtatgatttttttgcaaaaaatttatcgctttcactttttctatacaaatatctctcctgctgtaatgtagtcaaaaatacaacaaatttcgtagataagattctcaaatcgtgtgggaaaatctgctaactaatgccgggtttgtgtgccaaaattcaaatctgcaggctcttaagcaagaattcgaaaatctcgaacccctctgcaagtataagagccatgttcttatcattttaattgtcacaatttaacgagacttatgccatatagaacaaatttttttaaaataagctttactgtcgaaatcaatcattgtcgaaaccaacactgtcgagatccggtctacctcagttgggcgcgcacggttgggcgccagcatgttttcccactataacttttttcattgtaatccaaatccaacattgttggtatcattcgaaagcttaatatgtttagaaactttttctaagatattgcttcgcgatcagacaattattaaaaaagttataaacaaaaattgcaaaaaatcgaaatttttgaattttttccaggcgtgaaaaacttttcgcttttagtaaggctaatagagcatgtaagagctttcgaatgataccaagattgttggatttggatgccaaagaaaaaagcttaagtggaaaaacgagctggcgccgaaacaccggcgccgaaacgccagcgccgaaacgcgtgggtcccccccccccctctttctgcttaatttagtcttttccctcgtgccttcgcttccactttctctgttacgattctttgcggctccctctttcccatgccgccctttctctccctctctctctcctctttctcgtcctgaatttgtttcttctttcctaattacttattgctttcttctcccatctattgcttcatcttttcttcctcattatgctccccgtctcctttctctctccctctccttctctcttctcttttttctctctcactctttgctcaatttctctctatcctctctctctttctcaatccctttatctctctctctttctttctttgtttctttcttctttcctaattgcttattgctttgcttcatctatcttttcttcctcattatcccccccccgtctcccactctttctctttcgcttctttaaatgtaaattgttgctaatataaattttctgcttcccctacccgtcgccttctatgctttcctttttctcatctgctgattattccaacataaattatagtccccctggcgttttacaaaatcacagtgcattaatttttcggcgttttactccattttaatattttgtaattcgtcacattttcttctcttctcagcggtcacattttcagttagatttttcctttacgttcatttattttgaacatttacactttatatataataacaaaactatgtaaggttttttaacacaataattttcttatttaattaataacgaatctttgttttgcattttttataattagctaaattaggaatattggtgaaattttgaagttccaattcctaagtgtttctgaagtcctaatcggatcttcttttctgttaaaatgcatgaaaaaggctaataaaacaattataattagtcacaataaatgcttcttaattcattcattcatttagccatgctctgtccttctcttctctgctttcaacttaatttgttttgtttgcgattcctcgtgtcttttccctcatttttcatcatcatttgacaattattccacgaaaaactccgtggttatcattctctttatcatttgtgaactttttgtcctcttttcaaacgataaaattgtccgaatttggcggcggaaattaaaaaatgataagaaatgggcgaagaattaatttcattttccattaattcataagtgccgaaaataagcggcttatttttctgtttttaaattatgcctttcctctaattgattctcagataagcccccccccaactttccgctaattttaaccacctttttctgatctccgattcttccgccgattgtccactgattgttaatgtcaatcactaatcttgaaaacaacaatcatatctgtgccataataaggggcaaaaggtcaaatgatgtggtggattggttgtctttgtctttgcttgggttcgtctctctccccctcccccttttccccctcttccctcccctcccctttccgtcttcagacgatcattgcccctcccctccgcccactcacgacgatcattaacaatgcgtgggctgtgagttaaggtaatcatcccatttgtctcccctaatttatttcattatttttcattcattctttcgtccattcttttcttatctctttcgtatttgccttaattaaccaatgaatgcaacaattaaacaatcctttcccaatttggtctttctttgttaatgccattctcacgagggcacttcggcactttttcccttctattatttgttaatgctttcaaaaccttttaacaaaaaattaaaaatacttaaagaaaataatttttacc

SEQ ID NO: 15227 - DNA, 2745 bp, Heterodera glycines
tccaattttcatccgaattcatcagcattgcttcctttaataaagcagtcagaagtcagtcacagattaatgcatttttaattttaaatcccggattaacacgacaatctatttttgttttttctaatttaagcgcaattataaagatctgatttgtgtacaaaatctgactaaattcaaaatgcctgttaactaagaacaaaagtcagattcgtaatcagcgacataaatagcatcgaaaaaattaaaattattattttttttattattaaacccacattttcgttttgctatgattattcttatttacagagagaatgagaccagcaatttggtggacaatctgctgaaacgcatggaacaatatgcgaccaacttggaagggctggtggaagaacggacccaagaatatttgggtgagaagaaaaaggtaagaaattaaattaatgagatatatttggtatttattcattcgggttcggatttgattgcactgaaaattccattgaagcaccaatcaattgctaaatttaatagaaagatttggtttttccaagcatgagtctatttcaattctggttaagtcctcaatttgatgacttaattatgatgacaccgaaactgcaaaaaataaaagttctattacaattaaacgagtgccgcactcgattcgattttggcatcgagtcgagaacttgatcttcaagaagagtataaaatcgactgcggcactcgatttttaaaagtttttctttcaattcaaaaacgaattaaatcgaggattccaagtttcaaaagggcactaatatgacggagcaggacaaaactccgtcggccgaaactccgccaaaaaaaatttttcaaacaaaaatttttcatgaaaaaaaaatcttaggaaaattttttctaagaaaattcgaaggaaaaaaatttcgaaaaattttaacgatggaatttcggcggcggaattttggggtgcaccgctaatataacattcaatttattcgtgaattgtaagaaatggtgttggggcttaaagttggcgtctacgtatttaaaaaccgtgacacttatcttggccggctctgctgcatgcacactaattggtaccaaatccttgataggtggaagatctgcttcatcaactgttgccaccgtccattgctgatcagctaattgatggcaatccggtccaagcggagtcgtacgattgtgtaaccatctatttctctgacattgtcggcttcacctcactctccgctttgtcctcaccgatgcaggtggaccggaccattatgattgacagattttttttgaaaaatttgaaaacccttttctctgccatcaatgtgaccagctttattttcatgcctctgcagttttctctttccgaaaagtttcaaaaaaactgaaaataaactaaaaaatagttggatgcttttttggcatttatactaataattttcaaaaataaaaggggaaaatcacaataaaaataataagcaatttttgaaaattaaattttaggccgaaagtgggggattattttataatcctcatcccaaaaaaatgttttccattttttgatcaacatatctgatcgctctccattctcatttttttttcatttttctttgaggttgtcacactgctcaacgacttgtatttggcgtttgacggtgttgtggacaatttccaagtgtacaaggttgaaaccatcggtgatgcttacatggttgtttctgggctgcccgaacggaccacggaccatgcgtcacaaattgctcaggtcccaaaaatttgataatttacggttttgaacttcctaatcctcaattttgttttaattcatcaaatcccgcttgtacaatttcattggttcaaaagcttacaaaaacaagcggaatgcgtattttatgaaatttgattcagattatggcatttatgcatctataaaatagggttagccgacatttgcggaccgacttttgcggaccgacatttgcggaccgacatttgcggaccactatttctcgatagaactgtctaaataaagaaaaaaataataagaaattttaataaattcaatattcccaaattgaaattagtgaaggtaagctgatgcaaagcgatctgtctcaattggagagaagtcttatttgacataacttttttctttcttttttatagaatttcttggagagaagtcttatttgacataacttttttctttcttttttatagaatttctaacttataattaaactgtgaaattggcgaaaaaattagctaaattaaatataaaagtcagttcaagaattttataccaagaaaattttttatcttgtttcacttccacgctttagttaaccgagagcttaattttttccggcatgtcaaaccaattaaattaaaatgtcggtccgcaaatgtcgcactacgaaattaacggcttcctcggtgatttgtcttttctattatgaccccaacccccccccccccccaaaaaatgtcatgagcccgataaagcgctaaatcaaagttcttaaaaatttaacacaaaattcttaatttttcctcaaaatatattaaaaaaatgttttttttacgcaaatgcttatttcttggaactctgttctgcatgattttgtcatacatactgtataatgagatgtggacggatggtaaaaaaattattgttgcattttaaggttattcggcatttctgttctctgctcaaaaagg

SEQ ID NO: 15228 - DNA, 311 bp, Heterodera glycines
aatttttttaagtgggtcaaactgtataagtaccgggcgatgttcaacttggtaaaaatcacaaataaaactacttagtcactcaatttttgaaaaaattattttttttttgtttttttttgacagttcaacccagaaatagtggtccgcaaaagtcggtccgcaaatgtcggtccgcaaatgtcgcactacgataaaatagcggtgcacactaaaatatgctttcagctcgcgttttgatgacatttttttaaattttaaattaggaccaaaaccgtaatttttaatataaatatttattttgcttgaag

SEQ ID NO: 15229 - DNA, 2776 bp, Heterodera glycines
tttcgcgggttttttaaacaaaaaatggaaaatcctgtaattttttgcaagaattatgagaaatttttcatgtgaaaattccaacaaaaaaccgaaatcatattcattctgaaagatgttgtttaattaatctccgagttgcaccttgtcaggtcattgtgcgtctgctgcaattggtgtgcgacatcaatccggaactgcacacgaaccttcaactccaagtcaaactgttcggcaaagcggcataaactgaacggacggaggagggagttgggaaagaatgttttttgatgtgatcgtttatttaaaagacaacaattagttttatattccatcaaatataagaggttattaaaagtatcgtaaaatgctgctgctttgttaaagcttaattagctgtaaaaatattaaaaaaatattgattttattattcgaatcttgtaaattattccatcaaaaagctttttccgattatttggtagaaaatgtaaatttatttcggtgtttgcaatggttgaggtgtttgaattggacaaagggcaatactataagcaaaaaaggcattcaaaaattaagtttgtttggcactgtatgttcagaattccgcgattggaccactgagttggttagagctcttccggaagctttgcaattcggtggcgcccaccggcggcactaattttgtcgccacgccggacatgtccctgctaatagtccgtcggtggtactgcccgagggcggccgtgccgccgtgcgccttcgcctcccgtggcaatgaagcggacttctgctggccgtttagcaaagcctccgctgcttaaaggagtgttttgtgttgtgccgtttttgtgggccttttgctgtgcccacctccgtcggcggcactttccttttcttcctccaaaaatgcctttgtctgttccctctccaattcgttgttcgttgtcgtccctccgcttctctttttgccctttgtcgcttcttcgtcgccttcgccgtttccctctccgtcgttggcattttgtgagtccgaatcggtcagtttcagtccaaccgcgtggtaaatgacgaacagatcggtgatcagagagacaatgcgaagcccaccgtacgcaaagtgaagcctaggaaagggcagcacttatgttatgtaagaatgagtgatcagatgatcagaatctgtttctgatcagcccttgcttctctatcggaacattgctcaaattgctctcatcccatccctgccgttcaattaaatgatcgaaatggcataatttgattagcctgatcgttaattctctgatcaacctgtgctctcatttagtcatacaaattgagctgtcaactcattcggcatccttccgatcactttccaacaacatttaccaaaatcgaagtccgtccgtcgcgtacaaagcacaggcgcctttctcgccgcacttttgggtccaaaacaggcagaagttatcaatgattgtgccccatgcgatgggcgacggcaaagtcgcgagcagagagaccaaaaatccgttgaagccgagcgaaatgctccgatgctttggtggcactgatctttatgattaattaaccttttgaattgccatttaaattgggtgattacctcaacatgatcagtacaccggggacaacgcccattccgccgataatctgtgaaaatgatcagaaatgacaaaagtctgggcacaataatataataatgccgaaaagctaaacaaaccccgccgatggccacgttagtgaagtaccaatacctgacaaaatgctgctttcatttaaattctcattcattttgatccaatggatatgtacatttttgatcggcaattttcctcccgacaaaactctcgcgacacgcgttcagtcggtgaacatagacacgattcgaacaaaggcgttttttgcgtttccaaaatgctaaaggcactttcaccaagttgacagccggcatggcacggagaatagtagctgagaaggcaagtcaaattaacaattggcatgatccaatcggatttttaaggaattaattcttttaatatcactcacacggctccgttggggtcacagaccgggtaaagcggtgccaattcgcaatggcaccccacggcacaactgctggtgctattcgcgttagcaacacttaaacagccaattaaatgtcaaaatgcttaggcacttcaatccctgccattgctcacagcgaatcgcccaacgcagtcattgtggaagtgcagccgaccagcgaattgagcaaagaaaaacatgccgcaatggcaccggtcattgccaccttcagcaggggcgggcgagggaattaattaattagctataaaataagtaaagccacgggattcaatgagcataatggtataaacctcaaaaaccctgaggaataattacatgtgataattggctaacaaatgatcagaaacccagacaattgatcattcaattttaaaatgagttaattagtgcctacccaagcggctgcttttcgtccctgcaatttggccactcgcatcaccaaactgcccaccattactccgacggcaaatgtggccactccaattatcgcttaattataagaagtatcaatcagtccatttgcgtttgtacagacccattagccgattgacttcgtattggggaatgccgaattgcaattccaaatatttcggcatgaaaatgtaaaagccctgaaattagtttttaagctcctaattggtaagattccggtcacttgaaagcgaacacgtcg

SEQ ID NO: 15230 - DNA, 952 bp, Heterodera glycines
tccataccccacatatactcaaacggcccgaaaatcatttttagagcataacaactgatgacagccactgtcattgtttccaaagagatttctattaccagattgccaaaaaaagagatagccatttttttggaccgtccatacctcacatatactcaaacggcccgaaaatcatttttagagcataacaactgatgacagccactgtcattgtttccaaagagatttctattaccagattgccaaaaaaagagatagccatttttttggaccgtccataccccacatatactcaaacggcccgaaaatcatttttagagcataacaactgatgacagccactgtcattgtttccaaagagatttctattaccagattgccaaaaaaagagatagccatttttttggaccgtccatacctcacatatactcaaacggcccgaaaatcatttttagagcataacaactgatgacagccactgtcattgtttccaaagagatttctattaccagattgccaaaaaaagagatagccatttttttggaccgtccatacctcacatatactcaaacggcccgaaaatcatttttagagcataacaactgatgacagccactgtcattgtttccaaagagatttctattaccagattgccaaaaaaagagatagccatttttttggaccgtccataccccacatatactcaaacggcccgaaaatcatttttagagcataacaactgatgacagccactgtcattgtttccaaagagatttctattaccagattgccaaaaaaagagatagccatttttttggaccgtccataccccacatatactcaaacggcccgaaaatcatttttagagcataacaactgatgacagccactgtcattgtttccaagagatttctattaccagattgccaaaaaaagagaaagccattttttt

SEQ ID NO: 15231 - DNA, 986 bp, Heterodera glycines
gcccgaaaatcatttttagagcataacaactgatgacaaccactgtcattgtttcaaagagatttctataccagattgcaaaaaaagagatagccattttttggaccgtccatacctcacatatactcaaacggcccgaaaatcattttttagagcataacaactgatgacagccactgtcattgtttccaaagagatttctattaccagattgccaaaaaaagagatagccatttttttggaccgtccataccccacatatactcaaacggcccgaaaatcatttttagagcataacaactgatgacagccactgtcattgtttccaaagagatttctattaccagattgccaaaaaaagagatagccatttttttggaccgtccatacctcacatatactcaaacggcccgaaaatcatttttagagcataacaactgatgacagccactgtcattgtttccaaagagatttctattaccagattgccaaaaaaagagatagccatttttttggaccgtccataccccacatatactcaaacggcccgaaaatcatttttagagcataacaactgatgacagccactgtcattgtttccaaagagatttctattaccagattgccaaaaaaagagatagccatttttttggaccgtccataccccacatatactcaaacggcccgaaaatcatttttagagcataacaactgatgacagccactgtcattgtttccaaagagatttctattaccagattgccaaaaaaagagatagccatttttttggaccgtccatacctcacatatactcaaacggcccgaaaatcatttttagagcataacaactgatgacagccactgtcattgtttccaaagagatttctattaccagattgccaaaaaaagagatagccatttttttggaccgtccatacctcacataagtcaaacggcccgaaaatcatttttagagcataacaact

SEQ ID NO: 15232 - DNA, 2131 bp, Heterodera glycines
tgaaattaaaataaaataaatattgaccattttgctttgttttgatttttattttagtgaatttttttttcttttttgaaatttaaggcaaagggttttgtttttattatttttaaactttttttcttgaaaaattccccggttaatcccgcttcctatcgatcgaaaatccagaacccggtcccggtttttcctaaaaattctcggtcccttcacttttattttttacaataaattattttttaaattcgttttcataattttttcacataaaaaagctcataagagaatccattgaatttgtttagttttattctgagatttatcatttgcatttattttgacatgctgatacttaacaaaattgtagataaaaatattaatgaaaaattttcaatttaacttcataaaagttaaaaaggagcatggcataattttatatcaaaatagttttaaaaaataataaactaatttaaaaactttatctgaaaacaggtatttcctgttgattaagtcaatcagtaatacagttaatggtatcattaacggtctatgtgctacctgtttttgcggtaaattaccacgctggtctctatataaaaatcgacttgaaaaattcattccctatgtttgcttgactataaatttaggcccttaaaattatctcacttactaaaaataccgaaaaataaatgattttatctaatattgaaacagagaaaaacacagaaatatgtaattgatagaaaaaatgatttaaaaatccctattttataatttccgaattgatagaactttttattgcctaaactaaaggaatgtggttattagataatgtattattttaaatatattgtaaatttaattagaattgatctaaaaatatattttttcatccatactttttaccggtattttttaaacataaaataggggctttaccatttactgatcgttaggctttttggaatttgaacagttttaataaggaagataaatgttttaaacttattactaattaagaacactttggaggaaagcaacttaaaggaaggggaccggacaggcaaccacgaggctggtcacgccggggcgtgcaagcttaaccctcactgcactaggataacatacgtatgttttgaaataatgaaaaaattaaatagtcagaaaaatggtgacagagtagaaaattattttggcaattgtggaaaagaaaaaaactagtcaattttattataatttatattttaattcacagcaatgggattgttatactgagttattttttgaaaattttttcgtttttcagggttcttgaattaaagaaaaaaattggtttcaaaggtttacgttttaaatcatttgcttaaatagtatgtgtaacgaaacttcatttgtttataaattttaaaggttcgacaaattctgagagcattatttttcaggccatactcattataaaatccaaaatttcaatgcgggtaaataggcgccgctgggcctaaaattttctaattatttttaaaatccgtagccatgtgggctttgaacctcagaccctcgcttcattgggccctatttttagagctcgatctgttcttatttataaaaaatattctattggagggtctaaaaaatgtcctatttgataaaattgttaattctgattattgacaaagaatgaaattgttaattctgattattgacaaaaaatgaacttcaacattttaagatgaccaccatccccgatccaaggacgaacagcagagggcgcaccgactacaagacgaggccaaactacaacaaaaaacaactggaatcattcgtagaaatgtttctaggtaaacaaatttttttgaaaaatttttcgaaaaatttcttcctgtgaattgaaaaatttttcgtgtcaaaataaataagctcattgtaaagagcacaattttttaatcttcagaaaacaatgaattttttacagttaatatcgcaattgaatgcccatacctaagcggttataagtatacaattaaaagggggagggtcattcctcgctgacttcgtatagggtggggacttcgtatcgtttggacaaataatgtaatattatgtagggaaagatcagagacgtagaaat

SEQ ID NO: 15233 - DNA, 1151 bp, Heterodera glycines
ttttttctttgttatccaaatccaacaatcttcgtatcgttcgaaagctcttaacatgctttattagccttattaaaaaacaaaaaaaaaataattggtatttttccaaaaaaaacccctaacagaacggccccatcaggtaaaatggcctttttgacctctaatgaccggaaaatttttcgaaaaaggcattttttagcaaaattttatcggaaatattaattatatttaattaattttttttaaatgagttcatttttgtcaaaaaataagcaaaaaagcaaaagtttctcttttcaggtcgatttttcgctaaaatgagtaaattttactgtatcgtgttttttcttctaaattggtttctaataccatatatgcaatttttaaaactttactttgcttttagcgaatttgaagaattttgaattacatccatcaatttgggaaaatttatgtccacttttttgcatttttatgtccatatttcgcaagttttgatccacattttatggccatatttcacgatttatatccatatttttcagccctaaccatgaatatatttaatttatacaattcaaagcgatctttcactaagaaattatattttttcaggcggaccgatgagtgagggtgtcctcactgggccaattgactttgcaggccttcaaaacgacttgaaaatggcttataacatcacgtgtcttctggtaagaaattcaattacaacatcgtgatcaagtcactcctttagggtagtattcgtcttccacgaaagaaattttgcagccccataggaatttttttctgaaaattatttcagaaaaccctaaaggagtgatctgatcacggtggtaaaattgacgttttagtcagcattaaaagctatgctcatttatttttttcagaatttttcttgcattacaaaaaaagtatatttggtcttataattatgaaacgccgtttggggccactttaggaaaaatttttagatttttttcttttaattgttcaaattttttcatggggctcataacattaatggggcaggaatttaccgtgttcggtcattttgtcaaattctaaaactttgctcaaaatgagaagtatttgaataaatcaataattctaatattctcagagaaattgac

SEQ ID NO: 15234 - DNA, 3456 bp, Heterodera glycines
  unsure (1)..(3456): unsure at all n locations
cattaaattttttataaaacccaaaattaaattaaaaactttgaattaaagtcaatttaatacataaatgccatggngacactaataaatgataatgaaaagcataattatgcatcccgttacattttatagccccattaaatttttttataaaacccaaatttaaattaaaaataatgttattaaagtctatttaattaaaagcataaaatgccatgggacactaataaatgataatgaaaagcataattatgtatcccattacattttatagccccattaaatttttttataaaacccaaatttaaattaaaaataatgatattaaagtatatttaatgaaaagcataaaaatgccatgtgatattaataaatgataatgaaaagcataaaaaatgccatgtgatattaataaatgataatgaaaagcataaaaaatgccatgtgatattaataaatgataatgaaaagcataaaaaccctgggataatataaaaaggtaacggtacgcgcatataaccgataaaaacccattaattaactaatcgccaaaataatttttggaaacaaattttaaaaattcataaatttaagcattaaaatcggcatggttcaaacttatggccattggccataatgaattggtgcgggttgccaagaatcggaaactatacaatcactttgacgaggttcaaattgggaacaaccatgacgagttcggcaaatacattgtgttcttgccgaattggttcaatgtctatcagtttatttttgcggatgacaacggcatgccgtttggccgcgagttcaaaagtgccataaagcaaatgaaaaagtaatcatttccataaattcttacacttatctatttcatgaaaaattaattgcaattaaatagcaaatttaaaatgttttaaaattttggcatgcatgaccaatctttgccttaatttctatcaaaatcaaaaacttaatttttcggattcatttaagataaacaccaaaaatttaatttcttccgagaaaggccagcaaaattccgtcattaatatccacaacaaaatattttcagtgccaaaaattgccgaataatcatccccgcaaaacatttttagtgtttttttagaaatcaaaccctattaattagttaattgattaattcttccatatacccatttttaatcttaaacataatgctacttgattaagatgtttggacgaaattgtagaggagcaagaatctccaacacatcgtggcataaaaacaatttgcatattgccaagaaaagtggacagacgatatgattacaagaattgggcaaataaaattgaccaattaaggaatggacaaaacatattcaaatgcaagaaatggacaaaacgccaggaagtggacaaattgaacaaaatattcaaagcaatttttgagggaaaggcaatccccgaaataatatgcgatcaaatcactctaagaaaagggtataaaagaaacaaaaatgggaagacaaacaatgcagaagctacaaagaatggttctgatgcggaaagtgaaaaatcggactcggatactgtacatatgaccccaaaagtggcgactacggctacggtaccgaaatcactgccaccgagaagcgggccaagtccaaaagcaatgattggatttcaatcaagtccaaaaatgccgagaaaattaaatgcgagtgccatcccatcgcatagttccaatgacaattattacggtatgcttggaccactcaaatcaactccaaaatcgtcggcaaaattaaatacaaatgcaaagccatcacaataccgtaacatcaatggtacagttgacgattattattacggtggaaataaggaggacagtgaaactgatatggaagaggctgacccacgcaataagagaacacctccaaaaaagcatagaaaacaagagaagctaagtgattcgcgcagactggcgcaatttcaaagtataaaaggatacggtatccatgatggaagtaataatggaggaaacagtattccaacaaaatctggtagttcttcgacacctatacacaaatcatcaggcaacaatagcccaaaaaaaagtcatagtccaaaccagcacagtctaagcaactcactaaaatacagtagcccaaaaaaggcggcctacagtacagtaaatttacctgtgaatccaccacacaaaaacaacacaaattataatagcctaacaagcgaacaaagaggtcgaaatcttcataacgcaaacaacggagggcatcatagtcataaaaatgaaggttatggtagcccagctggaagtacgaatatgaattcgctgtccaaaagtcgttctgccaacaatagtccaaaagaggcggcctacagtaaccctacatcaaatatacatatgaacaccagtcataaaagcccaaaaagcgagcaaaaaggccgaaatcttcataatccaaacaactcagggcacagtaatcacaacaatgaagggtacattagccctgctatgaaaaaaaatgttaatttaattccaaaatttttctttgacaacaatagccaagaaaaggcggataacagtaaccctgcagcaaatgtacctgtgaacttgaagtccaaaagtttatctgcaaacaatagcccgaaaaaggcggcctacagtaaccctgcagcaaatatacctgtgaacttgaagtccaaaagtttatctgcaaacaatagcccgaaaaaggcggcctacagtaaccctgcagcaaatatacctgtgaacttgaagtccaaaagtttatctgcaaacaatagcccgaaaaaggcggcctacagtaaccctgcagcaaatatacctgtgaacttgaagtccaaaagtttatctgcaaacaatagcccgaaaaaggcggcctacagtaaccctgcagcaaatatacctgtgaacttgaagtccaaaagtttatcagcaaacaatagcccgaaaaaggcggcctacagtaaccctgcagcaaatatacctgtgaacttgaagtccaaaagtttatcagcaaacaatagcccgaaaaaggcggcctacagtaaccctgcagcaaatatacctgtgaactcaatgtccaaaagtttatcagcaaacaatagcccgaaaaaaatggcctacagtaaccctgcagaaaatatacctgtgaactcaatgtcgaaaagtttatcagcaaacaatagcccgaaaaaaatggcctacagtaaccctgcagaaaatatacctgtgaacttgaagtccaaaagtttatctgcaaacaatagcccgaaaaaaatggcctacagtaaccctgcagaaaatatacctgtgaacttgaagtccaaaagtttatcagcaaacaatagcccgaaaaaggcggcctacagtaaccctgcagcaaatatacctgtgaacttgaagtccaaaagtttatctgcaaacaatag

SEQ ID NO: 15235 - DNA, 3889 bp, Heterodera glycines
  unsure (1)..(3889): unsure at all n locations
atatcattcaataattaaataatacttaaaatcgcaattcatttatttttnctagccaaatctaaaacaaattatatttaactcataacaattataaaaattatgaaaaattatttgaaatttgtcaacaaatttgtaaggaaacccgcacagccataaacaggatattcagcatgcctctattattattgcatttgtttctttacaatatctttagtaatgacaatttcttaaattcatgtttgttgggttatcaaaaataacaaattccttaaccaaatttaacagatatatttttcgaaaaaaaatattcagcagtaaatgaacatttaaaagagaggaaaaaacaactatagaagcaaatttttcattcaataactcaacatgatcgacaatccaataaattaattaattgtctcccacataattaggcttctttttcgccgcattttaataactaaaatataaagcgtcaatagttattatattagtgtatgaaattattttatcgcacgagtcaaaaaactttaacttaaaaaagatctaatagtaaataataaattaaatgatcgagaatgtgatttgtatgattttgaataaattcatttcatatatataaacttaacatttgttattattttatctttcattaaataggatatttactacattcaaatttatcaaattttaaacgtcatagtttgcttcttgtatttctcacgctgaatggcttgcggtcttgatgataggctaaatactgtcattttagactacacagaaaacaataattttaataaaatattaaaatttttttatattttttttgaaaaaatttattaagtagttttttatcattattattgtcaaatttctccattattattgatagcgctattttaaatatcattcagtttatagttgaaaagcacgctgttgtgtaatttttcaatattcagtaatttatatggaacttttatttcttcgtactgcttcaataacatctctttttgttccattcattcactttattatttgactaacaaatattaaataaaaattcaatgaacagccataactaaagccactcaaaaaaagttaataaaatttctgaatcattttgacgcaatacattaccatttatatattaatttatttttatgaaatatttatgttttactttgcataaaaagcttcatttctatcgaagacgactacgatattaagcatttcactaacactgccacatatgaatttttaaaatttgcttatgaaatttattgattaattctcggaaaagctaaagttgttatattttaatattttttaactaagcaattacaatttacttctattttgtttataatttttatattattattttcgattttatttttgaccatttttccaaagcctcaattgctttatccaactgatttgaatggtcatcatttccataggcatactataatttaacatcgtcggcatacatttttatgccaaatgatgccgaatcatttgtaataaaggacggcagatcatttataaaatttaagaagagtaattgccctaagacacttccctggggcaccccggaaaatattttgaaactttctgacaattcttcgcagattttaaccttaaaactccgatttaaaaaaaaaaaaagtttaaaaattatatattttgccttcaattcctatttttttgattttatgaagtaataaatcaattggaacagaatcaaacgccttgacaaaaacaatatttgcattatatatatttatgtggatttttaacctttattttttttagaaaaatttaaaatcagtgatagcatcaattatttatcaatatatcgttgaaactttaaaaaaatgattcatcttcaatttctgtttaattaattcttgtcccattcactgttaccctctgctcaggtgccttataaatcactaaaggagcgcaagtagattacatttgattatttatttcttcgctaacacttttaataaagtttaaaaaattccttttatatataatataaaaaagaaacgcttagttaattgcatattttattaattgagtgattagtttatttttattgtataaattaatattttgtttttattcttgtaatataaaaatttaaacaaacatgtataactaatatgcaatattcaaaagtttgctgtaagaattttaattaaaatacttttataattttacattctttgtattttaaaatttagccatctcactaagagaaattgtctgaaactgctccaattcataattctgatttatgaattgaggtctaaaatcattctgcttgtaaatgaacaaaaaatattaaaatacaaaatatcctgttctttttccaaatcaaattttcaaagtatccagaagattttgaaaacaatgcattaaaaaattctttggcttgccatcgatatcagataaacaaataaatcatccataaaaaatatatatttattccaaaaaaccccaaaataaaattgaaaaacatattgaaatgaattctatagagattaacaattaatccttgtccattaaaccaagttcgtaatttcaaaagaatttaaaatataaattgataaatttattagataaaaaaaattcaactagaaataattcttacgaaaattgagacaatttacaatagagttttgaaacgatccaacataaagaatttattgcataatagtagtatatggcacattaatccggtgtaaaatcccccccccccncccccttcccttaccaaaattccccccccctgaatataaaaattttggcttcaatcagcgttatagcctttcttgaatgcatcttttcttcaagaattttgttttataattaggggcaaaaattaaacagttccacttatttccttttaatagcaaaaccaatgtaatttatcacgtaaatatttagcaacattggtgaaaatgttcagttattgttagggtaataataacaggagaagatctcgagaacataataaaatgatctctacggaacattctaatggaacagagtagtagtatatagtgccaaaacggcgcgggtaccggaaaacacccctccaaaatcccgcgcctattgaaggggtgttgtgttttcctttgaagatgccgcccgcgcacaatcccgagcttattgaaggcgtattttcttttgaagatgccgccttaggattattaccgcaaaatcccgagcctattgaaggagtgttttcttttgaagatgccgcccgcgcacaatcccgagcctaggatgtttgattacctttccgcggcgcggcggaaggggaagtgaaaaaaaaacacccgcgggatttggggaaacggatttggctgggcggcaacatcaaagtgggccaataggtttaggatagccggcaacatcaaaggagtacaccctcccttaggctttggttcttggcggcagcttcaaagcattgcacccctcccataggcacgggtttgtgcgggaaacacccgctcggaaaccgcttgctttaccaccaataggtttgggatttgcggtaaaaaaatcccaaggcggcaacatcagaggaaaacaacccctaataggtccgggattttgcgggaacctatcgcggagcggtaacttcaaaagaaaaaccccttccatagacacgggattttggagggggcctgtccggtacccggaaaaaagtttttttttcatactaatttattgtattcattttcaattttatttttaaattttttggaataattaatttttattgtccaatttattgcattaatttgctgacatatcaaaattccacaattcgcattatcgattactttgcgcggcggagcagcggcggagagag

SEQ ID NO: 15236 - DNA, 969 bp, Heterodera glycines
tgccgccggatgcgcggtggttccgcgctggcacgcggatagcatttgtatgtttagggggtatgcctttttattttcatttcttttttttttagttggtttgggaattttccttatttggggggagttatgtggatgtgtttgagtgcgttttagtgaccaagattaattttggattgaattttgcgcgttttggggattttggtgcctttttcatgcctttttcgggattttggtgccttttcgggattttgatgctttttcttgccttttttcggtattttcatgtctttttcgggattttgatgcctttttcttgccttttttcgggatttttgtgcctttttcttgccttttttcgggatttttatgcctttttcttgccttttttcggtattttcatgtctttttcgggatttttatgcctttttcttgccttttttcggtattttcatgtctttttcgggatttttatgcctttttcttgccttttttcgggattttggtgcctttttcttgccttttttcggtattttcttgcctttttcgggattttggtgccttttcgggattttgatgctttttcttgccttttttcggtattttcatgtctttttcgggattttgatgcctttttcttgccttttttcgggattttggtgcctttttcttgccttttttcgggatttttatgcctttttcttgccttttttcggtattttcatgtctttttcgggatttttatgcctttttcttgccttttttcggtattttcatgtctttttcgggatttttatgcctttttcttgccttttttcgggattttggtgcctttttcttgccttttttcgggatttttatgcctttttcttgcctttgttcgggattttcatgtctttttcgggatttttatgcctttttcttgccttttttcggtattttcatgtctttttcggggattttgatgcc

SEQ ID NO: 15237 - DNA, 3462 bp, Heterodera glycines
aatggcgaattttatggatggctttcatgctcaatttgggttcatgtcgaatgcgttcagcacgattgaactctgaaaaaataaaaattttcaaatattgtaaattttatgtaataaatattttattaattcattttttgatttttttaatcaccgtgcccggcacggacaatgtcagaagagaggcgttggaatgttttgctattgtgccgccattcatttgctgaatctcttcgatgggaatgcttctgccaaaaaaatgttggaacaaaacacttattttagaataacaaaaaaaattttgtggtaaaaatttctttaaaagaattttttgattttttgcaataagaaaaacgaatttgtcaaaaaactttttaaatttgcatagattctttttttaataataatgttatttaattttgtccaacaaatttaaattccctttgaaattctcgaggtaattagcctaactcaacaaaacccgaaaatatggcaaaaattcctagattttactttaattttttctttttagaaaaatccgcattatttttctgttttcgaccccctggcattttcatatttctttggatgttcgacttgaccccttccattaatttttcatcactcacaaaatgccgcgttcggatggcactttttttgcgcctgctcggctcccttaccggctgtgccgtcggagtgtgttcatccgagtgtgccgatgataacgttcgttgtccaacaactgctgctcgcgtgcatctttgctggtccattgtcgatcagtttcggcttaataaaaaatttttgaaaatttttgggcttagaaaaaattaatgaaaatttttaaaaatttccaatttttcgcctggcacctccacgtaaactgcgcaacattgacctcatccgatgagcattgtatgtgcgttcgtcacgctttgacatgtaaacctttttgccgaaaatcatttaatttttgttttaaaatctttgaaattccaacaatgacaatcagaagagcagccaattcagtgcacaaaaagctgatcttgaaaaaaaaacaaaatcaatttaaagtaaatattcaaaaaatgtttaaaatgaattttattatttattgtaataattaataaaaaaattaatataataattatagaaaaaattaaaataattgccaaaaataaaataatttaattatttggaaaaatttaagagaatagaataaaatttatatatttaaacatatttaaatattttacaatataaagtaaaaacatgaaaatgatttcatttaaaataattttgtttttaaaaaaagtttttgtttaccttcagcaaaatgaatgaaaagccatatgtgtaatcaaacaatgagttgtccaactcagaagctttgtacagcttatttccaacttctttggacaccgaaaaatgaaatttttgggaaggcaatttttattttaattaccttggcattagcttaattaatgttagcaaaaaatagaaaaataattttatactttacaaggcaataggtatattccttcgttcaaaaattccaaaatctcctaacaataaaccccaatttggtaaagcttttctcattgaaattggcgccaaaatgcatcaaaattttttaaaaaatcccttaaaaatcaattaatacgaccgatgcctcctaaagtcaaactcaatgggtcgaaccaaaaaatttctgaaaaataagcaatggaattttcaaagacttggcaatttttttagttcggttcatgctcagaaaaaatccttcagtaaatgcaacccaccgatgccatgtacagtatgatacagttgaagtcgaccaggcccttcattacagtaaccaagaaagaatacaaaaattgaaattaaacctattgtttttaccggcaaaaatgttggccaacgcggtgacaaacagagattggtacgggttggaccgcagaaggcacagcgtgttgcacagcaggccgagcacgtccaacgcgcagccgcacagcataaatgggaccgcacgacgaacagaaactttttttcgggagggggaacgatttttaaatggcaaaaaattttgaaaaaatgtgaaaaatttaaatggaaatttgggaaatgccatttttattaaggtatgtagaaagataaccaatacctgacactttgaagaaactttcttggagggatacagtttttaaatggcaaaaaaaattgaataaacttcgaagtggaattactagtaaaaaattaagcgattttcaaaaaacgtagaaattttgcgtaataaactttttctggttttctggttagtccaatttttgtcgatttaactttttggcaaaatatgaaaaattgaaacggatttcttcttattttaattaaatatcactccaaaaacagcaaaaatttctaaaaatcggtaaattttcttaataatttcaatttaaaattccaaattacgttccaccgatgtggtcacatccgaagtgtcctcttcatggttgaatgggtccactgatgtacaatgaaaatcggtgaccgctaaataaaaaatatctaataattttgatttgtaaattttccaaaacttacggtctgaccaacaaaatcgccatggtccaagggttgaattctaaaaaaacaatattagaatttcccaattgaaaccccaaaaagacaaaaaaaaatacaatagtaaaatccaagtaaaaaaaatattgagtccaggataatagaagtaattaagtaattagacagaaagcgtcaaaattttcgtcgccgaaaattcaaagttttgctattttaaatatgttaattttcattttattttaattttccaatgccttgtaataggtgggagggtaaagcttgtcctcattgtcaatggttcggttcgggtacacgtaatatttgagcacttctctggtgttgagccaattgtttgtgttgacagctttcaaaattaaaaaaatgaaaatttcgaaattaattttttattttaattcaacaaaaataaataaaaatttatttatgtttttaaattaaaaaattaacccaaccaattaaatttgcaacagcggcacacagtgagaaaacaaatgccgttttgatcaaacgaatgcgattttctgatcgaattttggtcagccgatgggaaatcacgggaaggaccataatcatatgaaaaaagagtttaattttaaataactatatacattaagaaatggtcgtggattataaaaaaaattaaattttttcctttggaatattcggactttggcaaaatccgttgtgctcgcttttctctgcgtcgaaaattgaatttcctcaattttggccaagcatttggccaatattcaaaaaaagtttaacacaaaaaaattatgcaaatgttcgcgctattacttttaaaagtgcatctccctaagggtgaataagaacagttgactgaag

SEQ ID NO: 15238 - DNA, 2946 bp, Heterodera glycines
aatttcctaaaaatagtaaaaaaatgaaaattaggaatagcctccagagtaagacctccaagccctgatataaaatatctataaaattaatcaaaaatttaaaaatattatccaataatttgtaaaaatatattcattttactatcatttaaataaataaaatttaaaaattcaaaacttatagaacacataaaagaaagcatatgatatagataatccaaattttgctaagtttgaagtaataaaatttaaaattccaattaataacaaaaaaatttgcttacgagtaaacttaaaatgctgaaacttgacaatagaaaaaacagaggcattaataagtagtaatagaatgaattagcgaaaagatttcttataaataatgaataaaatttcaaattcaaagagattaatacgacgaattaatcaataataattaagtaaaagaatacatttaaaaaatatagttaagacatttgcatgaacatatttatttcgatttgttaaaaaaagttttattttccattatataagataaaaagtgttacgttttatttactgttattataaattaagtgaaccttctctggtatagccgccagaggaacccgaaattttacaagcttaaatgaacaatattaaattatttgcctattgattgaaaagcccaacagatttgctctttatgcttcaactgacagaaaaggcaaaatggtggcggttaaataacagtcaatttggcctccgtcctcgctttatgattagtcatttctttctttcttttttcgtgcttcgtcatcgctctgcgaagcgatgacactccggccgcgcgaattaaagttggggaagtgatggccccggctcgccttcgttcactacaaatgccaaaagagtactgtagaaagcttccattgacagcaacaaaagggccattggtggattccattggcgcatgactccagcaagaccaaaggcatgctcccgctcctgtgctaatcggcgcaagaggacacgacgaagttcgactggaatttgaattcggggaaggggattccatggccaattgatagggagttgtgtttcctgttgttccctaatgaatggatgggaagcagttgttcggcctccataaggatgagagcgattcgggccaaaacgccgcggtgtgaatcggctttccccttcaattgccctttggcgttgattctgatgcatttggtggtgttgctgttgaatttggtgttgcggctgttgctgatgattttggtgttgtggttggctttgatgttgcggctgctgctgttggcatggagttacgatcatttctccattggttggcatcaattgtacaccattaactgaactgctcgaacaactctgctggttaaagagcaccaccaccgcagtacgcaatatctgtggattggggtacaagacagtgggcgggggtatgagttgatgcacctgggcccatttaagggcatcaaatcgaaacccattttgaggcaaacccgtttgtgcctttgcctttggctgcaaatcagtgtgtgacctttttactgcctttgctgatcctgaatcattttcacctcgaattttaaccaaacccactctctgatctaccgtaccattctcctttggtgccacagtttccacaccaattactgtacctccaaagcccttttctgaacccgaattttgagtgttcaaacatattatttgctgacccgccggtgtggaatgtgccgtcgaagttgatggacctgcttccaactctaattggcatgccctttcactgttttgagtattgttggccctcacattgtccaccacatggcccaccaactctctttgccactgctgcatttcttcggagaagtcgaactcactattctcatcactttcacaaaccggcctttctttttctggccccatggcccatcctccgttactcattagcatcgacccccacaggtacaagaccaaaagaaaaatgcttccctttattgtgccgcgacctttaaccttaatcacagcctttccttcctcattttgtgaacccaatttgctttcataatttaattttaaacccccatccttttccgttataatcaaacccaaattttggctcagaatttcaatccttttacccgttccgcttacatttctatttatcagcccactgctatcatttgcaccgcgctcgcccgcactctcaattccattacccgccttttcttccttctctttcataaatcccgcaaaaaagtcgccaaaatcattgaattcgtcccggtaatgatcaaaaaaaactccgcccagaggataaaagaattcaccggctaacaacattggtccaagggcacttccctgcgtccgtttgattctcaaaatttgaaaggcaaattggtgatgggagactcggggtcttaacccaagaaagggcctgtccggagtcaccatcaaattcaagccgtttaaatttccgatgtatccttcatccaatcgataccaaagggaagacccgcgattcaatgcctcggtgatccgtttcttcagacttcgtcgctccgtggtactcaataataccttctcgttttggataatatggactgattcatcaaattttatcatttcattttgatctttgatgctccgcatccctcccgtggacaaagaacaagaaatgcttacaaatttgtacaataaaattcctatgacaaatcggtaacccataaaatagggcagaaatcgtaagaaaatgtaaatggcacccattgctaataatagcattaaaatgaaaaatgtcatatttttaaaattattaaacgggttgaataaattttttaaatcgatttctaataaatcctcccatttaataccatctccatcctttattttaagtttctcaggaatttcgcactttaaattttctttcacttattggta

SEQ ID NO: 15239 - DNA, 3582 bp, Heterodera glycines
cccatttactcccctcatttacaaaattttaaatgcatttttggaaatgcttacacagagtttctgttaattaccccccccccccctttcaaccgaaaaggaacatcttctggaaactcgatgtgtgggaagacgattcgcgccggcgccgtcgttttgtgcaaaatccgtggggcaaacggcacaaattggctgccacaatgcaacaaaaagtggacgaacaaaggcaacagcagcagaacgaatcggagacggaacgggaacaatttctgaaggagttgtcacataaaatggttcgtccgtcctccaaatgatggcactcattttaattgtaattggggacagatcaccgctggcggacactcaaagggttcgtcggtgcacgagttcatggacgaggcggaaattgagaaatggctgaaggacgtaagcgatctgagcgagccaatcgaaggcgagcggagggaaaaatgataatggcacagcagtgttccaatcaatttgtttgtccatgcagatttgacgacgtacagcaccgtcggcaaactgatcacccccggcctggtcatccccggcacaatttcgttgaccgaaaccgacctgttcttcgacgcggacgaagaacatcccatgtacaggaagcagaacccgctggtgggtttccgcatttttaaaaatttttttaaataacgaaattttccacaattttctccccatcattcgtctgtctctcttccctttacaatttgctttactcaatgctcatcatcctttgctttgctgggaatgagttcctccacttttcttgcctttgttgtgtgacgctaattcgatgcgacagaattcgcgtggtcgtcgcatcccaaaattgtcgtgtcgtcgcttctctcttaagccccccccccaatttcttcgcgtcgtcctttccctcctcccacgaccttttcattcgattagcaacagcagtgtttactgtttgccgttcgttcctccaattgtactaccaaatattgagctgagtttgtgcaggagagaaaaggttagagcggcgccgagggggagagaccgtcgcattcattgcattggtcccccatcttccatcgttcatcttcggcagatcgtatcacagaccatttggcaccaataaagttgcaacacgtcattgtacattctcttcgaccattttttgttgtgatttttgtgtaaaatttggcggacaaagaaaatgcggaagaaagacgacagaatgcgggagagagagagagagaagaggtccatcaaaaaaagaaaaagcaacaaaaacaattgggcatcatcgatcgatcactcagcgatcaaccggttgagagggtgtatcatcattgatcattgatgttcccacaatcaaagctgttccaatgctttgccattcagcatcagttgccggaccaatgcccacacggctcgagcactttcgtctagcgatttgggcgaccggtttttcaacaggtccatctgaggcagaaaaaaatgggggcaccgccggcactgcaaacagttgaccatttgcagaagaatgccaatgattcggtcgccaagacagaaatctgaaaataccatttgcctgtacgttttcaaaaggtttaaaaatgttaccgttccattcatggttggcataatgtttttcgcactcatacagcacgagcacctgacaattatgttaaataatgcataataatggttattaattatttgctttgtgccaataatttcaatttaaattctcgacccaaaattggttcattcctttccccctttggtttgtattggtaatcttttgcctatcattcattgttgctcatctctttttgacctgatctgacccttcccttctctgctcactttgaccagctgttttgttgttgctgatccactgaagtccaagtgtctgtcgcgcaatgttttcagaatggaaaacactttttccctgttcgtgtgcgcttgtaacagtttgtcctccgcttgcactgtgctcatcaaccacgcgtcgccctccatcatcgtagtcgttgtcaccgctgttgttactgtatttacagtatttgtctgctgttgcggtgtctgctgctgttggtactgttgtgctttgttgttgttactgttgttataattgttgttgttttgatggtgttgaacagcagcatttgctgcactgcttgtggatgggctgctggcgcacaaatctttgcttagcaaatcgaagccctcctgtcgtatttctttggccatttcaatgcttggccattgcacgtgctggcttggccaatggcttgccgaccgtggccatatgccgctgcaacgaaaggcgcatgtgatctgttataatgctcgagtttgtatgttgtcataagttcgagaaatttttcgggactcgctctcggctcgacaaatcactcctttgactttatctgttcacctgaacgaaatatttgccgtagatgatcagcttaacatcgctgctgtcctgcacgacttggcatttgtcgttgaacggcgctttttccaccgtttgtgccacaagcgactggaagcgcgcgcgaatttttcgtgccgacaaatagccgcttgctgttatgaactcaacccacagggacatggaccgcttacggccgtcgctcagcttcagcacagcacagccaggaattgagccgtcatcaacaaaattgaaaacgcccatctgattgaggtacagaatgacctcaaattcgtacggagaatggaccagcaactgtagtgttgggttgttactgtcttgatgactaattaattaaatatttatttggcattagccagttagcatcattatatttatctgcttttgcaccaaccccatcataattgccgtttgaattttgcgcaaacgtgcaaatgaaccgcggctccgtttgttcaacgcttttcagcacttccttaacgatctccccaattgaattgatcactttctgtattttgtgtcttctcatctgcactttctccgcataaaactgattaatttgttgggtggaaatgaattgcatttcaaaattgcttctgttgctgttggtgatcaaaaacagtaataataataaaatattgtctctggctataaaagagcaattaaacatatcattattgtattctcattgtctcagctaccgttacattcaatgtgacaaataattattaaaaaaaagccgtcatcaaagaaacacttttccataaattttacgccgcataaattgttcttaattattaatgggatgttgtgggaggaagtggcaggcggtggaggaggaaggaaggcgcaatttactaccattaccgctgctcttcccgccgctgatggattaggaagtcgccggaggggcgggcagcggcaggggacgacaggcggagagcgctgctgctattagtgtgtgtatgtgtgataataatggggattgaaaggcgcagaaagggacagtcagtcaatttgggagtgaatttgggcggggaagggagggggaggaggaaatgagttgagttgctttctctgttgatggtggtggtggggtggtggtcgat

SEQ ID NO: 15240 - DNA, 2322 bp, Heterodera glycines
acaaatactccgtctgttttttgccaaaaaatgtgatgaatttatttctgtttcaaaattgtttttgcgttctttttgctctctcatttttcccaactctctctttttaagttacataacaacagagttttgccttgccttttttgacacaccaatcaattggaaaaagggaaaattgagccacaaaaatgaatcgacggtaaggaatttttttttaattacaaaattttcatttacccatacatttttttacgaatctcagttggctttgtaacgacgtgtggatggacattctcccatcttttaactatgccaaactcggcctcaaaatggcattgctttccgaccgtttcgatgttttggttgacacgcattttgatggaaaaagcgaattgacaatttggagacgtatcagaattcgcaaggacaaaggaccaaaagcgaaactgtctgtacggatcgatggcaaaagggtggaatttccattgccggaccatccgttgcccaacaaaatccgttttaaggaccttcagatttagtaaatcaaaaaatatacagaaaaccaatcttcattttttcactttatcagctacattgaccattctgtgctcgcatttctccgttccaacaagcaaatttgggacagaagtggcatcaaattggatttggttgtgcctttatatatgaccgacgtcaagctcatttgggatgtttttacccgcgaaatttggtcactttttgcgaccaacattcggcatttgagctttcataatgccgatgctttggacaattggcgtcgtcgcacttcgccaacatttctcactgatcttgatgaattggtttcattcacttcctatggactgttacccgatggaattgctgatgatgggccaaatgcaactgctggccaagcgttgtccaaatggttacacactccgagcaaaaatggccaaccgaagcgattgtatcgctataatttgttgggtccacagaatctcgaatgggtcaacaacttcaaagaggtgtgtctagccatattttctataaattgtttttgtttttccaaatttgtttagacatttatcagtgccaccacttctgtcagttacaatattcaattttatcttcgtgtggaaccaatgccaattgaaccatttgaattggtgaacgaagtgacaaatgagaagctgacactgacgaaggatggcactggtgaattcaattggcttttggagagatgcccaattattggggagactgcggcggcggttcagaaacagcagcagaagaaggacgaaaattcggatgccaatttgaacaaagtgttcttccgcctttacgatgacattgggtgagcagaaaggaggcctttttgtatgaaacacggatagggaacggtatcccatgtacagtactttcccagaatcttggcagggccatgggttctgttaagacagaacttcagtccttgttttgtcttttttgctcttgtccatcccgaaaaccctgctggtccgggtttttccaataattacgggctgtactttcgaaaaagttatccgattcaaattgcgcttaatttaggccgctgtctccgccgtcaaagcgacgaaaaattgttctcgattcccggaccaagtgatcagcggaagaagaaaaagtgatcattttgggaaatggccgatcattatcgagttatgatgaattggattgattgatgatgttttgtttgctctttgaattgttcaatttgacgctgacattttttgctattaaaaaaatggaaaatttggcactttttttttactttagataatccgatgttttttctttaggcaactgattttttggtcgtgttttttgtttgtgttcaagtttcaaaaataatttttttagagtaactaaacttgttttgggtctcggttttaaagtctcgggattttatagaggcaagaaaagaacaaataccaagcattcataaaaaaattacaatgaaaaaacacgaaattcaactttgttttccgagtgtatttgagaattattttttccaatagccttaggtaaaaatttaaaaaaaacaattcttagactttaagcttatcaattggtaccaagaaattctcacttgaaaaagaagcaaataaatttacataaattttgtatattcgaatgaaagaaaaataaaaaattgctattgctgctcaccaaatacaattactgccgccccaaaaaataaattggatattgttcaaaatggcatccgaattttcatctttcttctcgccaataattgggcatcgcttcaacagccattcaccacca

SEQ ID NO: 15241 - DNA, 1472 bp, Heterodera glycines
aaaaaaattgggtaaaacgaaattgtaatttttcaaaagaaattgcttaccgtctgttcattttttcgctattctgcatcaaaaataaatccttttctaaacaatagggcaatttttctgtttttattgtaattaataccgaaccattaaaaaaattgtggtttaaatatgaaaaaagtgttataaacggaggtcgaggtaatagtttagatggtatcacaccttttagaaaaaaaaattcattttttttggcgcgaaaaaagcgtttctagggttttctgggtcggtgaatccgattctgacatccatttcgaccctattcgaaccccgaacccggattccgacaaaaaatcgaaatttcaattttcaacaaagttcaacatttacgcaacaaaaccaattcaaatgcacgaaatattaaaataataacaaatggcacttattcgcacggataaaattgggaatttaaaaccaaataattaatgctttgttaaaggcagagtcaaggcgacagaaaatcaaagaaaagaattcggatcacctaggagcattaaaaatttgttcgaattttggtcgccattagattagaaattaaaaatttttcctatttcatggttatgtttgtgtttagggttaggcaagggggctatataaatgtcgtattcgtattcagcgaccccgaaaagcctaaaacagacccgttttccggttttttatgagctttttagacgtttggacaattcgtgggtttttactcttttggacaattcgtgggggcgccaaacaatgaggtatttatgtaaacaaaaaaacacaggagatagtgttgagaaaaagataacaaaaagagaaaaagaaagagaactaaaggaagaaagaaagggagggaagttggggtgaaaggaaggaagcgagagaatttaatgaaaagagagagagaaagagggagaagagagagaaacagggagagagtagagaaagagagaatggtagagcgaagagatgtttagtaaatgatgacatagagacaaaagaaagagacaggaagagaaaaggagacaaagaggagagaaacgagacttggatgaaaaacgtatttattaacagctggatttgtagcgatgtgtggatggacattctccagggaggcatgaaatgcacgaaaaacatgtttttagcttgtcaaaaataagcaaaaaaggcaaaatttcgctttttgggttgatttttcgctaaaaatgataaattttagttgtatcatgttttttttcttcaaaatggttttaattagagatcggatacggacgggatccgatcatttagcctcctcctcatttctgatataattagtttcgtttaatgacctctaatgcacaaaaattgcattatcaaataatttgcttcaaattttcaatcaaatgaaaaaatatttttataaaaaaattcattaataaaaattcaaatgtcaattt

SEQ ID NO: 15242 - DNA, 1577 bp, Heterodera glycines
accagaaatttaaacttctgtgattggtgggtaatgttgaaaattttggtgactttctttaaaaacgaaaattttatttaaaaagaaaacgtatttaaatataaattttttaccaccaaaactaaatgagaaagagtcaacatcaaactcatttgaaggttcatcctgaaatgattagattttatttccattaaaatttatcaaattacagttggcacagattgcgcatcatcagttaatgattgtcggcagattgggcatgttgtattttcttgaagccttgtgtgtaattaaaaagttaattatgcaaataattcaaataattaattaccatctattaatgcatttttcatgaaagatgtgctaaagtttttttgtttgaaattttatttattacttcaaaaactaacttggcattttatttgtttcgctttagaaccaatttttgataagcaaattgaacaacattcttttggtttttgttttttaactcctaattaaaattaaaattattattagtaattaatgattaattggtgcactttgttcaattttcgaacggcttttttcagaatctcgatcatttggcaaattcctgccagaccgtgtttctgtctttgttttctttattacagtatcagaaatgcctgatcgaattgctagtctttggatttctgctaacacttcgctctgttcgttcaattcatttcctattggatgccgattgtcagaagattgacttctttcaccaaaattcgcatgattatctacggtattattttgacgaattcctacagtaggtcggctctcatattcactatcgaatccttcttcatttaattgttttaaaattttgtcacgcctgtttgattttgttccagctcttacatttgccggagtcgttacagtatcgctactgtcagaccgtttttcatatacttgttttcccatatttcctacactgtgacggtagctagattgtactgattggtgtccggcatttgttcggtttgctactgtatcttcactgccctgccttgtcggaattctttcattttcacgaattcttacattattgcgtctgcttgattgtctcacttgttgtccctgccgatttgctactgtatcctggctgtcagaacgaatcaccaatggcttattttcacgcatccctacagtatgacggctgctatatcgatgcttttcggtaagaatttttccaggattttctttataccggctgtcagattgatttgttggtcgtcgtcgactatcggccgatttatcagccctgcttgtttccgcttggtaaataacaggatctctacttgttgaacaaccttgtgaactgttttgacacccaaattgccgattgcttagaccaatgtgttcaatttcaatacttgttgatgaagatgaggacgatgattctttaattgctttttgctttttatcacctaaaaaacttccaatttgcttccaaattttttttccgcctatttccttcatttttccttaaaattcaattataatttctaagatatttataaaagatttataacatcatattttctact

SEQ ID NO: 15243 - DNA, 2285 bp, Heterodera glycines
aataatgaaattgaatgaaaaaatatgtttataattttaccataaaagtcaaaatttaaaaatatttttgtgtattaattttaataatgtaatttttttatttcgtcaaaaatatttaatatatttttaaaagtttattttgtcctataaattcaaaatataattggttataaaattaattttaaaatttacccgcaaattcgaatttttgaaatgtaatttaaaataaaatgttaaaaaagattaataaagaattcgagcagcaaaagaaaacaatttttcgatatttcagggcctcagatgtaaatatgcgaaaataaattcaattttattttgttcaaccgatcgtatgcatgttaatataaaaaataaaaatattaaataagaaaatatttatcgtaaaaaaattaaatgacaatattatttgtttattatttaacaaatgtaacttccgatttttaacgttcgcattatggttaacaaaattttcacgtgactttcagcattttccatattttttaaaattttgcctaatgaattttctcctaccaacccaaaagctgaagttttgcctattgaaatttggcatgctagacaacacgccatctgacattttgccaaatggacatttcgcctactaaaccaaaatcggacatttcaccattttaattcaaaatcgaagttttcttttttaaatgacaaaaaagcgtgcattccttgatttttagcactttttaaatttattttttatgcttttttgtctggtaggcgaaatgtccagttgacaaactgccagtagacgcgatgtctagttggcgaaatgtcagttagcaaaacttggatattagtcacgaatgttaacaatttatggattctatattaaattggggaaataacaacaaatttcctcataataattattacattaatttatttattgaaatagagcccgggggggggggggttctttttcaacccccctcaaaaggtggcattattttatatggttttctaattagattaatacggtactttggttgtgattccttttttatttgtacaatccttattacttaaggacgccttaatttatgatacgtccacagagtaatttgatcactcagtcccttcaaatgattttttttctttctgtataaataaataggaaaattaaataaagaaattttctctgaaacagaaatcagtaactgttcataattcctaattgataaaaaacggatgatgaactaacttttataaaaataacctcaaaatttgagcaaagaaacttcattttttgttcctatccagataatttgttaccctcgcaatgtcgagattagaagaagacccgtactgacaaatccccgttttacatatctttattcatagaccatttaaaaaaagtttaatgtaaaattacattttaagataatcatcgttcttcatttgcaatttaattgatatacacataagaaaaatttcaaataatttatagccttttcattaattagtgaattaattaacaaaatttcgtttatcagtgctagattttcaataaaaacatttggtcatataaaatcataaactatcttttgcaaaataattctaggaaaaataggaaattctagacttgtcgaacttgtacagtatgaaagcgtccattattgtcacgcacagtaacgctcgttccaacgctagcttaattgatacctgcattaattaattgttttattaattaccatacctgcttccaagaggcgtactaaaataaaaaaacatgtcaatttctaaattcatattctaataattaattttacgctggtcagctggcagggtagatagaggtggtgcaccagctaaacggattttaataattaaattttaacaattactttatgggataaaaattttgaattaccataaaatattccgtttctttcattctctgtggcttcacctaatgattaatttatatttaaaatttaatgttaaaaaatcttcgtaaaatttcccaaaccattcaatatgtcttccggagaagtattgggagcatcaattccagaaacttaaattttctgagggtgataaaattggaaaaactaatatttttaagaccatttagcaagtgttcatatggctcccactctccttcatcatgcgataaatgtcctgaaaattaatttaattttttatgataattaatggtgagtatttttagtttaaaaataaattttttattttgatagaaatatttgagttgccagttttctctaaaaatataa

SEQ ID NO: 15244 - DNA, 2449 bp, Heterodera glycines
ctcaaatttaaaccttccgaattttggcacatttttccgcttcactgtacccaaccatctcttcgggagtgcaaactttgatgaacggaaactccgaatccttggcaatttgcgcagccaaaaaggatttgccagtgtttggaggacctcaattgtttaaattaagcggattaataaatctgctggtgatgatgattgactgccttttacccgctagcaaagctcggacgaacccgcgcgtgtcgggcgcagcggtctctttgatcagaaggcgtcccccctccaacactcgcgagacgcagtcgccccacaggcaaagaccgccgtacagcagccgattcagcgtcaattgcttcgtcgtccacctgaattggcccttcggcttttccttctttcgtccatttgtgtcctttacctgctgaactttgcctcccggtttgaccaatcggttcattgcggacgattgggcggcacggactaacccttccaactcggcacccgaaaaattcttggtcctttttgcgatctgctcaatgtttacgtcgctgtccaatttgttgtgttctcttggtgggaaaggaggttggaatttcttctctctctctctcactctctcttctctcactctctctctctctcactctctttctctctccctctctctcagtcattcctccctttctctctccctccatctctcactctttctctctctcacaaatcagtctcttatttttctttttttttcacacctcatcggtgccgtgtgaatgttcaggatttggatgcggccctgcttatccggcagtgatatttccagttgcacttccatccgtcccggtctcagcaacgcctcgtcgataatatccttgcggtttgtcatgccaatgacaaggatgttgttcagctgctccaccccgtccattttggtcagcagttggttcaccaccgtatcatggacgccagtagaagagccgccctaagaaatttgcacaaaatcctagtttaagcggataaaatggctttactgtcgaaatggtgtgactgtttttaccatggatcctctttgtttgcagttggcgtcaatttcgtcaaaaatgattatgtgcagccacgagttgggcccgcatcggcgccattcctcctcggcgtcggcgaacaatttgcgcatgttcgcctcagattcgccgacaaaccttcaatgtggtctaccgtatttgctctttttatatgccagtctccattaatctgccgtctccaattatatacccctttcgaactaggttgaaaaataatctcccagtctccatttatgtgccaggggggataaatagaatttttcataaaattttttggcacatttttcaaaaaaaataaaaaacaattcaacagtaaaaggggctaataaatgaacaattcgtcgtcatctccgactccatccatccctacatcatcatcatcagataagccggcttcttcgtgatcgtttccgtccatctttcgccgtttcatttgccctaaactcgcgcaaaaatttggtcccaatcggtccaattgctcctaccggcttgaagcaagcaattttttcttctcctgttccgtccaatggcgttgtcagcccacaaacttaaatatttaagcctttttcctgtatccatttttaactgaccctcaaatgatttgataataacttctttggagatttcctgccatgatcggtagatccaatcaagtagcacttgaagtgcaggtgccttagggttgcccgccgatgtgaacaccttttccgccccgttggacatccaaatgttgtagaagtgtcgaattcgctccttgaacggcttgttccacgagacatcgggagcctagggaagacaaagaatttcattgagaaagatgacttagcacctggatgaatttggtgcagccgccagggataaaaaccgtttgcactcccaattccttcacgaccttcgttgttctctcgctcttgtggctgccaaacgcatcccaaaccaagaggcgttcgccaacgaacagctttgcgccgatgattttgtgcaaatagtcctcagttgtgtcatcattcatccacaccgagccagcaaaattgatcaccaattttccagcaaattggtttctgagccttctgctatcggtgcattgccttcctcgtttgcgcagttgttgcacacgacctttccgccgaagccttcgttttcaactccgccagaatcgccacagaaggtgtggcacggcaatttgcagacggaacagctgtgacttcctccataaattgctttacaaacgcagcaaaacgattccatattttcttaaattttcattaaaaaagcaaatttttattcataccggaagcaagaaaatggcacatttctgccatttttaaatacaattttcagaagttcttaacaaaaatgcagtaaaaatg

SEQ ID NO: 15245 - DNA, 951 bp, Heterodera glycines
ttttatgttagttattttttgaactcttaagataaaaatttttggtttttaacaaaaacatattttactttttaataatttcaacatcaatcaattaaaattgttattttcattaataaattggcaattacttttaattttatataaattttgttttcatcttataggctaaattatcttttttaactaatagtaaaataaaattcacaagtatatgaaaaattgaacagatgacattgaaaatagttattgactcaaaaaaccatttactctaacaaaagtgtaaattcgcaaattttaattaatcaattttttaatgggtctaccaaaaatttaaaaatttataaccaaagaattcaaaaaatttaaacttactaattttgtccctaacttttttgaaacacaataataattttttgaaatttagataaataatagagaaatctttggaatatctaatcatatgaagaaaataaaattggttttgtttctgaaaaaagttattaaggataagtgtgacattttttatggcatccaaaaatgtaaggttgtttaaatgcgtgctagctcttttcttaaaaaccgccactatgggcgttaagacatttgcttaagttcaatcaaattaataattcttgatatcattcaatagctttaaatattgtctatcagaatattaatttagaaaatttttatacaaaatttataaaaagctattgtcacaaaattacaaaaaatcttgaatcataattttttggcaataacttatttgaaactcaatgaaatattttgaaattttaaagataaatagagaattcttaggtctattcaatatattaaataattttggctcaattgcattttaaggactttaaaatttaaatgtttataaataaatatgcatgaccatggcaaaaaaacatacatgttcaatgctttataacttttttc

SEQ ID NO: 15246 - DNA, 1283 bp, Heterodera glycines
agcttattaaaacaaacttaattttatttttgtatagaaatgtttagggtataatgaattatacaagattatattgcaataaattgaaaatttaaataaatacaatcgcacgagttgggcctagttttttcttgtgcacaagaaatatgacttcaatttgaaataaatttctagactttattcattataaatttaaatgattataaatataatattattctataaataaaattacgtcaaaagaaattaattattaaatatgaaaatctaaagaattattagtacctaataaaaccttttgttaactgaaagaagaagaagctcaataaaaatcaataaatgtaattatttaaaaaattaaattcattttcaattttgtttttatctaaaattcttaaatttagaaaattattattttttaaatttgaaggctctccaaaatccctaattaaggtgtaatatgctaataatttttttaaaaatttcgatgagggccggcagtgccgttaggcgccgacggaaaaatttttgaaacttagactagagtgcatttttataacataacttatccataaaatttagcaaattttgcaattttagccattgttttaataaatttaggaattttgggtacggcggcgctgacaaacgcagccgggatatttattaaatgagaaaaatgctagatgactaacaatatagcacagcactttatctccttggcattttggcaattttgggggtaaaaacccttaaaattgtacaaacttaaaattttttagggtttgaactagtttccggattttgagttttgcctttagaacccctgactaattaagttctcatgagagcaaatcaaaaactgaaaatatcatacccaaaatataaaaaatattttgggcatttacaaaccaaaacgaattaatctgaaaaaatttattttttattttttaattatttttatgtgttataatgctccaaataacgtatagactcttaaatataatatgctaaatattgcaatgaatttaaattattctttaaaaaattaaatttattttttccccaaccaaaaattttgttcatcaacaaggatgatccagagctaggccctgttcagtgttcacagggccctgcaatctattaaccttaattaagaaaattttaaacaatttttcatcataataatttataattttttaatacgagtataagaaaagaagaattactcatttttattattgggttgaaaattaaatattaaaaaaaatcatacaaaaagg

SEQ ID NO: 15247 - DNA, 1695 bp, Heterodera glycines
  unsure (1)..(1695): unsure at all n locations
ttttcgccctcangacgggcgcttcgcgcccatttctaaatttgtggggctcgtaagaacacttcgtggcctcagtgcttcgcgcccgcttcaaaatagtgttacatggttacatcgaaaacggagggagttcatgaatttcctctcttagcatgtaacatgtattaacataatgaaagcaatgaattttgaaaagttattaaggggttgtaggcagctttacgccctaagatgggcgcttctcgtccatttctaaatttgtggggatcgtaataacacttcaagtgctcggagcttcacgaccgattcaaaagatgttagatggtacatgagaacgtagggagtgcatgattttcttctcttactatgatgcatgtactacatttcccccccccccccctttttgaggagttacgaaaatttttttaataaaaaaagaacttaaaaacaatttttataagaaaattcctgaaaattttttttattttttatgaatttttccaaaaaaccgctgaaaaattattcatttttttcaaattttataaaaattattttcgggggaaaacgtcctgctctgcctttcatagtagcccgaattgtatgaattctattcatttgatagcactgagtgttctttatttgctgggaaatttttaaaaattgcgttgagtttcaaaaaggaaaccaaaaacttacttatatattttttcttactcttcgacgactaaatttttgtaagtagtcatttttcaaaaaatttatatgcaaatttccatttacagattccctcccaaaacgctccacctgcacactcagtgggtccatcagcagtgcgtcgttctctttgaccatgtcggccaacgaccgattggacgcctttgtggaggaggtgaagccgaacaccgaggaaagaatgtcctccaaattgttactgctcccaccgccgcccttttgcatttgtttggggtcttaaaaaaatcaaaatttaaaaattaaattaaaaagcggatccaaaattgtaataaaacagagaattgatttaggcctcccggttgaaaaaaactcaatttttccttttattgtcttttggggtcagatggtcaacaaagtggagtcggaggttcgagtcccctccatgacatgtgacttttttaatggaaataaacttaaatgataaatgttttttgttcaatgttcaaatttgatgatgaaattaaggaggcacaaatgattatgaatttctgaatgcgaattcgaaacaaatccaaggatgtagaaaaaaattattaattttttacaaactcctgtcattaaaaaaacatgccagaggcatcgcaagcggttggcccttcgtccgccggcgccgtcattgtgctgactgaactcgtcgccgccctcgtttcggccgccggcatttttaagttgattaaaaattcagcgcccaatgcatcacatgccgcctgcacattgtccgctgccgctgttgcggaaggcacagtactgcttgaatttgttgcctccgatgtagacgttgatgctgttgcatctgatgacatgccaaggttgaacataaaattgaagtcagaacagtcgagagcatcctaaccagcatctgccacatacggtgtccttgttgtactgcttgaattcattggcactgctttttcggctgacaaatcgaatgctgatcaaaac

SEQ ID NO: 15248 - DNA, 1077 bp, Heterodera glycines
tccgtcgttgggaatttccatggatggccgcagagtggtcaatgggtcatcttcgtcgtcatcataaaggcctataaaaacaaaccaaaaattgtgaatgctttaaaatataagttaatagtgccagcaggagagggtttaaacaagttcgttcagtttcttgtcgaatgccttgtgcctgtagaacacacgggaacgcaaaactttccataaatttttcgggatgccagaatttcagtttcaaaatttattaaaattggattatcggcaccatcaatggctaatatatgcctgtgttatttgcaacatcttttttcgtgccttgctgcttttgatgctgtttctgtctcggctggtcgtgccgttgttgcggcggtttttgccgtgccgtcttcgccgccgcactttcgccaactttgcttctgccattgttgctgctactgcttgtcgtagtggtcgtcgtggtcggcgccgcggtaaaagtcagcaccggctcgtccagccgcacgtccaacgccagcgcaaggtgctcaatttgttcacagaggtcctggatggacggccgggagtaggggtcgggctgtagcatttgtcctaaaaatggaaagatggtcagcaaataatgcaactttttttttttttgaaaaaaggagattttcccctctccactcccaaaattgacacaaatttacgaaataaatcaaaaaaatgattccaatccaaaagaatggcattcgaaaatttaaaaaaaaactaataaattcaaaatttattttttgaaaaatcgaaatgcagaaaaaatcgaaaatacgatttttaaaatgtataaatttttgaaaaaattataaacatgactatagaaaaaacattttcccttgaaattttcaaaattttgcggaaaagaaatggaccaaattgggatgggaatggaatcgggaattctgtttttcatgcattacgtatcaaatcgtggaacactttgtactctgaatgggccggcagagtgtacttggcgttcagaatgcgtagtttggcactgtcctcaaacgggtggacacggtagcacagataaaacag

SEQ ID NO: 15249 - DNA, 1000 bp, Heterodera glycines
tacccgggggacctctagagtctcgccacgcagagagtcattcactgagaaggagagtaacggaatgggaaggagggatggaattggacggagttttcatggaaaggcacggataccgtgaaccaaacgatgaagacgatggtggggcgagaattgatgaccatccgccacagagttgtcgagaggaaaatcccttccaattattggaatgccaaacagaaaaatatgagagaataaatggagaccaactagtattccgacaacatcaaaaaagggaggaagaaaaagcaccgaaaaacaccgaaaaaacacagcagaaaactgaaaaaattgagagaaggaggtgagaatattggggataaaacagaaaataaactgaaaacgaaggcaccacggacggggttcggaggcacggcacactttgggtgttgacgtgagttggctgaagcgtttggtgaccagcaaacatgagcaaaaagagcaacaacaacaacaaatgggcataaatgaagtcaatgggagcggatgtggagaaggtattgataatatgaatccacatccttacagtacccaactaattaatttgtacattccttttttagttctgttgaatgggcagccccaagcgaattgcaacgggaagtgtccaaaggggtggccatcggcaaatggtggtcttatggtttgtcaacagacaaaccaaaagccactacccatgtacaaattcagaaaaatggcgataactacagcatgaatttctcattacgaaagttgcgattgtttggacgacctcagcaacagcctattgcatcggttgacaatgagttgcaacatcaaagacatacacatgaaaaggaggagacagatcaagaacagttggacgaccaaatcactgcttgtacggaccagcagaatcgacaacatttggcatcaaatggcgccgtgaaaacagcaacacatccaccatctgtgccgcggatgggattggggccactgataa

SEQ ID NO: 15250 - DNA, 1561 bp, Heterodera glycines
ttatatactgttgtatactcgtacacaatattttgatactttgtttctctggatttaaataaaaatattaaaatgtgttatttaaaaagaaacacaaatttgggcattttaatttaagaataaaaaacaaagcattgtcagttatgttttgttttactttcggtgttttagcattgcctatgaatgcccatccttgttttaaaagcactttgtgtggtgattcgagggtaaattcagtgccgaacctaaacaattctggtccggctcggttggtgcatgacagcagaactggggaagattatttgattggtcatttgcttgggagagtcagttgtttttcggtcaattctcactgtttccgaacttctttcgtttagggtggtttcgccaagtgttttttggcgtacaacaacagacaaaacttcgccctgaaagtcatttcgaggcgatcgttaaagtcgcagtcgcaaatcgccaaaattcggaaagaggtgtcacatttacacagcggcccaattttgggctctcagtgcaaataggtttattatttatttagtaatcagaacgccaaaactttgcaaaacttaaaatttttttgggattttcccttgtaaaaatagaagagccgatctcgagttaaaaactagacagctaaaaaataaactgtgattcgaaagaggggaacaaaatatgggcctatacaaaatttcaaaaaaagttacccacaggaaaaaattttttcccatggcaaacatttcaatactttaattcttttttagccaagtgcgcaatttaaaggccaaatcaaataaaactaacaatattctctagaattttcccttcaaaatgagcataaaatggttttatttgatctagtattgacaaagttataggctaaaaaatttcataaaaattatcgagctgtacgtaactaactcttattgaaaataatttttttttgacacgaaaacttattaataaaaaatatttctgccttcttctgtaaaagaagaaattgaaattaacacacaacatagggaggacttgaacctgggaccccccttttggtgactaactcacagaccactgagacgaaaaatccagcataattgtacttggagcccaaaattgggccgctgtgtttattggcaggaccaaaaataggaaatttaaattttattgcagatttatacacattattcgctccgtcattcgaacattgtggcattgtacaatacttttgaggactgtgaaaacatttacatgcttctggaatattgtccaatgactttggcccagcacatcgattccttttcttcacagggtctcattaatatcatttgtaacaattaaaaaaaccttttcaacacgtttaagaacggttttcgttggaacatgacgcggtcgtgctgatgcggcaattactgctcgctgtccgctatttgcacaatgactgcggattgcttcacagggatataaagccgggttagttttggtttcacttttttaatttaaaaaaggggagtttaaggaaacattctgttgtcttcgcaaatgacgg

SEQ ID NO: 15251 - DNA, 1032 bp, Heterodera glycines
tccatcgcatttcgtcgtctgcgccaattggccccgtcacttctcaaccattgtccatcacttcgctatgtctctttcggtgacgccattctgcccgcttttccacccgatgacagtgcaaatgcgtcggatggccaagtgatgaccaaatggctgtttacgccctgtccgaatggtgtgccgaaatttctcatatgctttgtgaattcaccggtggatcaatggtcgtcaacgatggaacagatgaaagtggtgattatcacggggcatttaattcgttttctgcgttttttttgtcccatttttaggcattttctaacgcttattctccggttactttttgcattcactttcggctgtcttctccaattgacttcgctgtgccatttgatcggatcaatgaactgactggagagaaattgatacttggacaattagcaaatgattgttgcctcttccgttgtccaattgcatgggacaggagaaagtggaaaaatgtgtgggaagaaatgattgctcgaacgaacccaattgacattgtgatcagcgatggcggatacgacgaccggtgaacaatttaaaatgcttaatgattttatgagtctaatcgtcgacaattgcttttactttgtgttttcaattcgtatccaaaaatatacgatttgttttgaaatggacagaattatggtgcaaaaaattaaggatggttagttgattggactcataaatgccattgaactcataaaatgccaatgacttataatttgcaacggaattcggtttttcagtcttctcgacgccgcttctcccgggccggcaacagcagaagaaatgaatgaatcaattaattgatgcgattatgtgaccgaaatgatgtttgtggcactttgccatttaaatattgccttgcctaattgtttgtttgtatttgacctttgcttgctcccaaatgtgtccatttccattgtattttatgtatatatgtgaaattgtttgaggtaattaatcgttgataaaatggctaataataaa

SEQ ID NO: 15252 - DNA, 2159 bp, Heterodera glycines
taaatgaagctgagcatcactttgaacacatgcgctaccatgtcagtgacttctacgggacccttcgcttcaaattcaaaaaaaaatttttttaaatcctaaatttttcgttattttttcacaccttctccattcgctgcttcattgtcagtcgcattttttgtggtgtcaaatcgaaacatcgcttcaaaaacgtccgaagccgaattcagaatcgctctgtgcgcgggcacatgcttaaagaaaagagactattaaattaaaattaatttaaaattaattaagcatttaaatttgtaacaatttccccttaaaactcgcctccttttcctctgcttgcccaaccaaaaagagaacgtccgcgtcatcgcccgagctcaacaaatgcttcatccgctccaccaaagtttcgggttttgacgacattttgacaaaaaaataacaaatctctgttaaataaaatcaaaaaaggaatatcttatcaagggtgacgcggcggtagcattagagtacgcgaaaatcagacaatggtaaagattattttaaaaataaattttgagaaaattgtatattttcaggaaaattccgaggcgcaacaatatgagtaaaaacggtactagtgcagttggtacgtcataaagaaaagttttaaactcgtataaaaataccgggggtttttttcgggggagaggggcgcgtgtttataaaatcacacaccctccattccagactaaattcagaagctccgcggacatcaaattaacacagtgtaaaagtcaaaaattctcaaaaaacttttaccaaataaatatgatcaacaatatgtcaaaaattagagcaattaattttcgcatggacaattttttacgtcgatttgattatctaaaaaagttaaagcacagctattccactgaaatggaccaattaaataatcattgacaaatcacaggatgaaattattgatacaagccatagatttgtcagttacgacgtcagattcttgatagaaagtgcatccattgttgggaaaatcatgacaattttacgaggggtagaaaacccgaaaatttcaataaaatagcaaactttaggaattaaaaaattcaacgggagatcgacaaaaaaatttaataacatatgccaatatttttttccttaacatcatgccaatatatttttttcaaacttaaagtgacaaaaattaagaatttttgactgcatcatataccggtaaaaaaaccggtcaaaagttcgccggacaggtttggcattttcaaaacgattgttttccggttcggcctcacaaagccagtcagatatgttctaattttttatttttgatcaaattttattgaatgttttacatttttctttattaaatattatttaaaaatttcgcgattttgtaaataaatccccacctattcatctccaaattttcagatttttcaataagatgggaaatgttcagacttcctcaattgccaaccaattgttgccatttgagtcgtatattgtcgagattcccgagctcaaatatgtggcaaggtcgagtaaaacggaaaaacatttatttaatttagccacttcagtgacttactttttaaggtaaagataaaatcaaataaaaaattttcggattcaagccaaggacaaattattggtcgaaataatagctatgatgtgcgaaatttttaacaaaaattcaagaacgggaagaaatgtgtcgaataatgaaacgaaaagtgccaattttccaatttttttcagtttgggcgccacgcggttcatgaaagtggcccgggttgagcacttcagcaagggcccactggtggtcaaagtgttcgtcatcattgaccaacaagtggcggtggagccgtaccgggaccaactgttgcagatcagccgacggctcatcaaacacccaaattttgcaccggtcaaccgagtgtttgtgagttttgttttgctttctggaccttttttgaaaattagagtcacaaattttgattcgttttttaaacgaacactttgtccagaggatgtaggaaattttcaacaaaaaaaaacagaaaggacgtagccaaaacttggcttcgggtttgggggggggggggactttcaaaaatctgtttttaggggtgtatttttctttttct

SEQ ID NO: 15253 - DNA, 2519 bp, Heterodera glycines
agtgacaattctagtttgcaatttagtggggaacgaatgccaaaaattaacccttttttggtgacaacttccccaaataaccataatgtttttccatcacggtaattcacaaattgcaccttgtcgccgatgttaaactctaccctttttgctccatgcttcttatcaaactgttgtgccatgcgttattgatacgggcctcggaagaatggactcggccgttccggtttcataagagaaagtttggtccggagtggtcggccgagaaacagttctgctggtgatcgattgtttaaaactgcaattgggatggagcgataagacaaaagtgattgtttcaaccaatttttatccccactgcatttcttcaactgtcttttgaagaaatcaacaaacttttcggctgctccgtttgactgtgcgtggtatggtggcgaaaagaggtgacaaatgccgttactgtcacaaaaatctttaaaatgggatgaactgaattgaggaccattatccgaaactagtgttttcggaaggccgaatcgatcaaaaagccattgtaattgctcaataacatgttgtgatgacgtgtggcgaagcataaacacttcgggccacctcgaaaatgagtctacaattaccaaatacgtgtttccatcactacaaggtcctgccaagtcaatgtgaacacgttggaaaacttgtgttgttgttggccatggttgtagcggttgtttttgcggttgttttgctgcttcttgacattggcggcattttcgcacgatttcttcgatgtcggaatcgatcgaaggccagtacacaagagttcgcgcgagatttttcatgcgaacgattcctggatgtgctaagtgaagtgccttcaaaacgcggtgcctgagtgatgggggtataaccgatcgaccattaaacaccaaacatcctgaaacaattgatagtttgtgccttcccgagaaaaatggtttgatttcgggattaatgccatggtttggccatttgttttgagtaaatttgatcacttccctgatcaattcgtcgtcctgttgtgctgtttgaatttcgtctactgtcaccggaagatgttccaactgcacattcaaaagatgctcaacttccgactcagtttctgcacacaactgagcgatgaccatgtcttcgcttgctgcggaattgcgctgttcactgatcaaacgactcagtgcatccgcctgtccagtgttgtcggtgcgaacgaattccaagctgaagtcgtaattcagtagaatcagtgcccatctctgtagacgagacgctgaaaaaatcgggattccgtttttggacccaaaaatccccagcagtggacggtgatcagtgcgtaaaatgaattttcgaccaaaaatgtattggtgaaatttttgaattgcgaaaatgagtcccagtccttctttctcaatttgcgaataattctgttccgtctttgacaatgttcgggcagcatgttgaaaaactttttcttttccgtccggaaaacggtgagaaattgttgcgccgattcctttgttgctggcgtcagctgtgacaataattggcaaatgcgggtcataatgcgttaatgctaaatcggataaaaggattgcttttgcttgatcgaaagcttcgcggtgcttttcattccattgccattccactccctgtttgagcaattcatccagtggtgctctgatttgatggatgtttttgatgtactttccatagtaattgattgcgccgaggaatgatcggagtgttgtgatgtccgtcggtgctggcatttcctgcagtgctcgtgttctgttttgatcaggacggataccatcggacgaaacaatttgacccaaaaatttgatttccttaactaaaaatttgcatttgtccatttgaattcggaacccgaattcttgaattcgtttaaaaaatttaaaaattgttgaaaaatgctcgttcactgtgcttgaagcaatgatgaagtcgtccatatagccaacaacaccaggaattccggctgccaattggtccattgtccattgaaaaatgcctggtgcgcttttgattccgaatgccaggcgttggcattgataaagtcccttgtgagtgttaacgcctaagagttgacgcgactgttcatcaacgctaatttgcaaataagcgtccttaaaatcaatttgggaaaatatttttgcgccgtttaatttcccatctgctgtagtcaacttttttgagaacacccaactttatcaatctgtccaattcggtgtcaacatcattttgaacacccaagggtaccggacgtgccccacagaaaaccggagttgaactttctgtactctcgctcgaatgcacggatccaaccaactccgagcaaatccagggagcctttgtccgtcacataaaagtccaacaatagttggcatccaccgcttaaagcaacataagcttggcctttgcctataaattggaaaatgtcgccccgtatatgatcgaccacacaa

SEQ ID NO: 15254 - DNA, 949 bp, Heterodera glycines
  unsure (1)..(949): unsure at all n locations
taattattctaaaaatttcatcaagtttaacaaaagtttctggttaataaattcgactaaaaaatnttgtggaatntaatacnaataattnataataaatatatgaatatgattaaattgttttttaatagatttgttacttcatcctggtcgttcagacgttgattgaaatctttctgtttgtcatttattataaagttattcgtttgtaattctcaaagattcaaattagatactatgagtcagtatattagttgtaaatcttttgtttgaactctttttattatttacaatcttaattaattttattaattattatttaaataaatttaaaaaagttatttagaaattgtaaatttttaatttgtttgtatttgattctttaatcgaattcggtaatacgacaatgatcaggcatcaatttcatattaataattgatacgcgttaatataattgaatgaagcagattatttatgttataaatgaacaaactataaatttgttctatatattatttacattttttttcaagatgcaattaaattttttttgtttttcttttttctattttcaaattttaatgaataggaatcaaattagcaaaaaataatagaagaattgctttagaatttgtatcgtagtatttaatatttttttagttttaaaatcaattttcgtttaacgcgctcgtttcaatttgcattactaaaaggttgggtttattaaatgaagaaaaatctttcatttcttaaataaaatatcattgcttcttttttttaatataagtgaattttatagtataatgacttaaaaaaaataaacatttatatttagcatacaaaaagctcaataaatttattataatatttattgatgtccattttgagctaattttatttaagtattttgttttaaaatgaacagactcctctttatataattatcaac

SEQ ID NO: 15255 - DNA, 1837 bp, Heterodera glycines
agcctgtccagtcctttgccaagtactccttttcttcctgtgtgattttcatcgtcaatctgaaattccgacccaacttttctgctcaacccttccagcgatttctcactttaactggtccctttccgtctccaaactgcgcagacgacttttcagtttggccaactccaaaatgtcgagcagttttcctccctttgtttccgcttctgttccctgtatttccatcccatcgcccaagtctgaccatcccgcgctcccgccagatccggcaccattgtcagggtcctcaataataaaggttcagttgtagagagtttatggttgctgatcatttcgacaacctccagcagagaggcgttttggccaggtgaagaagccgctgaactgccagaatggtccatgtcctgctgcttttcatctgtctttgttttttgctggcttttcctcctcccctcctctctctctttgatcttttcgccaattttgtctttgttcaactcagccacaacccccaaaagttcgtcgatttccgccgctttctcagtacattcgtttttcttagctgttatttctttctgcgcttcgcccaattccgcttttacacgttccaattgcaattgcgcctccttcaggtcctgctccaaatacttctctttgttttgcgactgtgccaatttgttgagtgcgtcactaagttcagtttcgactctttgctggacggaatccattttctggaaagaaagaccgattaattgaatttaaattaaagtatttattttgcaattcgtcataccttcaattccgcaagttttgtctcaacggatgtcttaagttcgacaacaagtgcttggctctgctccaattcatatcccatacttttgtttgcttgcttgacttttccattctcctcctctaggtcaaatgcccttaaattgttgtcatgtattgctattgcttcactttcccttcacacaccgtttctcggctgatttaaggctctcctccaatgcttcattccgtttttgcaaatgctccgccgcattcgcagcctcggcaaattgctgattgatggccatgtttttgttcgctttttcgatgatcaattcctgctccttcagtcgggtgatacaatcatggagaaggcgatgattgaagggagccggaccttcaaataaattaatcgtatgaaaaaaaatgctgggaaaaggtcacccgaattggaggcaaacagcaaattgaccaaatggacgacaagtgctgtaatcacaaaagcgagcacaatgagaccagtgtcttcaaaatgacagagaggttcaggcaaaacagaacgcaatgaagccatccattcgtgaaacattcttttgagcgtggaaggatttgatgacaatggttgttgctgtggatgttgtgtttgatcagaatttgggaaacggtcgtccaattcttgacaatcctctttgaaacaatatttctgaaaaatggaaaaattggttccagtaattttacgtgaatgttagctataatttggtcttttttaattaactttgattttaaatatttgcaaattgaataatatcagggtggccaagtgtccttatttctaagatttgtccttatttggaagggccggatcttagaaaatgaaaatgtccttatttctaagatttttcttatttttggctcgacgtgcatatttcgttcttattttggatttgaaaataaaaatctacaatgaataactttacttattttttttattgaagcgaatacttttaattaattcgattttcaaataaattatattttacttcggaccgagtcgagtttagtacgggcc

SEQ ID NO: 15256 - DNA, 1096 bp, Heterodera glycines
tttttaatttaatgttttagtgtatatttttaaagtaaacgtttaaaaataattaaaaattgttgccatgccccaggccgtagccaaaaaaaaatttaggagagggaaacctgaagcctttatttttgctcttcgggccaaaaatttcaaaaatccgaaagttggcaatttgatttgcccaaaaattacaaaaaagggggacattttagagtttttttagtgcattaaaaagggtttttaagcgaaatttgccaggaaaattgctccaaaggttttccaaaaaaatttaaatttctgttaggtaaaattaaatttttagctcaccgtttaaaggcgaacgcgtcggagaagtgcgagacggagaacagcagggcaagtgtggcgaccaatttgctgacaaagaaatgcatcagcacaacgacgaggacgcacagcgcgcagaacacaccgccgaccatgaaaaggcttgggaactgaaaacaaaaatttaaaaaaaaaatgaagcaaaaatgaaattcgaatatttttagtgccagtaaagcgagttaaaaatgggggggggggacgagcggtgccgaattaaaaatggcactaaaattgaagggggggggggggtggttagttagaagtagttccaccggcccgccaataattaatcagcgacggaaaaaaaggttggaaattggagcgaaaaaaactataaaacgaactaaaattttaaggggaggggggagaaaattcaacaaaaaaaactaaaaaaaaaaaaatttttttttcagggggggggggtaatgggtactccccaaatcttgccgccgaaattttttaaaattttcaaacagagaaattttcaagaaatttttaaaaaaattctttgtaggaattcactaaaaatttcaaaaaacgttcttttttcataattactaataaaaaaaaatttcttgatattttcttaaaaattttcagatttttcttgaaaaatttctgagtttggaaataaaaaaaaatttggcggcgagattttgttccgtctctgggtgaaaagtagggcacacccaatcggtatcatataatcatttgatttccatacaaactt

SEQ ID NO: 15257 - DNA, 3292 bp, Heterodera glycines
ataaattggaaggaaagctgccaaaaagcacaaaatttttccatggcagaaagtccgttggaaccagggatggcacggaatttcgtcttggggataattagagaggggggcagggggggggaatccaaatgcagaagcttttttaacagcttaattgttccggtccatccggtgatgatgatgactcataattattcttgtcaaattgttttttccaataaaataatgtcgctttgctggcattgaaacttttggcaatttcttttgtcggcacttttgggtcttccttttttattgtgtagtattcttttacaaggccaattgtttggttgtctttcgtaacttttcatttacaattttgaataatatgatgaaaatccattatgttattcatcaaaagaaatatgtgagcccgcgaaaacttttaaattaaaaaaaattaaaaataaaattcagaaaaaaatattttttgaatttaattgtgttttatgagacaatttttcgattattttttgtgccaaattcaaattgacaaacccacccacctaaaaacaaaagctcgaaggcttagaaaaaaaaaaattttcataaaatttaatagtagcttcacgaaaatttagttatgttatagtttttaatattttttaagaaaaatggtaaaaatcttagtttttcaacaagaaaaggaaattttttatggttcttaaaattccaccaaaagatattttttttataaaacttaacaaaagacaagcctaaaaactcaaaattcgaaaactgttccccttttctgacatactactcacagtccgtcgatgccgtcgtggtgctgatgctgtcccggttgttgttggcgtttgcgttattgttgccgctgctgccgccgccacctgcacttgtgccgtttgtgttgttgttcgccgcctgtgcagcggcggcgtacgccgcgttgacaaaggaagcgacactttgcgtatgacgacgatggccaccaccagcactagcagcagcaccaccactagcagcagcaacagtctggaaaatgatgatgatgatgatttttcaaaaaataaaaatcaaacgcatttttttttgttgctaaatttgcctatgttcaatttataaaaacacaaaaaacaatttttatgttttccggttaatccatgtgcagaaaacgaaaagatccttgaaaatttttttgtttttttttttgaaatttcattttttcccctagaattaaggctaggtaaaaaaagtcggccaattaagtgtgacaatttttgacaaatttgtatataaaaaatcccgctttcagccaccatttctcttgcggggcaggcttcatccacagtgaatcgaattgaaaaatttaaaaaaaaaactgtttttaccgtgttccggggacgcgaagcgcgtcgtgcggtgcgagacaatcggtcggccgactgcgaagtgcgcaggacggaattgctgttacgccgacgctaaaaaaacaaataaatttttagaaaaaaaatttttttttttttggacgattcccgtgacccaataaacaaacaaatttttaaatcaatgatgccagaaaaaatgcaatgaattttcgctatttgtgcttttttttcattcaccacacaccaaaaatgggcaggtaagacaaattgtgatgatgatgatgatttgtgaacaacatgcattgtatttgttgcactcctctttgtataaacagcgacagaaaaagaggagagagagagcaaaaaaataaaaattaataattaaaattattttggcaaaaaaagaaacggaaaacaaaatcacctaattatgttttgttttggttcaatcattcatcatcatcatcaattcgggacaagaaaagattctcagtggacaattagagagagagaaaatgcggcgctttaaatttgggacgaataaacaaggcggtttcgggacgacatggaaaaaaatatctcacaatcagtacacagagggggtctccccccgaatgggtacgctacattcctgggtgcaccccaaaatttcgccgaagaattttttttccacgcccacagaaaaaaaatttaattttttttggggggggggggttaagttgaaaaattgtaaaatttttttgttttttaaattaggaaaacccaatatgaattatttaaaaatttgttttttaattttttacccgctgctgcggagcatcgccaacaggcggagcagcaacgccggaagaacagttgaccaccacaaaaccaccgccattgtcgtcattgttgctgctgtcctccgacggcaccgcggcgacggcaccggtggttgtcaaccgcgcgttctccttggcaccgttgaccacaatttgatgcttctgccaacccggaccagtgccaacagcaacaactgctgaagatggggaaaattgtgtgttacagtgtaaaaagtatatttttttaagaaccatattcggacatttgtggtccaaaattttgtggaattttgcgacccaaaaaaaaactaggaaatctttttataaggaaatttcaagaaaacaaaaataatgattgataattttttagcgaattttaagaaagtttttgggaaaaacttagtaattcatcaaaaactttagaaaaattttcaaaaaacttttttataagatttcctaagttctttttgttgaaaaatttcttccgcgtaccagggcccgtgcgattgtcgacatcgcttccgaattccgaagaatgcattgggatgatgtaggaaggggacgcaccaccaccagcagcagcagcggcattggtgggccgacctttgctgcctgcacgttttttttttttttggggacatgagtggtccggttacccggtacaccccaaaacagagccgccgaaacacagtcgagacataacacagccgggaataaattttttaaaaaattttcaaacagcaatttttcaagaaaaaaatcttagaaattttttcttaggaaattctatgaaaaaaaaaattttcaaaaaattctcaggtgattttttcaaaaatttaatgacgaattctaagaatttcaaaaaatttaaattttcaaaaaaaatcgctaaaaatttttgaaaatttttttttgtcatagaatttgcaacgaaaatttttaaaaaatttgttaccggctgtgtttcgtcgacggctgtgtttcgtcgacgggtgtgttttgtcctgttccgccgcttaccacatttgcgcctatgtccaaaatcgggtgcaaacttaaatttttttttccatcccgaat

SEQ ID NO: 15258 - DNA, 3650 bp, Heterodera glycines
tgcaggtcttcaaaaacaaacttggcattttaaatttttgaattttacctacttgtcttcctcaagaatgggcccagactaatattgcaattgtttagaaaatcggtgggaatttcgtagaaaaatgccatttcggtctcaaatttaaaattccaaccataaaatataaaaatgccaatattcagctaatttgtagaaatttgccgaaaaactcaaatactttctgcataaaataagcttcaaaaaatcgttttggactcgtaaaaactgcaatagagctgcaccctggattttctcattttgaaggcgataactcctcttttaatatgaaaatccgcatttcagagcaaacaaatatcggcaattcgtcaaacgatgtttctggatttgatcaacgcttgaaaaagattgaacaaatgcttggcacaatgttgcaatttgaacgtgccgtgctcgacgttggacaactcgagaaacgcattgaacatattgagaatggtgtggaggcatttgagtcaagaatcaaagcgtgggacttggaaagacaaataatggaacataacccacgacaacaacaacaaatgcatgacaatccaacttttggtcaaattttgtaaaaaaatttatttatttattttgaacagccatatggccttgggcaaaccgaaccaggaaaaaatgtcgccagccgaaatgtcgacggacgaattttttgaccataacttttcgtactcaaccaaataaaatattcttggtttgttcgaaagcatttgaaaaactctatcaacctgcaaattttcaaaattttttattcatgtacaaaaaaatcagagcaaaaagaattcgaaaaactaggtttttgagttccttctggccataacttttttgaaacttcacgaaaattttgaaattgttcggggcactgccgacgaagtttgaatgacatgacataatgccaatcgatttctgttccatttcatgttccttccctcgcccataaatatgctcccattccctcttattaggtcttcctttcattcttttgcatttatatatttgttccccaaatttgttgtgactttcttttccttctccaataaataatatttaattggacttaaacaaatccctcggaccgaacaattggcgcagtcagctaaaaagcaaacgacataaagcgcatttgttattcatttattacatctccaggcgagagtaatattttggatttcgacattcagccgccggtcttcaagtggacgaacacaaatcgtccacatttcgaccgtcaactttcatcgcgtctaaaaaaccaatagaccctaaaagggtgaggttccgctaggcgcggttttcaaacgctgaaaaaactatagaccctaggcgggttgaggttccgcaatacgcggttttcagcgtccattcaacagtcaacgagagcaaccgataaccaccgaccatggcacaacaggcaacattcaacaattgctggacgcaattggtcaactcgtcaccgcacagcagcagcaacaaatcaacaaaccgaatccgaacaataatgttccgattccggtgctgcctgacatttcggtcttcgaaccgaccgacgaaaagggacgtattaccgaatggatcgaaaggttttcatttgctgtggacttttcggcaccaaacgcaaccgacgcagtgaaagtcaaggcattaatgaataaattgtcggaaacggcattcagcgagtattcaaaatcgtgtttgccaggaaaagtgacggacttcgacttcaaccaatcagttgaaaggcttcaaaagctttttgcaaagcctcaatctatattcatcgacagatatgagtgcttaatggccacgaaaaccgaaggagaagattttcgtcaattcgtcaacatacacaaaaggctgttgaacgatttcaagttcacatcacttaaggaggaacaattcaaggttttgatgctcttgacagctctaaagtcgccaaaagacgcaactttacgacagcgaattttgtcaaagctcggcgccgatggagataacgtcagatggcgatgtggatggacaaatcacagccactgggagtgtaagcataagtcagcaaagtgccaaaaatgttcccaaaatggacatttggaaggccaatgcgacaaggtgcaggaatggagacggagaaacaaattgccaattccaaaaaggaaaattggaaatttacgaattggaacgtccatgaaagtgaactccgcttcgcttttcaaaaccgacgtggcggtagatggcaaagacatcaaattcgtactcgacagcggggctgaaataattgtgatcgatgaactatcacatgaagtcatcggcagcccccgactccgcaaatgcaccgaaagtggatgcatgttcgatggaacacaagtcaaattcatcggaaagggagtcgcaaatttcaaattccgcaatatttgcattaaaggcgaatattatgtggcaaaaaggggatcgctaaatttgctaagtgtgcaaatgatggacgcttttggactcctgaacgaactcaaggccaaaattaatgcgccagtgaatttgtgccgagtcggagaagagacaagaggtttcacaaaaactccaaaagcgccactaaattcgacagtcaaagggcacatcgaccatcccaaagcgttattccccgacattttcaaaaacgaattgggccgatgtataaagttcaaggcgcatctgactttaaaagcagacgccgcaccggtctaccgaaaggctcgcccagtcccatacaacgcacaagaagcgattgatggagaattgaagcgatgggagaaaatgggggtgattggaaaagtcgaatacaccgaatgggcagctccgaatgatgaatcgagaaaaatctggtcgatttcaacacatcatggcaattatgaagttaaaagacttcctttttgcgtgaaatcagcgccagccatcttccaatcggtaatggaccaaattttggcagaatttgaattcgccacagcttacttggatgatgtgatcatcgtaagcaaaagcgtcaaagagcacactgatcacttgaagaaagttttggaaaaattccaagaatggggattccggatcaaattggaaaagtgttcgtttttccgagaagagatcaaatatctcggacaaatcatcgacagaaacggacggagaccggacccggagaaaatctcagcaattagcgaaatgcccgcacccacaaatgtgccatcgttgcgttcatacctcggaatggtgaaccactaccagcaattcgtcaaaaacatgcgttttgtacgaaaaccgctagacgatctgctgaagcatgacagcgaatggaagtggagtgagaaatgcaaacaggcattcgacaaaattaaggaaattttgtcatccgatcttctgctaacgcattacgatccaacgaaagaaatcgtggttgcagcagatgcatccgaactcgggattggagcggtaatctcccacaaatttcccgacggaacaacaaaggcaattgcacatgcttcatcagctctaataccggctgagaaaaactattctcaaatcgagaaagaaggattggcactgattaaaggcgtgcaaaaattccataaaat

SEQ ID NO: 15259 - DNA, 1030 bp, Heterodera glycines
  unsure (1)..(1030): unsure at all n locations
ctttatttcctttttttgcactcacaagttttttttatttcacccctccttaacttccggtgttcacaccgtttacgctgtgatacaatcagtaggaacactttcccaccacattacggtattaatggatttccgctatttttttttctcacaaagcgatttttacattagttacgataaaggaattattgtaacacgggaacgacagccacgcccattatcgggggcctttaatctaagcacttcacattcattcattcattcttccattcatttgatttactgttctccactttagatactcttgcacaatcccactgctacttctcatctcacatttcctctcattatgtttcctttctctggtgggggtccacctaatcaaagcgctgcggcgtcaagcaatgctcagacagaccctgaggggctctccaaagatttgcctgagttatcagtggttgataaactgatgtttgctggaaagattctaagcacgccagcacgtttgtctgatgtgaacaaactccatatggacttaattaggactgaggatggtgtcaatcgcatgacacgtcaccttaacaagaagataaatcaaaccaatagggatttgactgaactcaaggatgatactcaaatcctaacgactaaagtaaacactctcgccaatagtaatggcacagtccaagtgttgcaaaaacctaaccaggcaccaaaagtcaataaccctcctatcttaaattatgcgactccctctccactcaagaatcagaacaatagctttaacaatgctaatgcttcggttcttgaagccatacctctcaacaacagtgaggaagattcccaagatgaagaatttcaattaaatccttcgggatccatcacattaacatgctttttgctcaaactagtcactctttcacattcacaattttctctggaacctcaccattagaattcgatcngtgggcaagaaagttcactgacttgcttgactgncatggcagaaagtgggatgaatctgaaaagt

SEQ ID NO: 15260 - DNA, 2222 bp, Heterodera glycines
gacttgctggactgcaatggcagaaagtgggatgatctgaaaagttggcacgcctcaaggcatgcctgatgggtgaacctagacgaatctttgacaattaattcctgcccacaaaggaacttcttcggaagccattcaaaaaatcaaggaaaatctggacacaccacaaaataaagaacttacctatcaggcactaagcctgtgtaaacaaatggaaggagaatctgtagatgatttcagtgcacgactaattcctttgattgaggccactacggcagaccttacggctagtgctagtgaggaggtactctgtcgagcatttttggaaaaattgagtccaaatctcaaatttctcactcgaaccctgagtggacccgtcagaagggatttcaagatattgaaaatgaatgcgcgcgaagccgagttgatgcatagagagactccagagtctattccagccccacttttcccaatttcggaacaacacaatccgagattcaacaatactgagccgccgaaccacccggaaggcaactttcgaacatgggctcccacaggttctaacagagagtctataggtaccaggcagaggaaccggaacaattgggataacaatgcacaaacctcgagaggttcctttaatacatcgaatagtcatcatcaaaattaccaaagatggaacaaccgctcttccagaaatgacagacgatggaataaccagtctcctcaaaatgatcgaagctcgtcagagaactgactaattccctgggtattatcatgaattccatcagaaaatctctaataatacagaatcattaggaactgcacctgcactcaccactaaccctcacctttcctcccctgcacagtccaataataatcaaagtattaaatataaatctttttatctaacaatctccgcgaaaaaaaagaaacatttggcaactttcatgaggattaattggttggatagctaagtttaaagcacacttccattttctcaccccttaatcacaccatattttaagtatgtggaccaaccttgagaagccacatcaacttgaaaaatgtaatgataaattgttaaaaaaaacaataagtcccgcgggactatttattgctttatctctcttttatcagttctgaggaactttaacacatcttaattttatttaaatataaaagctaagtctttgcaatttttggaacagactcatattactcacacacttctgtctaagccctgcggagctaattaatgaataaaaaaaaaagcagtgagaattgataactcaaagccaaaatgctcaaaaaaatattttttttttaaattaaagtagtgaaggattgatacatgaatcccgtgggatttaagtctttggatcaggacgatccgttgatatgaaggggaggtatagtcatacggtcacgcttggtcaaatcactccgtggtatggaactcggactcaacaccgcgaaatatatccaaatctaaacttcagtcgtttggacgcgaaacattaaatttataattttaaactaatttttaaactttcaaattttggcaatttttatcagtctcatatttcgaaaatcagtaaccaatttaattcaaattaaatttaatcagaatttagaaacatggtcaaaaaaaaaaagaagaaggttaaaaaagaggtggatttgttttggtagctcaatggtagagctgccgtgggttggttggaggaatgagttcgttccaatcaggggcacggcattttccatttctaattttaaataattaaataaattatcaaattattcatcatttcgtttaggctcaactcaaaaaaaaaaaattttcatcttaaaataagtttaaaaaaaggtctgaggacttcattcaaattttggaaattattttaacgaacagggacggtcttttggagggtcggaggtgtaaggcctggaccggaaatggcattttattttcccacgcacatttattactccgataaactcctcccatcccgaggggcgcttaaaaggcaatggagagccagtcaaaggggcagtcggatcagtcgggagccatttcagtggaacggccaatcgatccccgcctgggaggatcccccaggcatccatcaacatcccttcccttccaagccctgaggggcctaattacggacgcgtaagagggtcccctggactaatttccctcataagcactgggtagt

SEQ ID NO: 15261 - DNA, 1614 bp, Heterodera glycines
  unsure (1)..(1614): unsure at all n locations
gtatatgtgaaattctgttgaaagaaaagttaaaaaataatttatagatgaactcaaatcctttcatgtccacatatttaaaaatattcatanataatgcttgttgaacgccaaaaataattactagagaagaaacggggtagccgacgcggcattaatctgcaattattaaaaaattttgaaatagcccaaaaccactcgtcttaataacgaaaatatttatcaattgcttttgtttaatattgacaataatatgaatgcaaataatgtaatcgtatatgcgaaaattctgtagaaagaaaagaaacggggtagccgacgcggcattaatctgcaattattaaaaaattttgaaatagcccaaaaccactcgccttaataacgaaaatatttatcaattgcttttgtttaaagttgacaataatatgaatgcaaataatgtagtcgtatatgcgaaaattctgtagaaagaaaaggtttaaaaataatttatagatgaactcaaatcctcatgtccaacatattaaaaatattcataaataatgcttgttgaacgccaaaaataattactagagaagaaacggggtagccgatgcggcattaatctgcaattattaaaaaattttgaaatagcccaaaaccactcgtcttaataacgaaaatatttatcaattgcttttgtttaatattgacaataatatgaatgcaaataatgtaatcgtatatgtgaaaattctgttgaaagaaaaggtttaaaaataatttatagatgaactcaaatcctcatgtccaacatattaaaaatattcataaataatgcttgttgaacgccaaaaataattactagagaagaaacggggtagccgacgcggcattaatctgcaattattaaaaaattttgaaatagcccaaaaccactcgtcttaataacgaaaatatttatcaattgcttttgtttaatattgacaataatatgaatgcaaataatgtaatcgtatatgcgaaaattctgtagaaagaaaagaaacggggtagccgacgcggcattaatctgcaattattaaaaaattttgaaatagcccaaaaccactcgccttaataacgaaaatatttatcaattgattttgtttaatattgacaataatatgaatacaaataatgtaatcgtatatgcgaaaattctgtagaaagaaaaggtttaaaaataatttatagatgaactaaaatcctcatgtccaacatattaaaaatattcataaataatgcatgttgaacgccaaaaataattactagagaagaaacgcggtagccgacacggcattaatctgcaatttttaaaaatttttgaaatagcccaaaaccactcgtcttaataacgaaaatatttatcaattgcttttgtttaatattgacaataatatgaatgcaaataatgtaatcgtatatgtgaaaattctgttgaaagaaaaggtttaaaaataatttatagatgaactcaaatcctcatgtccaacatattaaaaatattcataaataatgcttgttgaacgccaaaaataattactagagaagaaacggggtagccgacgcggcattaatctgcaattattaaaa

SEQ ID NO: 15262 - DNA, 5206 bp, Heterodera glycines
  unsure (1)..(5206): unsure at all n locations
atataaaaaaaaattntcgggaggaaacgatatgggggctttttaaatttttaagaatttcaaaaattttctggatttgaaaaatagaaaatttaacttttaatttttccccatccatttaattaatttttgctttttagaacaacgatgccaagctgactttggatgagttcaaagaaggtaaaaatcggaataaaatttttaaattgaaattttcaatttacaggagccaaggctgatccgagcattgttcatgcgttgagcttatatgaaggcctggccacataaaaaaaacaatctttttttcccatttattgtaattaccaatttttttttacaacccaaaactgatcagaggcaatgaatttttacaaaattttcaaggtattgattggcaaaaaaattcatttgagagagatcattttgtgttgcaaaagcataattaatgtccattcatttacttatataacaattttaatgcgaataaaatattcggcattcaataaattcaattctaaaaaaaacagcaaatcaggcataaatttttcagaacctcattaaggtaaaaaatcgaacaaaatttctcaatttttttttctcgttagcacatgagggaggcactgtcggaaaaatgatcaaattttacagggtcataggccaaatttgtcaaagaattttactaaaaattcaacaacccttaaaaattattgacattttgcacaaaatttcctcttcgcccgacaaaaattggggtcgtccggcgaggcatttgagaggaaaagataattaatttaattggacgatgatttgtacattattggttggtcttcactctccaaaaatggtggtcctccccgtccgtcttcgtcccctcccccattttcacatttctccgattgtgtcaattcttcatccccccgtccttcgccgtggtggtggtggtggtggtggtgcacctttccatccatctcacggcggacggaccaacaaaaatttttcgatcgattgtccttcagtattaaaattaaaattactaagaaaatatatttatttcattttaattttaaataacagatgagggcactttgaatatcaatacatagtatgagaattgtccttggatgtacttaaaatattctttaattaaattaatttttcatttttataccgaaaatttttggtttccatagcccctggatgacgcaatggatatgttgtccttgaaaaaactattcaaaaaatttaatgcataatgtatccctgtcgaattattggaaaaaaaaatttaatttaccaaattttgccccaaaatttttaatcaatttcggccaatttaatgccaatgatgtcatgttttgtctttgtttaaatgtttaatttcaaaaatttcatggattaacatggcttcctccactcattattataaaatggatccatctcgagacaatccggacctgaccgaggagcgtcggaaggccaaatttgacccggaaaaactaggcaattttttctggcaaggccaactgaaacggcggcgccaaatttgtgactatgtgcaggcccagggcactgagttggcaccggcacagcccgtgccgttcatgacccgcatggagaagctggaggacgtggcccgattggttagtgtctctcagaatacttgggcaatgatttgccaaggacaatccttgaaaatcagtaacaaattccaatgaagtccttggaaagatgtttaatccatttttgcaaaaataactaactataaaaaatgattaaatttcgaacaaataaaatttaaattgttttttattcaatttttaaaattttcagtctgttgggatgagaaagcatgccgaaaatgtgatcgatgttggcagtccacaggaacaattttatttcaacaggtaggaaatgagtactggaaaaaattaattaaaaaatcagatttaatcagattttgagaattatttcaattgtgaaatgatatttcaaatgataaaaatgatatagagaattattcaaattgataaaatgataaatcttgggatattatttgaccaaaagatttatttattaatgagtgagtgaattaattattttcgctcatttgctgttaattaattaatttaattatatctttttttcttttgcatatctaatttttgccaatttttgtccataggcataaattttaaggactgctgatcactcaagcaaggacaatccctataaataaggacaaacattcctgatataattcatatttattaaaccattttaagcctgatctgcggttatgacggctctccattccatttgcatttcattatggcactgccagcaatgatcaacaactgtgatgaagaacaggcggccgaatggttgcccaagctgttcaactgtgagatcattgccacttatgtgcagacagaaatgggccatggtaagtggcactgatcagctgagtgatcggcaatcaaaaatttaattttttaatgatttttaaataataagttaacaatgcaatgtttaattgtgattttaaatttacggaacattttatgtcaacaaaatatactgtagcaaatgatcagagttgaaggcaaattagcctgatcattattcagcattctaatttaatttgattagaaaggtccggcttttttatgcgttaaacaattaatattcaaagccgaatagttgatcagaatgtataatatgatcataaaataatattgatcatcttttattaaaaatatatgttttttaataaattttttaataataaatttttaaataactttttttaatataattttaattaaaatactaaaaataaaaaatggtttcaaggcacaaatctgaaggcattggaaacaacagcaacttacgatgcttctcgtcaagaatttgtgttcaattcaccgacaatcacatcaacaaaatggtggccaggcaatcttggcaaaacgtaaacttttgaaatttaaatttaaaactgcctatttttaaaaatttagtgccaattttgctgtcgtaatggcacaactgtacacaaacggtaaatgctacggtgcacatccattctgggtacaattgcgagacattgagacacataaaccattacctggtaaattataattaaaaaaaatattgatttttaaaatttaaaatttttgagtgtaaatttgtatgaaatttaaattaaaataaattaagaataataattatataattaaaggcattactgtgggcgacattgggcccaaatttggcattggttcaaatgataacggttttctacggttcaacaactaccgtataccgcgtatgcacatgttaatgaaacatgccaaggtgcgattttacatatatctgatctgatagttaaaaccaaaaaattcttttataaaaatttaattaaaaaaagtaaatctaagatataatgtaaaccagggatggcattccgaggccacaaaaaatttggtaagtcggaatccaggacccaaaaatttttcggaaatcctaaatctgaagccggaaatcggaattccatgtcatccctgatgtaaccgtatcttttttctcattgtactgttctttttctgccacttgatcttctggtttccgaaaattatttattttcagaattagagttttagaaaaattcattaaagtacattttataggttcttccatctggtgaatatttgccgccaatgcactccaaagttggctatacgtcaatgatgtaaaaaaatttcttaaatttatatttatttattttttaaattttttaaggtacgttcgctcagtgatggtaaggagcttaatcaatttttaaaatatttattttttttgtgcttttttttttgatatttggcaacgcaatttacttggcatgtgccatcacaattgcagttcgttattcatgcattcgacgacagggcgaaattcggccggggtgatttttgaaaaaattaaaatgtttaacttcaaaaattttaaaataaatattatttaattataagtgccaaatttttctaaaattgaacccccgagggctttgttttcaacctccctcaaaatttgggcttcatttcagaggggtgaagttaattaaggagaggcactttattttagggaaatacaacatatactgtatattttaaaataccgcattacatacatatgtaataatgtgaaatatatccagtctatgccataattaaaatatttttaaaattacccaatttatcgcacgagaaatataaagtttataaaattaaaatagaaattaatttataaaaatgtttatttactactaattaccttcattatgctcttaagtgcgggagaagtgaaggtgctcgattaccaaacacagcaatatcgtctgttcccgcaaattgcccgtgtgtatgccattgcattcaccggcatttacataatggtctaattaaaaactaattaaggcaatatttgatgtatattcaattttaaaggacatgtacaaatcagtgatggccaatatcaacgcgggcgatgtaagaatttgaaaaatattttacatatcatctaatgcaataataaacgttttaattgtgaaataatttaaaaaaaaactttgcttaaaaattatattttcattttacattatttaaatttatttattcgaattacttttttatatgaaacgatattattgaatattaatattttttgataatttaaataataaattttaatttgtgtaacttaaataaatttaattaattttataatatatttcaataataactatgaaaatttgatttcgccaatggatttgattaatcctttaaatatttggcatttgaaaattcaaaattggcatttcgtttgttcaaggccagcctcctgtccgacttgcacagccttggttccggcctgaaatcggtgacttcatggcaaacatcgcttggcattgagcagtgccggatggcatgtggtggccatggctattccgaggccagcggtttgcccgcactgtacacaatggcagttgngggttagccatattttttgtgatttttaggaatttttttcaaattttgcaatttttatacaggatntttagcaatgttncgattanattanagaaaatttactattcaaaaaagtaataagaaaacttcataanttaaaatccctaaaaaaattatca

SEQ ID NO: 15263 - DNA, 2585 bp, Heterodera glycines
cattaaagcaatttgaaaatcggatccctaattgcttaatcgtttaggagggatggccgcggctgttttggccgccccgtccgtgcccgatacgcccaaacgttcgccgttcgcatcgccgcggggcattggccatggcgtcgactcgccccggggggacgtacagcggcaaaatgttgcagtggttgtgcagggggcgcggactgtggcggaacttcagcaaagagacaaaacggcacgggaaccatcggccaaagaacggagcaaaatgggcacaaatgaggggcaagagcagcagcagaaacgggtgggaagaacaaaatttggaagaatatttgtttaaaatgtggcgattcaaattccaaaaaaaaaaacatttggaaaatcaataaacattttcctaataaaaagtgactttattgaaaaaaaattgttgaagaaatcctcaatttggctaaacatttttcgaatgtgttatgccttctaagctcatttcattcagaaagaggctgacgacgccttaccgcactttccaatttcggccgagctgaaggcactgtttggccaaattgaagattatgtggcagaacgtgttgagattgtgccctgctggaagcccttccaaattgactatatccccgcggtcggagaggtcgacccgttcatcaaagtgccaaggcccgaccaagtgagtggcatcagctgaaaagataaaaagattatctggtcagcagcgatcacaattggtctgccgctgacttgagatgggtgcggggcggagatcctgcgccgtcagattttgcgggataaacaatccgcaactgaatttttggaaaaacttatcatatgaatctgctcttttttgaatggctgtgtgttatttaaaaccgggacatagtcaaatgatctgattgtttccgaatttcatgaataaaaatatatccctaagaatatgattacggctatcctaattggacatctgggcaatggacatttcaacagtggacacgccgaaagtgaactcatttggacaaaagtggacaattgggcaatggaaattacgacaaattttgcaataaaaatgatttaataagaagttcaaaatatttaaataaagagaaaagcataattaaactcagaaattctccgaagggattgctcgtaattaatggaaattaaatttaatttgtaataattgggccagaaatccatacaaaaactttttttagtttgcaaattatttttttctcattgtaagtccattgcttagttttcacttctgttcaaataaattcacaataaatgtgcggctccatttgaattgatccattttcaaaaaaatgagtttaaaaaattacgctttctaaagaagaaattttaaaatttttcctaaagtacgaatttttttaatcaaaatttggagttctaagataattgcattctttatggtttttcagtgggataaatactgaaaaccgaaaatttacctatttatcacttcttaatctggaatttttgttgatattccctttttaacttttggctttttattgccaaaaaatagagtccaagtttctaaggttttgatttttagaatgacgaacttttgctgggcttggccgtgctcgatgagcccgccacgcaacagtccgactcggccatcgtcgacctccgactgcaccaaatggcggggaacagtgcggcggacgcgccagtgaaaaagctgtcacgggcagacagaaacgcacatcaaattgtaaatggaaaactcacctaaataattacaaattgggttgctcacgaccttcggggaataaattctcgggaaattgagagggcaagtcgggatcgaggatccgacccgatcaggggatagtcaaaattttacggctctattaattaatttctttttttttctagtccatataattatttattttcccgggaaagataaatgaacaaatcaacaatcatttccaactttatttttcaggatcgctgggtccaaaatgtgaaggaactgaggaggacgaaggcaccaacgcgggtggtctacggaaagccaatgccatccatcgagtcgctgatgcaagaatggccagccgaactggagcaaaagctgaaggagatgaaggtgcaaatagatgccaaatcgtcgttttataaatttattcagctgctcataaatgccaatttggacgccgatttggaggattttgtcgacctttgccttggcctcgtcgacattccgttgcacaaaagtcgactcgagtcgctgcacgttttgttctcgctgtacgccgagttccgcgcctcccaacacttccgcaacatggcaatggacagagacgaagcgggcggagcgaactcagcaaacattgaccaatttgtgatgccggattagagaaggcactgttgagacacatatcaataatgacattgaaattatttactgcaaatcactttaatatttattgtaattattttgcttttaaatcaggaatttcttgggttttttgtccctggtttgactttgcccgttttcgttcaaaataaagcgctattaaaaactccagctgtgatat

SEQ ID NO: 15264 - DNA, 1942 bp, Heterodera glycines
tcacgggcagacagaaacgcacatcaaattgtaaatggaaaactcacctaaataattacaaattgggttgctcacgacccttcggggaataaattctcgggaaattgagagggcaagtcgggatcgaggatccgacccgatcaggggatagtcaaaattttacggctctattaattaatttcttttttttttctagtccatataattatttattttcccgggaaagataaatgaacaaatcaacaatcatttccaactttatttttcaggatcgctgggtccaaaatgtgaaggaactgaggaggacgaaggcaccaacgcgggtggtctacggaaagccaatgccatccatcgagtcgctgatgcaagaatggccagccgaactggagcaaaagctgaaggagatgaaggtgcaaatagatgccaaatcgtcgttttataaatttattcagctgctcataaatgccaatttggacgccgatttggaggattttgtcgacctttgccttggcctcgtcgacattccgttgcacaaaagtcgactcgagtcgctgcacgttttgttctcgctgtacgccgagttccgcgcctcccaacacttccgcaacatggcaatggacagagacgaagcgggcggagcgaactcagcaaacattgaccaatttgtgatgccggattagagaaggcactgttgcgacacatatcaataatgacattaaattatttactgcataaaaatcactttaatatttattgtcttttttaattattttgcttttaaatcaggaatttcttgggttttttgtcccggtttgactttgcccgttttcgttcaaaataaagcgctattaaaaactccgctgtgatatctttaaattttctaactcagttgcttacaaattaactctctcatattttttaaaacttttttctcatataagttttttttgtcatttgccgaaaaatggcctgagcctggaccctgaccattaaaaatacaggcccagaggtcaaaatctaaaaatttgttcaagcagaaataaatgcagatattagtttttatttaatgtatggaagtgcaaaattattttaaattgacacaaaaatcacaaaatttgaccaaaatctattccattttcctaaatttttatggttgattttgaattttttcaaaccaaaatgtacaataaaaaaatgaagtataatatgaacaaaaaaatgccgttgagcagtaacgtgtaaaaatacttactaaaatttttttggatgttatgatttttggttggtcgaattcattaaaaattggtttgacaaattattaataataatattttattattcattgctataatataaatgcttaaatttcgctggtttattgacgtaatacttaagcaaatatattttaaatatttacgcaaatatattttacaattttaaatgaatcaatgaaagtaataatatttacaaaaaaacgcacttatttaaataaattccataaaacattatcatttttattaagcgaaaccatggcatcgaaaaatgagcattattttttaattttattttcatttttaattttaattattcactcgtcagaaagtgctccaggtattccgaaaagattgagttaaaaatttgtaaaaaattaagccatcaattcaagcgataataaagcaatcaaaagtcaaggagaaacatcctcccaatcagaagatgaattgtcaattgaccaaaactattgggaagaaagcatttcaaatgctaatggaaaacaaaatgaaattgaaattgagcccgctaattctccagcagacaatcatcatcacagtttatcagttgagcatctgtccaatcaatcgccaaagtcatcggcaagcgatacagtacaacagaccgtaatcggaaccctattttccaccccaactaacaataccataca

SEQ ID NO: 15265 - DNA, 3670 bp, Heterodera glycines
cagattttaaatgttcataattcttttcatctattcctttccttatattctcatggtgatctttttcctccttttcattgctgttttttgattggtgccctaaaagaattgccaaatttaaattaaaattccttggctctgctggtaaaaagatggatgttctcttcagaggcagacaaaagtgccttttttagtcgattatttaatactgactaatatttaatcttttactctttttctcattgtctttactccttttcttctctccctcttctttattattccacttacaaattatcctttttgtggagggcttattaaaggtacggtaacacaataatcaatactttatcgattattatgaaatttaaatcaatatttaccctctccgctcgcatttggcattaaaaatctgctcttccgcgtgctttccatcgctttttcttcgctctcctgccggtgctcttccccgtgttcagtgctgatcccagtcaagagtcgtgatggactatgcaagcttatgttcgagttttgccgactttctccattttgttgcacatgacggtttctttggttattcgttttctccactgaccaactcccattcattgactgatcatttgcttcatccgccgtggatttatcgtcgcgagaaaggccaaggttttgcaaattttcctccgatccgatgctttttgcgcgttcattgtcatttatacgcctatttcggtggacaaccagtgaatctttccgctcattttcgtgctcaacagcggagagatttctcgaattcatcggaatcgacgcgtcccgggaaatcagcgaaggatttcggatcgtttcggtgctggaagcttttcgaggattttcttcttcggaatcaaatcggacgtcaaatgatttgtcaatagcagcaacagcacttcttttttgctcctctgcttgtgatttcgatttgttctgtggttcattttcagtcgtcactttgtttttgaatggtgattttttgacttgtgttttggaataggcatcagtttcttaattgaaatgttcagttattaaaccacaaattttaaaaacggatgttttattgaggaataatcgagtgaaatttctaagagaatttgtccaaaaacttaatttaaaatttattattttttgattgaaatgccaaaaatgggctaattaatcttaattaacgttatttgacggacggactggaatgatttaccatttcgttctctgcttgttaagtgttccttttcatcgcttattaaatcttccatttttatcagaacactacgatcagaaacttcgattcttcttggcgattttttcggacttttcacttaaattaatgataaattaaaaataatactttatacaatttaattaaaatcgaaattaaaaggacactttaccctttgtgtcactttcttttccggttttcttattttcgtgggtaattttgtccttgccatttgttccccgacttttttctccccgtgttatcattatgctcgtgtcggaaacctcctcaatctttcgcggtgatttcttcgttaccttttcgatgtcatctggattttaaatttaattgtcatttatttcctcacatttctcataaaaataattttcaaataaatttaatttcggttcgtcgattttcttaccttcccaactctcttccgactgcttcttccctttcctcacatttctgttttgggcactctttttatgttcgaagtttttggcattttcccttcttcgcggtgattctttcttcgtttgttcttttgttgtttgactatccactgaataaaaatatatttttttaaataaataaaaaataatatgtaataattaaacaaaaccatagttttctctgcgatgatttctcctattttcccctgctgctggtgatttgctttcttctgtgttcgctttccgtgttctttttgtgggtcgaatttctttttcttccccatgctttccctcttccattttgtgattgtcagaatgtttccgttttttcgattttgattgatctaaattaaaacaccaatagaaagaacatttaattaagctgacataaatggcttaactaaactaaatgaatgaatggaccaaagaattttttaaataattaattgggttttatttttggccctttcgcttttcgagaaaaattttccattctcccagttgaggaatttttcctaaatgaggataatttagacaaaaatgaaaaattgattcaatatagctaatggagcgcagacagaaaaatctcgcggtcgcgaatttaaatttgcactgtcgcaaatcgcgacggcgaactaaaggtggcacttcaccactctactggtcttgtatcagttttatcaaaaaacaaatcccgccttctgcgttgctttgtccctcatgtgtcgatattttgtcacaaattgctttgacggctttttccatggcttcctttccgttcggctccaattcgctggctcgcaaatgctccatcgattccaacacgtcttccacatgctcaacacagttttggtcgttgtgcatttggtggcccgcatcgaccaatggaatcagtgccaaaatcaatgcattcgttgcgtaagaaaatttaggttgaatttctttctcaaaatccggcacatattttgactcgaaagagtgatccgaattccaccggtcgatatatcctcgctgaaaagtttgaaagctttgaacttattaagcaaatttgatacaaaacaacgaaaaagtgcattgtttaacttttcagttgaagtgaaatttttcattttctctaaaaaaccattcaattttctcccctagaaatatctgcttacggttgggtcacgcactaaaatatgcaaaatgcccctttttaaacaatatttccgttccatctgtggccattgtttatttctgttacgacggaggtgggacgtttctcgagattcccttttgccatgcatttgtgcacctgaatcattttgttggcctccatctgtgccaggaggaagttcacagcaaattccgcgtcgatgccggccgcgttggcctggttacccacgtgtttcagcacggtcgcctccctttccgggtcgtccaccggaatttggtgcgcaaagcgatacagggccaactcatgtgcgaccatcaaccggttgttgatcatttggatggcatggtgaagtgaattttctaaaaacaatatgcaaatgcaattgcatttttagtttgctatgatcacactacgaccccgaatttctaaaggctccggaatgcgggaccacccctggaacgaatcgggagacttggtacgaattggctaatttgttattacgattcgcccttcttccgttgtttggctatcattttttttaataaaccatgcactgttaatttatcaatccgaactggtgaggagaatggccttagcttggctacagtaagttgctaccgtaaccaatcatatttcagaattaattttttgttgatttaaaattacaattttatcaaaataaatttacctaccagtgctaaccgtgcagcacattacgttctttgcggttacaaatgccccaacatgttctccgttcgcatgcactgctgctgctgccgctgggttgtgcggatgcgtttcgactcctcc

SEQ ID NO: 15266 - DNA, 3412 bp, Heterodera glycines
  unsure (1)..(3412): unsure at all n locations
taattntgtccgataatnttggtatntctgtcaaacaaaaatcagtatgaagctttttcttttaattatatctgatcatataaaattaaaaattggaaaaatgattaaatatcataatagataattattttttcaaaaattttgtttaattataattaaaattcattcttttcagaaattagagcgtaatctctgtaaataaattatcttcaatagcgggacattaatatttaattattttatattaaatattctcattattaataatttttttttaatatatatttttttattctaatgtaagtatttaaaaacgtgctgagtcgtttcctaaaaaccgccaccatgggcgtttcctaaatccgccaccatgggcgtttcctaaatccgccagggcgtttcctaaaaaccgccacatgggcgtttcctaaatccgccaccatgggcgtttcctaaatccgccagggcgtttcctaaaaaccgccacatgggcgtttcctaaatccgccacccgaagtgaattaaagacaataaatataaaaaatagttattgttatacaacatttataataaattaatataaatctctgtatttttaaaagtttcttattctttaaagtgttcaccaaaaacatgaactgtcaagcataacaacgtctaaaaaatatactatttaaaatacaaaataaatacagacttttgttaatgaacattcagcactttcatacaaacatttgcaaaagtttttgtcgcaatcgtatcgttttatagatttgtttatatagcataaatcatggtaataacagcaatcatcgactatattattaaaaaatgtataataaatttaaaatactttattaaaccttttttaaagttgcaaaaccatattactggtgctataaagcatgagtcaaaaaatgaagtgccacaataagtgccacaatatttctttgcaactttcaaagggaaattttaattataataagaaaaaaaataaaaaaataattaatttatcttttgtggttttcttattagttcataatgaccgtcatgaaagtataaaaatattgatgcagtcgattccttttgttggaggttcgaaagctaaaaattatatgaatttgcatattggaaatatttctaaccgatgtttctaaatctggtgagtacacttgccaacggaaaattcgttcttgtatacgttcacacacaattatatttattcgaaacattttggtgactgctgctagatccaaattattcatccatttttcaatttcatgggcgcctattgcaggagcaatagcattctctatgtgttttcttatattttcaatactatcaaaaagcactaaaatgttggctacatgttaaaaactaaaatagcagacttacaccaccattcattatcgtgatgattagaaaaagaatgttggtaaacagtttcttccaaatattcaattacatcctttcttatctcggagtgatttgacacagtgccagttaaggcaagagagatgcttctccaaccacaatttccatcccctaaaatttctgttacctcacccggtccatattcagaagaaacaaattcaaacggttctgagtagtctatatggtcttcatctatagttattcaataattttcaccaaactaacgccttactaaatgtataaaaccacgtttcgcataattcttggcgttggtcttcattaagagggttaaacataaaattcttagtaactcgtgtcattgttcgaataatttgtactgtttaagaaaatattaaatattgaaaaatattacacaaaaacctccccgaatttgatttcttcaaactttcacacttaatacaataggcatagacagtatttgcattttcgttcgttttttggtattttctatattcgtctccatggccaataataaaaagaaatttattgtcaaattttgaaaaacattgcgaaatttctgcattttccatgtcttcctcattgttgacttggctgtcttctgatttacgcttgctttttatttttgaaagatgtctctccagcgtccttagacttatttcaactccaatttgggcaagcttttccaataattctccttttgtctttatttcttttttaagatactgatcagctaaatttatcgcaccagcattttttgcaaattcatcgaaaccaattccactgatattttttaagcagcacaacaaaagaaaaaatattaaatattgtgttgagctcatttataaattttattagttagaatttataagtagcaataaatatattaatattttaattttattgcgcttgacaatgatgatagtgttggcaaataaatggcgtaaaaatattattaagatttatattaattataacgttggcaaacaactgacataaaaattttattaaaaaggaaagatatattttcgaaatttttgctttgcagttttaggaaacgcccatggtggcggtttttaggaaacgcccacttggcggtttttaggaaacgcccacttggcggtttttaggaaacgcccacttggcgggttttaggaaacgcccatggtggcggtttttaggaaacgcccatttggcggtttttaggaaacgcccaatgtggcggtttttaggaaacgcccacttggcggtttttaggaaacgcccaatgtggcggtttttaggaaacgacctagcaccatttcaaattacgcttcatcaattttgttaatattgtagacagtattagaagttgtacagtttgatttggttttaatttccatatcaatattgaactatataaatccaaccctaatgattagggatgcaatttttcggctctaaaaatcgcaaaaaggtatattttagtcctaaaaaccctcaaaaataggcatttaaaatggaaaatacgctctaaaaaagccaaaatttaggtgtaagagcgtaagattttactcaaaaatcaccaaaagtaaccaaatcagtattgaaataaagaatttttaaaatctaattttgtcatgaaataaattaataaattttttagatgaattttgagaaaatttttcatttcatataaatgtatttttgaaaatttagtgtcgattcttaggggtatattttcgtttttattgcattttgttaataaattatccaaaaatgtcaaaataggtttttcaaaattaatattctggcaaaaattaattttttatcataatggcgcaaaatcttatagcactcagatcttcaaaattttcctagacgtggtctacccgcactgccggacacgtcaaatctttttaatatgcttttaaaagggctaatgtgttttttaataaaatttttaaaattatttttaaaaaaattaacattttgaaaattacggattacgggttacgga

SEQ ID NO: 15267 - DNA, 2618 bp, Heterodera glycines
  unsure (1)..(2618): unsure at all n locations
aaaactcccancaattccattcntggtatagttattttgatttttcttggtctcagcctgcttctgncatataataaattgatttgtgttttttctgattcgattcttagatatacacaagcagcatatgcatcttttgatgcgtctacaaaaacatgcaattctgctttgttaaatttgtcagggattattctccgcatgcatttaattgatttattttcctacaaacttgtaatgtatttccattctttctgtttttcctctcctattttatcatcacatttcctttcttcttcccatagactttggaagaataatttagctggcaataagcaaggtgatagccatccacatggatcaaaaacagagtttaactcttaaaacacttctcctgcttatcctttctgtttcatgaacatttggaaatttaatttggtaagtatcggttttaatgtcccaatttacaccaagtacttttgggttttcctttactaaacgatccttttctgggatctcattatttattttttcagaatttgagatgaattctctaatgttcattcgtgccttttcaaataacacttttaaatttttatagcaaagatttgtctttgaaattggtttttgtatatccttaatccaaaggaatttgacaaagtttctatcattttcttgtaattcaagtgtccaaaaggccctttgtatatcgccccaaagcgcaattttaggcaaacgtgaccttattagtaaaccaggcaattctggcatatagattggtcctctgaataacatgtcattaagtgatttttgaccttttattcttgctgacgcatcatatacaactcgtggcttttttcctgcaactagcacacagtgatgtggtaagaaatgttcgtcatatccttttatttcggtttcttcgactatgtctccttttatctgttctttaaatatttcatcataatgtttaaaaattcattggtcttttttaatttttcgattatgccgatcattcttcgataggctaatgcaaaattagtcggtaattcgtcttttgggcctttccaaggccatcctaccacgtaccgtccatcttttcggtatactgagtcttggaacatttttagtgctacatcatcatctttttctacgggattatctttaacaccaatcatttctaaatcccaatatttttctggctctttgtcttcgttttctatgatcattgctgtgagcgggcataattttggccctgatgaaatcatttccccacagattattgttccaaaaactgtttgaactttaacaagtccttctctgaatggttcaactttttggaagaatctccaaaactctcttcttccgattaaaatgtcaggtttttcctcgacaagttcaatttccccagaaattattcgctcttctaattttctttgttataaaatcgatacggctcacaacaatttcttcaatttttccatccaaagtttcaagttttatgatatatttaggtgagtttaggcgcactgggttatcttttcgaatgggtaaaatgtctaaatttccttcacaaagtttcgctgggttgattttcctgattagctcatctgtaattagagacacttgacttccgttgtcaaaaaataccaaaacttttatatattttgtgccttctatgattttaacgcgtatagtcataagtaatgcttctctttcatttattcctctaatggcagttgctactaaatttgaaatttgaatttgcccttcgtttctcgagttttgttttcttgtgtattggtttgctgatactttttgaatgggtcttggacaaattaacttattgtgattcccttcacaattatagcacatttttcccgtacaatttctaatttcgtgcccttttttcaaacagcgatggcatctcccttgctcatccataatttttattcgagagtctctgtttaatatttgcctgcaaagagatgcccaatgtggtccatcacataagacgcattttggatttggcaaatttgtcctattgctctgtttatttcttatttcttgtgttaaaaaaactctttgattattttgaggatttctttcttctcttttattatattctctgttattgtttctgtaccgattattttgccaattgctttttggcctattgaattgtctttgtcactatcccagttttcatgttgtccaccaattgctcttgttatttttgtacatctcattgcttcttccctcatggttattatctcttctaatcccttaattaattgttcaacattccattcaattccactatctttctctgcttttaacccttctagaataattgttctcggaaatttatttttgattgtcatcattacaaagtctttatcaccggcaaatcctaaattatttaactgccttacgactctttctatgtcttctaaacagatacgaagtgataccacagactcatttgcttgcggcaaatttaatagttcatttgaagtgcttcttttatcaccttctcatttccgaaaagtctttttaatgcatttacgactagagcataattttcttctgtcggttgatagcctctcattgctcgggaa

SEQ ID NO: 15268 - DNA, 765 bp, Heterodera glycines
acacacctctccccacgcctccccctcccccccccacgcccggcctcaagacgggcgcttcgcgcccgttttttaattttgttgaggacattgggccgcttcgcggcctcaggacgggcgcttcgcgcacgttttttaattttgtgggaacgttcggccgcttcgcggcctcaggacgggcgcttcgcgcccgttttttaattttgttgaggacattgggccgcttcgcggcctcaggacgggcgcttcgcgcacgttttttaattttgtgggaacgttcggccgcttcgcggcctcaggacgggcgcttcgcgcccgttttttaattttgttgaggacattgaaaaagcgcttcgcgctttgggagcttcgctacctagattagctatgggttgtggagtaattgttggtccagaagagagttacaacaaatgttagaagaagtacaaaattggaagaagaggtacagtgggatttttaggctgctttgtggagaatagaagaggtacaacagcgattaaaagaggaagaacagtgattagaagaggtacaacaatgattagaaaaggacaacagtgatgagaagaggtacaaaagtgattaaaagaggtacaacagcgattaaaagaggaagaacagtgattagaagaggttcaaaagtgattaaaagaggtacaatagtgattagaagaggaagaacagtgattagaagaggtacaacagtgattagaactggtaaaacggagattagaagaggtacaacag

SEQ ID NO: 15269 - DNA, 1664 bp, Heterodera glycines
aggacaaaacgtcgccgggacgtaacgtcgccacaaaatttttttaatttttaaaaaaattatcaaaaatttttagttacctagcctggttcggaaaaattctagaaaaatttaaaaaatattttttttattaagaaatttaaagaaaaaattctttttcaagttttttaaaatttttcctaaaaataagcaaattagtttttattaacacatagattttcaaaaaagctaaaataatttttaattttcttaaaatttttaatttttttttgtggctacgttatgtcccggcgaccttttggggtgtacccggaacggcccccactcgataaaattagaaaaaaaaattttttttttttagtaaaaagtgaatctgcgaaatatatcactttttgaagctttcaattttttgggctacaatcaaatacaaatatttctcggtcattttttcctgaaaattcttatgtttatgtaaaaaaaaaaaatttttttaatttacacgtggggaagctgtaattgattgaaaaatgccttcattgttgtcttctgtttcattgttttagtcgtccctcaatactgcttcttcttctggcggcggcaacgacgggcgaacacggcacggcgagttgagtgccgcgactgttggcggcggcggcaccggcacaaagggcgacgatgacaacagcaaactgcgctattggacactgatcgcgtgcctttcactgatctgtgccgaaatgaacacaatgtgatttttagcgcctgggaaagggggggggggcacaaatttggaaaaaaataatcaaaaaatcattttttagcattccatcgattcaaagttacgccaccttggcttattcgttggtaagtgcgggcgctgggaaaatttttggaaaaaattagtagcaatttaaaactacgtaaatatttttcccattttttgaatctttcggtttttctaacattcattaatccgtcaaaattttcttccggtgtacaccagcctaaaatttgctaaaaaaattttttttaattttcaatttttttttcttttcattggtttttatacgtttcgctcaaccgtttaagttttctgttctccacgagttcaaattaaacaaaaaatttggaattctgcgaaaattgctcaccaaatattagaaaattaaaaaaaaaactggccccttcagctcacctaccatttggcactgactctctccaatttgtcccatccgctggccaattttcttccgctttggctcaagccgcgctcactctccgttgtgctggtgttggtctccatttgcacaggtaggcacaattttttctcgattttttttggggggggggggagttttttttcaaaaacccaaagagtgaaaggcctgctgtttggcgaatgttgctgatcatgaacaaagatgtgttagccatggtccgggctgtatgacggagtattgcctccacccgaaacaaaaaaatcaaaaaagaaattactagaaaatggggaaaaaatttgaaaaataacaattttttaagatggacaattcacatttctcaagatagtttctcgtgcgggcgccctttggcaccgtccaaccccaccccttctaattcatgaaagaagaatagatgaaagttcttgaaaattcttatggcgaatt

SEQ ID NO: 15270 - DNA, 850 bp, Heterodera glycines
atcgaattccctgccgatgacagtgccgcggcatcggatgtacaagcgatgaccaaatggcttttcactccacttcaagaaaacgatgtgccaaaagtgttgagatgctgtatgcacaagattggtgaaaatttggcgccaaggattgaagcaatcaaagcggtgattttcaatgatttatttggctcttttacggttttggcgttcgtttaaaaattttatgcccaaactaggccacctcaatcgtaaaagtgcctatttttagtttttcatgtcacatgtaatttatttcgtatttttaaaccaatttttcccgtatttaggcatttacctatgcttcatcgtccgtcaatttcattgttgtcttttcgtttcgttcatcttttgctgacaccgttgtgccctttgtgctgaccaacgaattgactcgggaacaattggcattgaaaagaactgaattttgtgaattttgcacctgttttctgctgattcgttgcccaattgtgcgtgacgcggacaaatgggcgaaatgggaaaatgaagcaaatgattggcgaaattcttttcagtggaatcaaattttcatccaaattgacaacgaggacaaagttggggacgggtaagcgaatgctttttcaaaaattcagtcatcgcttttcggtttttaggcttctcgatgcaaatccgggcacaagtgatcagcagcagaagttaatgaatgaatgatttgctgagaagtgatcgaccaatttgaattatggaattattgacgtgctcaaaaattgttctttttttagcatggaatggtaattgatcaacatatgtatatttgtgttttgtatgttataag

SEQ ID NO: 15271 - DNA, 1531 bp, Heterodera glycines
accaaatgagcatgttaatcatcaggatcttgatatttttccctatgtgatttacggatttaagaaaatcggaaattaattattggagaatttcccaagaccacccgcatacttggtacgctggtgcctaaacggcattaaatgaccatatgtatgacaaccatgcttttcgttcaatgacttaatggtttagaaaaataaaaaataaattcctgcagaatttcccaggaccacgcgcatctttgttataccggtgtttaaatggcattataatcacaaaatgtccgacagtcatgcttttcttgccatgatcgtataattaagaaaaaatccaatagttgttgagtaatttcccaagactatgcgaataaatgtcactctagcgccaaaaccaaatgagcatgttaatcatcaggatcttgatatttttccctatgtgatttacggatttaagaaaatcggaaattaattattggagaatttcccaagaccacccgcatacttggtacgctggtgcctaaacggcattaaatgaccatatgtatgacaaccatgcttttcgttcaatgacttaatggtttagaaaaataaaaaatatattcctgcggaatttcccaggaccacgcgcatctttgttataccggtgtttaaatggcattataatgacaaagtgtccgacagtcatgcttttcttgccatgatcgtataattaagaaaaaatccaatagttgttgagtaatttcccaagactatgcgaataaatgtcactctagcgccaaaaccaaatgagcatgttaatcatcaggatcttgatatttttccctatgtgatttacggatttaagaaaatcggaaattaattattggagaatttcccaagaccacccgcatacttggtacgctggtgcctaaacggcattaaatgaccatatgtatgacaaccatgcttttcgttcaatgacttaatggtttagaaaaataaaaaatatattcctgcggaatttcccaggaccacgcgcatctttgttataccggtgtttactatatatgttatattgacaaggagtttcgtttgcaaaaacaaaatctcccggccgaaggccgggagcgccctgaaagtagtggaaaggtcttacaactttttgaggcgcatccgggaaaaatataggttttccggtccaagggccaactgagtaccagcggctcaaaaaccgactttgccgccagtctcagtgttacgaaattttttgcttttgctttcagagcttagcggaccccaaaagcgaaatgccccaactatggcctacaactttgccagcaaaaaatttttgatcagatcaaaggcatgacctgtaggttaggcaacgtaagaatcactttttttggacacttcagtaccaagcgaatagctcgtaagggtttgctcggagcagggggtcgccagcggacttattgtagagctcaatgagctcgattttttccaattttaaaaattttgaaaattttaaaatttttcgagctaggcctaaaaa

SEQ ID NO: 15272 - DNA, 2985 bp, Heterodera glycines
cctccgcctccccaccatccgtcgttgccgtcgcgtccattgccccccgctgttgctgctgtccgtgccgttgttgttgtttagatattgttgccgccgccatttgtccggcaccgttttctttggcattgttggcaaatccatcgccgccaccgtcgtcgttttgcttggcataattccctgtcgtctccgtctcggcatttttgttggccaaccgcaacatttggccaattttttgcttggtcctccgttcccgttgccgttcagccgccccatttttgtcaccgccgacgtcgtccgtcgccaatgcgcgccgcactttccgcggaattggcgtgtcgcttgaaatcactgaaaaataaataaaatgggaacttttttagggagagggtaggcctaaaacggaaatttaaaaaaatatttggaaaatccaattcctcccaattttcttacaattttttagatatttttaaaaaaaaatctttgaaaattttaagttttttaaaaatttcggtggagaaaacgaagaaatgaagtaaatcccaatttctgagagaaatttaaaatgattttcgaaaaattacaaaattttccaaatatttcaaaaaattttcgatttttatggaatttatacttttttataaaaaaattgtaaaaattgtcagtggcatttaaaagtattaaaaaattgtaccccatttttaaattttgctaaacctgggtgtgttgcctcataaattcggttcaaaagtcggatagccgcacgttttcccatcggaccatggccatactttgcaagttcggccttaaattgaacaaaataatattaagtttgagtaattagaatttcaaattggaattccaaccaaaaaaaggcattaaaaatcggaataaagtgaaaaaaataggcaaaatttggaagttgatgcaaattttcactgaaaattgcattaaatttcagatgttcattagctatttgcgaaattcggctcaaaattttgtcattttcacagcaaatttttgtttggtcttaaaatttcattgaatatttacaataatttgaccacaaaatacactaaactttgccaataaaatgcaaatcaacagcccctccccactccttagtttttcaaaaaaaaattttttttttgtaaactaaaatgcacaaatgttctgtttttaaacaaaacgtggcacccgtcgcttacattcagctcactttcgctcatcatttcatagaatggggccggcgttttggagtcctccgccaaaattgcgtagcccaaagtgccgccgccgggggtcggcgattcggcgccgttcagcaaaacactttcgttgtcctccgcctcctgttgcagttcgtcagcagtaccaccaccaccaccaattgcactgctcgttgtcctcggcctcggctgttgtccggcgttggtggcgttgaaacggtcaggcgcagaaacggccgcctaatgagtttgctaattagttcagactaattaattaatgaattaattgcaatcaattaaaatggcataaaatgattaatttttaagagtaagtcaaacgattttttgatatattataagctaccaaattaaacacattaattcaagagattctttcatcatttcaattaaaaataaaaatttcgtttttacgcataaattaaataaattttcatttttacggttaatttaaattaaaatttcccattttttacggttgctgtcgcgtgggcttagtgcgcgttgatatttgccaaaagcatggacagaacggcgggcacgccaacgcacatgtatttggtgcacaaacagggaaatgggtcatggcctaacagaaaaaaaatatatttaaatttgaaatttaaaaaaaatgtttctatgctttttattaatgcaataaaaataaattgatgatttttttaaataaaacttttatgcgaaaattttttatgtgaaaatttcctttttcccttggtattgtgccatccctccctctctgtttttctctctctctctctcctccctctctctctcctctctccctctttcttacaacagtgattagaagaggtacaactgtgattagaagaggtgcaacagtgattaaaatttgaacaaaagtgattagaagaggtacaatcatggtttaaaatgaaataaataagaaaattgtattattggatgtattataaatttatcaaattaaaaaaatccttttacttattaaaaataaagttagaaatttataatatagaatatttattgaaattgaaaggaattaattctcgaaaattcaaattaaataaaacatttattcatcagaaaataatttaaaataattaataaaacaatattaaattaaataatttaaattaaaacatttgttcaccaaaataatttaatttaaattaaaaatttttatttatttttaataatacaaaacaaattaattaaaaaatgtaaaagtaatcaaaaaatgcatagaaaattaatgttacaccgtccggatccgaacctgcccccccccctcaaaatgatgtctcagaatccccaatcacacagggattctgaggtcttaacgatgtcataactgaaatctgatttcatattcgtgatcagcggcccaaataacccctaaagacatgtttttggaagatttttgtcgaaaaaattttttcactcaaaaatcatgtgcacccccctttggtcccgaatcccaaaatcacttttatttttataacatttttcaaaaaagtgataaaaatgtgaaataaaatttataaaatagagctaaaaattggggatttttgtagtattttacttttaaataatgacttttcagaaccgagttataaatttttttctgaaaatccgattttttccttaaattttgaattatctttttttcttttgaacataataaaatataataaatctcgtaatattttccagatttttctctatttttaatgcttta

SEQ ID NO: 15273 - DNA, 3589 bp, Heterodera glycines
aaaaattgatttggataatcctactgatgatcattcactaatggtttataaggcatagcgatttaataatttttataaatgattttaatttaatttatttatcaaatttattttttaagtgatattggaattttttattatttttatatataaataattgttgttaaattaaaaataattttttttttaaattgatactgtaatttttttttgtaaaatataagctttagatagagtttcgaacaaaagttgggatttttatttagattttttttttgctttttcaaaaaatagataaaaaattatttataccaaaatattatgaaactgaaatttctgatcattttagaatcttttcttttttttttcttcttcctaagttacccttttatgttttttgataaataggtataaagtaaaaaggtcactagttaaaacagaaatttaaaactatataaacaggaatttcgaaattctactaaaagcaaacatccattttaataaataaatccatcagtatttaatgcaaataacaattatcttaaaaaagaagggattttaataatgattatttaaggcattttcatttcctttttgtttgacaatttatattttataaagaaaaacataatgatgtttattttctttatttctttttttattattggttttcatcaatttttaattacattttcaattgcaaatccattagtgagttaattaattataattaattaatgaaaaattaattttaataatctatttttattaaccaggacgaggaccaaaggctaattgcagttatgaaaggcgacccgaaaatgcgactaagtgaatattcaacgcaaaaatatgaggcataccttggcattgtgtatttaatgagaaaaaattggaaatgtgacaaaattgcggatgaatttgaagaatatgaacggaaagaatgccaaaaatatcgcaaatatttggacattttgcataaatatttgttcatgggatatgccggaattcccacagtcaagccaaaatttgtttttaaacataaatttgaaattgaaggcccactaatttttgtggtgaattgtttgaccgaaatttcgaaattttattttacaaaagagacaggacaaaattttagatataaattgaacgaatttttcaatggttttcttgaaccaaaattgttgaatgagaagcgattgaattatgagccaaaattgccaatgaatgaaacgattttgcaattggcaattgacacagcgaatgaacggcaaacaaatgaaagtttggatggcattattcaacaaaattgtggagaacaatttgatgaaaatttggaggaaatgttcaaaaaagcggtagaacaggcaaaaaaggacaacccaaagaaagcaaatcaaataaataatgaaaaaaaacaaaaaagaattttgtgttcaaaattagatgatcaatccatatgggtgacacttttaacattcaattaaaattatacatataaattcaaaaattaggctgatgatgctctatttgttgaatttgccaaaggattagcgacgaaatttgagaagttttttaagatggcagaagaatattcaaatgctttatttcgagctaaaaaaaaaggaaatattaattgggatgataaaaaaatgatttcttttgggttattcgaaaaagaggaaatgaaaaaatatttgaaaaaaaaatatgaagcccaacttggcgttgtgtatttaatgcgaaagtattggaaatgtgacaaaattgaggagaaatttaaagaaaaatgcaaaacaaatcgaaaacatttgcacattttgtacaattatttattccatctttatgttgaaggtttttattcaatcattatttataaaattaataaatttttaaataatatttaaggtaaaagtggtgaatttgtcaataaattttcggcagttaagccaatgtttttttattattccggagataatcaaaaggagttaatttccgtcgtcgaaactctgagtaaaacttcgcagtgtttttggggaatacacaaattgagcatttccaattcccatgaaatggctttgaaaaacgaggacgatttgatagacgagaaaaattgggaggaacaaaaaaatgttgtggaaaaaattgacggaccaaaaaatgtgcaaaataagcaacagaaaattttaaatttaccaaaagaaaatgaaaaaaatctttggaaagaatttgagcaaaaaatggaagaaatgtcaaaaaatgcaaaagcaaatgtcaaaaaagaaagggcaaatttgaacgacaaagcagcagaattattaaaaaaaggcaaatatgatagcgaaaacgaaaaagtagatctattatatgatgaatataatgccaaatttgaaactttcaaatcgtcgccattttactaaaaaaaatccacgtttttcttgattttcttttcttttcatttcattttcatatttttcaattcattttcatttttctcgcatcaacctttctgtccttttttttcattttacatttttacaatttttctctttttatacatacatacatacatattttgttgcttggtcaaacttttggaaaatatttttgcatttttgtaatttattaattttacaatttttgacccagttaccccgaccgatttgttgatccccagagtactgacaaatgagaaggacgagaaagagaagagagaaagaaaaaatataaaatttgtaactgaaaaaagttaggacactttttaaacttgcaaggactcagttggcccgctcgttggaatttttttttaaagtaaccaaaacgaaaaaaatcttcgaaaaaaatgtatttttataggaaattttttaattacgcctaaaaatctaaaaaaaaatttttttttaaaactctgaaactaaaaagtctaaaatttttatgaattctctttttaacgatttttaaaaaattttctggggggaaaactccgtggggaatgtggagcgtatattctttcgttcatttgggcttataattgaattgatatactattgcgcaaacggtaccattaagccactgcctgtgccaccagtcattaatgttgaagcgggcggaagacgaaatttgaccaaaatgtcttccgcctcggattgccaaccaccgccggcggtggacaacggacgcgcggagacggcatcgaaaaatccaagcggaaattggacaggacgcggctcttaaaattaataaaaaaaaatttgcgaattatggtacacagtaatggagatttttcgtttgcatactgtatgtacagttgggcccctcaaatgccgtgttggaacagtcgcatcggtgcgcattgtgcgcgtttgaacaaatgccgccgtttcggcacggcgcggcagtgccaccgccgccgccgctgcgtggagatgccccaaatgagcaataatcaacagcaaatgagaatggacagccggcggacagaggagcagcagaacctttaaaaatgatataaacaaaatgccaaaatttttaattttctgtgacagaaaaagggttgcttgcaaatttgatttaaacgattttatcaatt

SEQ ID NO: 15274 - DNA, 1881 bp, Heterodera glycines
  unsure (1)..(1881): unsure at all n locations
atagtaagatataaaaattaaaaatgtaaataaattataattattaaggatgcaaagaagcccacaaacaaaatagtcaaaaatagtttgtttgttgttgtaccattaaattgttgagaaatataataaaaaattataatgttttgaaaaagttgctgaataataacacataattacttcatccattaataaaatttgttttatacgctattcatgatttttttcaatctattaacaggaatatgtcaacaatggagagctgccacaatttttttgtgggttttcattgatttttgtgtataaataacaacaaaaacaatgtgaaacccacaaattaaatacggcataagcattacaacaacgacaccaacaattctaaatgtttacatcagaaaaattaacatcaaacataaacatgtaataaaaaatttaattcaaaatcaaattttacatattttggccaatttgtgcttaatttgcgcaatttgaatatcttctacaataatattctcactaataaaaacatatttaattcacaaacccttcaattcccatttaaattatatttctttaataaatcctaataaatttaataaatacatccatatttgatgatcctacaaaatctctgacataatttcctcggccttttatttcccacaattgctatattgctatttgcctacgaatccttatatttaaatatcaaatgcaactcagttttagatttaaagtgcttttactaattatattatttaaaaatgcaacaaactaatgcaaaaaacccaaaaaaaggtaaaaatgatcaaaaatttgattaaatatcacattaattaaacttcagaaatcaagtctcaaagccagaatacaagccaaggcaaagccttgcaaaaatcaccacccggactcacattcgttgacccaaaagaattgtaaagaattaaaacctcaaaaataatttatttaaaattaaaggaccctgtcgcaatacaaacgcacagagtttcccgccgcagaacgcccaaaaggattttcccaatactcgtcccaaccagatgaaaaagtcaaatcactaataaataaattataaaattcaataatttcagaagaagcaaccaaagccttggtctaaggcagcgttgggaatgagagtaataaaaaaaattaaaaaataattattaacaaaataaatataggattcattcgatgagtgcgacgatagcgcattcgttggaattgaccaaaaggagcaggtgcaatagcaatatatcctgtaaaaaataataaactatttaggacgaagtccaatttcaatacgaatgcaaatcttggtctaaacgttcgcgtggccaaagagtaaattaccaattaaaatgaattagttaacattaatttaggattcgtttgacgagggtgacgactccgctttttatggtccatcgaccagtaaatgatttcaaatgggctatttcacaaaacattgttataaaatttgaaaaaaatccgtaaaaaaatttcccttttgaaaaccaatatttatcaaaattattccaaaatacttgaacaaaatgcgcattgtattgaactggagtgagatacctccacggaaaaaaacttttttgtgacatgaattccaagcgtatgttgatatggtcatatgctggattttatgctgcaaaatttgataaaagaccactgcaagataattattccacatctattcattatttgtgtcgttgtgagcttatttttgcaacgcttctcttcaaaatgaaatttctactatataaaataataatctacgatttccaaatattcattcttgcaccctccaatanaacttcaaaatattaattaataaacacacnattattcttaata

SEQ ID NO: 15275 - DNA, 1310 bp, Heterodera glycines
gtttttgttataaattaataaatcaaatttttaaattcaatgctaatcatcactgtaaattctttacatttaagcctatgtcttcaaattttgcaaagaagacattttactcaaacacaattgctgccgaacctaactggcacatgtatatcaacaaaattccattggtaaactaagacaaaggaaaagtaaataaaaacaataaaaaaatccacagaagtccgcttcgggaaaacctctcgagaacaacataagtaaaccgacttatgctcaaatggttatacaaaaaccggtaatataattaattttaataaaattgaattacataaaacgatactcaccataacacagacaactatcgttacgaagccaagcaaagaaaatgtcgccaaaaaaagcgaataccagattattgatgaattgaaccacaaatcgcctatgttgaaaacatattgcgacattttgtttggaattaaagtaaaaataaaaaaactttcaatttattaaaataatttttaagaaaataattataattataaaacaacttatttagatcctgccaacaacaaatgtttgcaacaaagtgcttaaaatcaatgtggaaaaaacaacctctttgtctgtgtccgcggcaaaaaagaaaagcagttgtctccaaaattttgttaaaaaaatggtcagaaaaattagcattttgtcaactaaaaattaataatttatagaagtcgcattcaacaaagcgcagaatgataacaccacaaaaattagctgtaaaaaaaattcttataaagaacaaaacattggaaaataaggttaaatcaaaataaaaataaaaataaaatacgtagattaagatttcaaacaaaacgattgaattttccactcgagatgatgcacaaaatgctgcccaatttatggacaataataaatttaacgttttgacatctctaaccaatggtaaaatttaatcatttttttgcgaaaaaattatatttatcacatcggttgtcagaaattctcttcgacccaattggagttgcaaatgacagagcaagtgtgcttctttcttcttcaaactcaaaaaaatggaaacaattgaaacaaaaaatgaatggccggacccaatggattaagcttattcctaagcttaaatatgacatatttaaagctaatatcccggtaaaaaaacataagctaaaaaatcatttataaaaatttgcagcagcggtcttggacttctgacttgatccgagccatgctattgctgagagcttatatatttaattgcgacaaacattctttaacattcc

SEQ ID NO: 15276 - DNA, 3731 bp, Heterodera glycines
  unsure (1)..(3731): unsure at all n locations
agaagcaggaacgaagcgaaatgtaattgaagcngaaaaggaaaacgaagaattttgaggtcgaagcgatcagaagaaaagaagcgcaaaaagcgcaaagagcgatcagaaaattgcagggagaatggagggtccttaaaaagaagtgaattttggaaatcaattgtaattacttcgatttaattgtcacataaatgaggcatgagttcaaacaaacgcccaccaaagccaccaaagccaaaatgccattgatggcaatttcggtgggaaccaatccggcatttttataaaggtcgtaaaactgaaaaggcattcaattttttatttttaaatcaaaacattggattaaaaacaactaaccttgtctactaattctgttgtcattttttgttagaaaaaagtccgttattttgcttattttaatccactcaaattaaaagtaaatttcagaaaaattacttttaatattgataggaatggcttaaaaatcaaagacagacccaataatcattgtccttacaaattaaagtaattctctagcaaattactggcctcgctgtactggtaattaaattcataaattcataatgtgcccgtaattaaattcatgcatattttctattacaataattacattggtagtaccagaacaggaacagctggtgttcattaattacattgaaatggtcaaatgtcattcaatcatttaatgaaaagcccacatgatgctttttgatataaaattatctattaaacaaattaatagcctttcattaattctcatcagattggtgctatgtcattacttaaaaaccatcataatgggcgttacttaaaaaaccatcataattaaaatttttgcttataactttgctctaaaaagcccaaatttttaatccttgctatcattcgatagatctaaatgttctttatgagcctgtaaaatttcaaaaaattttattatgtttaaaaaaagttatggccaaaaatgttcgaaaatcacgtttttttgagttccccgagctataacttttttgaaacttaacgaaattttttgaaattttgcagactgatagagaacacttagggctatcaaatgatatcaagaattaaaaatttggttgctttcgagcaaaattataaataatttttcgacaaaatttttcataatgatggtttttaagtaacgacccagcaccgattttttaaatataaaatatttttttttaaatttgatctttagcggtgtatttttgtaaacatctttggggctgtatttcgaagttttcggtgaatgccgaaatagggaaaaaatatcggagggtcgaattttaaatatggagaaataaaaaagcttcctagaagtttcaaactaacttaaaaacacattcacatctatttaatcacaaacacttttttaaacaataactcacattaaaaaaggaatatgccagcaatgaaaacgtcattagaaaacaacttatttgtaagtacaaaaatatttactcttgaccataccatttccgattagtccgaccaggaagatcaatgcatagaaggcagaatacgtcacctgaatgggcataattatgtcgaatgctatgcatatctcaatcagcaagcagacctgaaaatttgattttcctagccctatttgtactttgggaaagcggatatagcaataatttttatccaaattatagaaaaatgccaatttgctctggagttatcgtttaaagagaataattatttgaacaattcaatatttactcaattgctaaaaattcaaaattccaaaaaaatttgtaaaaaataaaaaagccaaagtatttaaaattctattaaccctctctaattcgaattttctcgaagaaaaattgttttatttaattacgaaaatatcaaaataatgatttttaaacttttatagagggttgttctaattgagattttttttacaaaattccaaaataagactcccatcataagaactttaaacctaatagttaatatatgattttcgtgaacatttcaggccctctctaaatttttattcctaattatttccatttcctccattgcctgcacttccgtcctcagagtccaatcgccgaacgaactcataaaggtgttcaggtcaacacagtgctgcttaattcgttcactaatcatcgccggcagcggtgaaaatacgaagccaaagaatttacacaaatacaaattctgaaatttcttaagaaaggtgggacaattgacaatttcaaataatgtaacaggcaaatttaactcaattaaacaccacttaatgccacaaaagcattattcaaaatggtcataaaaatgcactgattttcataaacatttgaagattctatttcaaaatttaaataaataaatgaaactttaaatttattaaaagtaaaataatatatgtttacgctcattcatatacaaatgttccagctgtcacttaaatgatgcgtcggcgtgtcatgcctttcggattaacctatgctcttagcataagggggcgaagatgactttttacttttttttggccaagcatggcaaatggagcccaacccaacctttcgtccaactcatgcggagtcaacatggtggactaaaaagtgtgctatagcccttgtcaaaatataagtgggccacgccatggccacaggaaggacggatggtaatcaaatcaggctcatttcggcggaggagtcgagaagagggaaattggcattggccggggggggggggaagggaagggcctaaaggaggaggaggagaagcggacagcagagggtaccaagtgtcccccacgcccaccgaatgagcaatgccaatgccaactccaattttcgatggttggcccccctttgggagaaggggaaaatgagagggacaattagaggagaaacagtggggataaagaaagcaagaaattttagaaatgataatgatgacggaaaattaatgatgaatccaatgaagagaagaattgtaatattcaatgagctggtcttctttctttgtcttaaacgtcccaaattttaggaggtgttttagcaacttttggagttgaaaagccaaaaatttagactaatataaaataaatattttatttgtttttttaatttaagctttttagtgtattttttaactttgtttaaccaaaaattgaataaatacacattttttggagtttttgagggtttaaagtagagatcggaccggtcggttttttttcggtatttttcggtatttttcggttttcggtttcggttttttaaccgaaaccgaccgaccgaaaattttttgagtttttcggtttttttcggtttcggtttttataccgaaaccgaccgaccgaaataatcaaaaaaccgaaaaaaccgaccgacttttttcaaaaaccgaaaaaaaaccgaatcaaattggagcgatataacctgttaataataataaatttattgcttttttgtgctctttttcattttgaagaattttttgtaaaatattttctgctattttgaaaaaaattattaacaaaaatgcaataaaaacgaaaaatacacccctgagaaatggaaaattttatcaaaaattcatattcaaaatctatttatttatttacttgactacattttttgatttttaaaatatttatctcatttccattttgataaaagtgaaaaaaggaagatttcgagcatttaaagagaaaa

SEQ ID NO: 15277 - DNA, 1171 bp, Heterodera glycines
cttaccttcttttctcggagtcaattgttgactcccaccaccccgcgctctttttctcagccacttcactctttcttccatctttctcaccctcttcactaaatcttttaacactttttgatggcacatacttttggccataaataatactgaacaattccatcaccttttctcaagtgttttgcaaataatccattcctttcttcccttccctatgctttttcttttccctatgcttttcctcttccgttgcttttcttcttcattatgattttcctcccctctatgattttccctttcttttcccctccccctcccaatcgtccgattgttctcttcttccacttgtcttcacttctacttattccctacccatcctcatcatcccattcatccaccccctcctcctcccctctttgctctctctcttcctccgcttcactttctttctcaaatttcaaattcccctcccccaccccctctctctccgccctctcaataatcttttatctttcccttccccctcatcaactgtccccaattttttttgttgttgtttcgacctttccaatgcaattttaacttcaattttgcccttatcataaatccacccccttttatgctaaaatgcaaatttttactcaatttgcttaattacccctaataaaaagtaaaaaaaaaaatttaaaaaccgccggccttttccatgaattaaagcgagaacaaacttctgacaatgagatagaatttaaattacttaatttttggtattttcatttttggaatattatccccataatgactaataatactttatccatgtaagaaatcatttaccaattctttttgtttgctattaattgcttatttattttgtctcactttttattttcatcccatttttcttcgttttttggccatgcgtcatcatcaaaattccctctttatggcactcgaggggacaatgagtgccgatgatatcgttggcaaatttggcatttgagggacagaatagggaattgggatgaatcgaggccattaccaatttcatgccatcctttcactcattcgtttggccattcaatgcgctttaaatcctccaaattggcttcatcccaaaatgacaactaaagcgaacggagtaatgagcttacaattagccatttttgaa

SEQ ID NO: 15278 - DNA, 1013 bp, Heterodera glycines
ccgggggaattttaaaaatttgggtgcaatttgttaacagattttcaacaaaaaaaggttggtttttgcgattattaagctcaattggtaggattttcatttaaaaaatgataaaatatgtatcaatttaaaaaaaactatgaggaaccatattttctttataggaaacccacgagtatacaaaaacaaattgaaaataatccaatttctgtagagggattgagccaggggaaagaagaagggaaagtcaaggagactagccattaggccatttgcacacctgggcagtgttacttttaaagaatatattaattattattttttatttttccctttgactccaattttcttcactaatttttcactcagacccccattcttaccagtgcttgtttttcccggttcccggttgccctaccgggaccgggacctcggatgaccgggaattcccggcccggtcccggtcccgtggcactctactttatatatttcttaatttatttaaaacctatcaaataactttttttcataattgttcaatttttaattgtattcaattaaaacataatcaattaattaattatgtttgtaatactcattgttttttttatcaaatacaaaaagcaaaatctgttccgcaattataacgctgacgtccgcgtcaaaaattccccaaaaaaggggaatttttgagtttttattgaaattttgtacaaagacagagagaaagagagagagagagagaaagggggagagagagcgagagagagagcgagagagagagagagcgagagagagtgagagagattaacatttttacaaaaaaatatcaatccaaagataaaaattaactgacaatgatttcccctcattgtccgttctcccccccccgccggtctctccgaatttaagcaaaaagcaaatcgctgctactgaagagaaatgtactcttagtaggatgaatgaatgaatgaattgattgtggaatgattataaagttaacagatgataag

SEQ ID NO: 15279 - DNA, 2200 bp, Heterodera glycines
tttcctcccgagcgatggaatgtatgtacacgcaaaattccacactcgcatttgcattgtctgttgagagacggtttttggcaaaacaccaaatttcaagaccaaaaattggcatttttgtttcaatttcattccgcccgcttaattaataaaatggtacacaaaatactttggacaattcttcgttattccaatttcttcaaaatatttcaacgttattttacatcgattcatctgtacgaatgccataatacgcgtgccaagacaaggcaagatgttggcattgctgagtcagtcagtcgtcagtctgtcggttcggacagaaagccgatcgacggacggactgccacagacactctcagctgtgctacatttggccatgtttgggcaagggcgaatattttttttgggggggggggaggcgacaacggaatgaaggcatttttttaacgcaaagacagacgaacacagaagagaaacggaacggaaatgacacaaagcaaaaaagaacaatgcaagttgggaaataattcttatttgaccgattatttaatgaacaaatgaatgggaagtgaatgtgccgtattcatttagtaattcattcagtcactccgtggcacttcgctttgcccggccgatgggtcgttcacttcgcgtaagtaccgtttgcccgagggcaattccaccggtcggactccgcccccaacgccggcgaacatttccttggccttcgcatccgtcacccgtggttcgaccatacaagcggagcccggctcaaagggaaggaaggcaaaatcagcggaggacgggaaaaatgccaattttgaataatgccgaaattggaaagacaaatcgaagacgaataaaaggagaagagaaattgccaaacaaaggagaattgacgcgcaaagaagcgaagggaaaagtgacgccactgattgatgctttacaacccttttgcccaccttccatccctccggcgttgccaccataaatttgtcagaaagctgaagagagtcaagcactcgcaaaatttcgctaaatttgtataaagtttcagtggtgacgtaaaaagggattcattactcaaaatttcgtccggtacttgccggataaagcaaagacagacgaagacgctttttggggtcgacgataaaaacataaaaaatttggcacgttaaaggccaaattggacaatttcaaaactcactgctctgaccgttaaaggcacaccggacaaatcggaatttagtgggtcaatcatgccgaatttaattgccaaaagacgctgctgatcagcaatgattggaaagggaaaatcggcttaaagtagacggacaacggtagacagaaataaaaatgtgagggaaggggaagagagtgagagaatagatgagagaaggatcgagaggagaggggagagagaatgagcgagggagagagcgggagaaaagcagaaagagagagtgggtgaaagaaggccgagcgggaaaagcgagtggatgagagggaatatgagatgagagagtagagagagagagagggaagagagagagggaagggagagggagagagagagagagggaagagagagagggaagagagagagggaagggagagggagggagagagagagagagaggaaagagagagacgtagagcaagagagagagagagagttgatgaaagtggagaaatggatgagaggagggggggggggggggtgaatgacggtaaaaacccaactcgtactattttagagtatctttttttctctgttctctgatgacttaacgctgtctcgcttttttctgtttctatatttactacataatagtacgagttgggtttcgtccatgaatgacctgccgacgaaatcttctcacttccgttccctttcgaattgccatacgcggctatgtcttcagtccaattgcgatgcgattctttttgggaatgcctttttattaaaacgtttaattcggtctcaaaaccactaattttgcatttttcagcgcaattaatcactcacaattcaaaaattgtctatgaattttaccggacgaatcgcaactgagtgcgatcactttgacatggcgccgcgcgaattcggcggtgagttgcgcggcacgtgccaattcggtggtgcaaacgggcgtaaaatcggcggggtgggagaagagaatggcccaactgacaa

SEQ ID NO: 15280 - DNA, 2070 bp, Heterodera glycines
  unsure (1)..(2070): unsure at all n locations
gcagcatgtgtttgccggagaatcaaattacgtatattaatgctttctttcatattattttttcgaatatattctagattaaaatttcaccaaaaactccgataaattgcatgaatctttgttttacaagaaacaacaaatagacaaatcaaataaacaagttaatttggaataggatgggaattagaggtgattatgaccggccaatcattgggaaaaccgtggggagagagattggacatcacaaaaataatcgaaactaatcatgtaaatcctttgcgatgccaaaaccaccgttttcgatatgtctgcgtcatggaaattagtccaattcgagttcggagtcgattttctgcgccgcgtcgtcggcattgtccgtttcgcggttttcgccactgctcccttctccaccaattggaatcccttcgattcggtcggcctaaacaacaattaataattgcccgattagcataagaattacttcgtcaagcaaatattcagcagagcgagcataacctaaaaagtgaaattgacttaaaaatgccaattggtcgtatttacgttccgcttgttcttcctgtccttcgctgaagaaaacatcgccaaatttcctctgcagaagtgcgcatgccctcaacatttcgggctttcccttcgccgatttgagggcccagtcgagcgttttgttcaaaaatggaatgcgacggtccgacgatggactatcagagttaaatgttgaaggcaaattggaaaacatctgaaggatttttttgtttgaggaattttgtcaatttgaagcgcaaaccgtcagcaaaatttggagattttctgtgttcagtgtggcctcactttgtttgagtgtctccgcgtaaagctcggccaagtcaattgcgcttgtgtattcttttgcttaacaaagaatggtacaattgctaataagccatcctttacttttttgaggacttaccttcacacaatattagaacggtggactggatttgctcgagcagttcggtaaacctccgttccgcgctgagtcgcgcgtggaccgtccgcaaaatttgatgcgcttcataaaactgcttagaagttaaagccgcactcagccgttgctgtaatttagcgacctgtaaaaagggcaaaataaaaagaagcgcatccattttgtagaaactgaccttactcatttcgtgcagaagcaattagaaaaaattggaattaaagtttttaaaaaaataaaaaagttttctgcctgacggatcaaaataaagaaaatatattaaaaaatgtcagcacttaattataaaaaaattcaatcgcagtgagaccaaacaacaaaaagtgtgtgcaaaacaaataaaaatgatcgaaacggacagcacaaacactcccancgattcaatggatttgtccgctttcagccttggaattgcattccgccgccaccaccgcccttccctaccaccgcgtccaaatccgccacggcctcgtccgccgccccgaccaccacccacgaaaagcactgccgcgtccgcgaggcgcaccgccctgtcccatgccttgggcaccacgttgcgcacgaccgatgttctacaggcgaagaatgagagaggggataatgaaatattaattttaatattcggggaatattcgagacgcagaaactaataaatgatcataaatatacatcagtcacattttcctttttatgaataaataagttcgtggaatttttgaaaaaatttgttagttagagcagaccataaatataaaaaaataaattttaaatcgaataatcaaaaaagacaatctttgtacacactaacaataaatagccaaatacccggtcactaatttacttactttaaacatcggagcgttcttaagcgtatccggaaggaccgaaaaacggatctgtgagcctcgtataaacacgttatccaatgtttgggtgcgaccatcgcgaagagttaccttgaaaacggaggttccttttttacgatttgtatttggccacgagcgataatcttttgcactattattttgtgttttattatttaggaaggccaa

SEQ ID NO: 15281 - DNA, 1046 bp, Heterodera glycines
tggctccaaattaacaacctttgcgctgtcctttctttcccaagaaccctttggttatttattttttaaataagtcctttaatttgattttattccataaattgtccattttaaatgctttttctgaaccgatcctccccccccccccccacttttttttgtgtctccacatttaccatttttgtgcaagtcgtccaacttttttgtcttctcgctcggcttcctctgctgctgctgcttttggccaactccttggccttgtgtttgctttgttacccctggcgaaatcactattaattagtgttaattactcccgtccaattgctcactctttgctttcggcttttcatttccggcggatgactgctcctcgtccttcgcttttcccttccctttcaaaattcgttttccccttttggttgacttttcctcttccgacgacgattggctgaagtccatttcccccgagttgaggccgtgttcctcctcttcgtcctcatccgtcgtcaccacctttttgccgcccctttttcgcttcatcggcgttgaatattgcgttgtgccttttgatgtcgacgattctctcattaatttctccacgtccaaatccttcaaccatttctcaatctccgccattgtctcatcgtcaatttccttccctttcgactgtttcgatggtccgtccatttcttcgtcctcctccgaaaaggatgcttcatcttcgtcttcttcgtcactcattgtccgctccttctccttcgtctgtttcatgcttttcgactttccctttaaatttgctttgcgtttgcctccgtcgccactttctttgaaactctaccatttttgaacattttgatggcgatgggccggcatcaggtggaagagaagagacgacctcagcgagccgatgagtcgcgggcattgacgagaatgtacgggtgtggaaagatttattgctgatggaccgaagatgaagacggcacagaaacaacggcaggcatgaggaggaaacgagggggaacagataaggaagaggggacgaagtt

SEQ ID NO: 15282 - DNA, 2154 bp, Heterodera glycines
tgctttgacttgctcagaatcgaacgatgaatcggtctttgatggcacttcaatcggcgccgtttgtttgccctttgtctgtgccatcctttttttcttggattccatcgcctcgttctcttcctcctccccctcgccaatgtcctctcccaacccatacgatgcagacgatttcgacagcgatgccaattcgtccgactcttcctcctccgcatccttccaatcttcgtccgatgaattgtccggttcctcttcagatgacaactcaaactctggtctgtgataccttgcagaaggcgttctctgccttttcgctgtcaatggcacttccgctagtccaagtgattgttccttctgctgctcccactgcccctcccctcttccttccctcagctgttgcgccggtgccgtatcaaatggctccatttttggtacttttcgctttggttgcgccggtgccgtatcacttggctccacttttggcacttccactttcggtatccgctccttctgctcccactgttcctctcctccccattccctcgactgttgtgccggtgccgtctcaattggttccacttttggcacttttaaaagaggggggatgtccatttgctgctgatgcttctcacctaaagtggtgggcgagtgcgtctctgcgtgctcatccgctgccaattctgctgggttaaccgcatttaatgtgcccagtccgctgatcagcagaaaaatcattgtgaaaagcacatcaacaattattcggcgcatcttaatctgttgccaattaaatttgagcaagaaaatgaaatcaaaaaaagaaataatgataatttattatatttcattaaattttttaatatttcatgcaattaaaaacattgcgtaattttgtataaatccaacatggaaatatgtaagtgtatgtatgtgcatatgtacatatatgtgtggctgtttggcaagcatcatttgcattatgcgcatttacttatgcttttgcgtaggaaatgccacgcaatgaatcaatgggccttcgattttattgcctttaatattgtacaaatttgatcagtccagaaccggttgcccagaggttttcggggtcaaggacccgattccgggctactttacgctacagtacactcacgagatttctttgaaaaaaaatttcgcgaaaaaatgagaacttttaaactcctcctatagtctctccttctttcattcaaacagaaattgccaagcgcgagggatcaaagaatcttcgaacgaacaattggagttttgctgtggtgttaagctgattttgatttgtatttgcttggtgttttatctttgcaattgacctcagcatttttaattttgttaattaatacatattttgagcgattttatttttggtggatttaattttgtgtcgacgatatttcttattttttcgtttatgttttgacctttaatttggattttttgcattttatttgtattcgcataaatttatttgttgaaaaacatatttttgcaattcgtattttccatttttatcgcctccttaatttgtattcaaaatattaatatttgcgcgtggaaagaaaaaattatttttgttctacagtacctgcctgcttttaccgtatttgatgttgtgaatattttatttttgattgttaatcttaaatatttttgtttgttaatgtgacactttcaattttcaaaacttcaaaaaatgaaccttatatataattgtattgtaacttttattttatttttgacacactgtacaatgtgaagtaattttggctgtgatttgcttaaacttttttaaaatttaaaaaaaatgaaaaatacattgccataaaatcggatcggatcccaccctcaattcgtagggatcgctcctggaatatgactaccgggattgaaatcccaatttggtaggggccccgacgcgtctttttcaactaaaaaagccgggatcaggttcccgggaaaatcccggagggatctcggtcccgtcctgatcactagttattaacattcaaaaaacttattttctaccaaaaagttacctttattgacttcgggatttttcgtaactattttctttcttttttaaagaatttaaggttttgagaatttatagaaatttcttttcaa

SEQ ID NO: 15283 - DNA, 1969 bp, Heterodera glycines
caagcccagtgttagacaaaattgctcataacgccaaatagcgtaattggcgtaaattattgcgcgctaattcaaaatttacactggaaaacggtaggggtcaactccgtctggccaactccgtctcagcaatgtacaaaaagctataacttttttctttgttggccaaacttcacaatcatggtatcattcgaaagccctagatgtttagaagatatttataagctatttctcagtgattaatcagctctcaaaaaagttgtcagtttaaaaccgcaaaaaaaggcagaattttcaaagttttttatttctatctttttttatagttcgaaattttctctaatttttagtaggctaatagagcctgtgaagagctttcgaatgatatcaagattgtttgattcggtcaataatttcaagagttatattgactaatttaattttttttttctccaaaaaattctccttcttcaccattccctactcttttctcacccagacccccattcttaccagtgcaaatttttaccggcggtaccggtactagacaaaccggtaccgatactttgatttttgaaaaaaccggtaccggtaccaaaaaaaccggtaattaccggtcggtaccggtaccgctcaaccctaattattaggctcaatttgtacggattttcatttaaaaaataataaaatatatatatcaattaaaatatttaaagaatatattaatatattttttaaatttttccctttaactctaattttcattctctaatttttcactcagacccctattcttaccagtgcttgtttttcccggttgccctaccgggaccgggacctgagcttttcaaaatccgggaccgggacctcggataaccgggaattcccggcccggtcccgttcaatgcacccggacagaaaaattaacaaagcccatcagaattttcgagtgaagccaaatttacccgaattcgactattttaaaatatatgaggaatacgcctaatcgatccaacgcttgacctttcattaaagttcatatttctcttttttgtcctcttttcaagactgatgctaaccaaaggcattattaactgtcctttgtctattctcaattttgtttttaaccaatctctgaatttaagacatgatcggaggtctttttgtttataaccacaagggtgaggtgcttatttcaagaatttatcgcgacgacgtgaatcggaatgccgttgacgcctttagagtttcagttatacatgcaaggcaacaggtaatttcatacttcaaaatattttttggttttgctttcagattcgttcaccagtgacaaatattgcaaggacttccttttttcacatcaaaaggggaaacgtttggatgtgcgctgttagcagacgaaacattaatgcatcgatggtcttcgaatttctcaatcgttttgcagacacaatgcaatcttattttggaaaactgaatgaggaaaatgtgaaaaacaatttcgtcctcatctacgaaattcttgatggtaaatttaaaaatatttaatctgttcaatgtagttttttttgcttttagagatccttgattttggttacccccagaataccgacccaggagtattgaaaacatttataacacaacaaggcgtccgaacagcggtaagaaaattatttaaattttatctcttactttgttattacagagtaaagaagaacaggcacaaatcacttctcaagtaacaggacaaattggttggcgccgagaaggcataaaatacagacgcaatgaactctttttggatgtcattgaatatgttaacctcctcatgtcgcagcagggtcctatcaattaattcgctaaaataaattaattctttgtaggtcaggtgctttcatctcatgttgcgggaaaggtggccatgaagtaatgtctcagcggaatgccagaatgtaaatttgggattaat

SEQ ID NO: 15284 - DNA, 1482 bp, Heterodera glycines
gatttgttaaccgattttcccaaaaaaatggccaaattttcggttttgagcaaatttataataaaataaaagattttaaggttccggcggttgcgaccaggcgccgcccggggggaaaaaataagaattttgactatatttttagctgattttcattgaaaaaattcgtaattttgtgaattttcggaaaagaattggttattttctagtttttatgaaatatttaacaaaaaacctcaaaatttctcaaaaaaccacaaaaagcctcaaagcctcattttgaaaatttagcctcattgacctatcaaaaaaccaccaaatggcagccctgcttttaaagtaatgcttgaatctacaaaaaaccaatttaggaaaatcaattacaaaatgcaatgaaaaagacctaattaagcttgcaatttagaagagaacattctgaattgaaactattttcgacaaaactgttaacaaatcgcaaccgcggcccttactattggcgccgatggaccctttatttccccaaatttttttttaaaaatgcgcgccacaaaaaaaacggtttggaaaaagttaatcgttttacttgacccgaccctttgcaaaaataattttggttgatcccctccccttcttttttcatgtatattatgctccgccggactctgaaccctaagccctattctaacgctcaaattcttttaattatggcttcatttgaagtaggaatttaaccaattcgattttttcttctttaaagtttctgaacaaacaccaagaagtattcaatttggcgaactttggccaactcaaccaccaaagtgtcgattttgtgctgattgttcaggtttgttcgttgatgattgctattttcatttttttggtgttaggttcacaacagaattgactatttgaattatttggtcggctctctgtcgcgtgccaagggaatcgaacgtgttctgttgattttcagttacgataaacattcagaaccgataaacaaactgatcagaagcattgacttttgcagagtaaaattcaacttaattcgtaaaaaaaattctttgtttttaggtcacgcaaattttctttccttacaatatccaactttttccaaattcgtttcccggccttgggccaaaggattgtccggaaggaaccaaaaagtacttcgatttttaatgattagttgtttatatttggattaagaagggaaggtctcgaatgtgcaaatgcggcatatcccgacacacatggcaattttagactgccgagatttacgcagattaaacaccattggtggtggaaggtcagcgaaagggagttaattcagtaccgaaaaattaacaattaggcgaattacgcatttgatgaaataatgccgaagtatggtttggagaataagacgttgcttttccttgaggaagatcatattgtggcgcctggactttctcctttcgctgaaactgatgacgaagagcg

SEQ ID NO: 15285 - DNA, 1280 bp, Heterodera glycines
gtcataacactaacaaatttttttctttgtgtgtgggacttttcacggccaatatgtaatcaccagaggctgcacaaaatacttttaaaaatataatgaattttaatttgttaaaatatccattaaaatttttatacataaaaaaataaaatattacaattttttatagtgaaaatgattgtaataaataagattctttcacatttttacatcggctttttcttattctttgggctctctaaaatttttgcattaaaaatttgcaaaaaaaaaggttttatgtaaattaattttacatcgcttcaaacatttcccatttgttgaccagaatggatttgaatgccaatttgaattcgtcaaatttagcgcttatttcttccatttttggcattttgaattttttgttacttttatttttgcctccattctcctcggcattttccaatggattgaatttcaaaaaatcttttctgattgtggcgtcaaattgtgccaacaatgggttcatttgtgcactgtttacgttcgaacttatgccaataagccaaactttgcaaaaattgggccttaaatttattaaataattttcaaaaataaaataaatcgaaataattatatgtagatatatttaataatttatcaaattcataaaattctttacataaatgccaatgccaaaaattcatttgccatttcgcagttgtgctggtaaatgtcggggtacaaatgtgtgccaatgtttggcccactttttgggtccaaatcgtacacaatttgccgacggattcgcccgtcaacgaactgacaaaatttatcaaaaatttgcgtttgttgctcagccacacaattgatcaacacaaaatatttatactaaattaattattaaaaatttattttaattattttttttaattttgaacatttttttatcaagtaattattaaataataaatatttgtgttttcttcgtgccttttctataaacccattattttgttcatgtagcaattttttccattcaaaattaagtgtcatttcaattaaatttgtcattttccatgctaaaataaattttttttttttttatttacaaaattttgtaaaaattttttttttggcctttgaacattttcatttccgaatcaacttgggaactgcaatttgggaaccaaacttgccacatttaattccacgaaaaattggcgcatacacaggcattttcctgttcctctggattttgaaaaaaaaaggggttgacactgtttggattttgccaattc

SEQ ID NO: 15286 - DNA, 1904 bp, Heterodera glycines
  unsure (1)..(1904): unsure at all n locations
ccaggtccgacatggaaatccaggtccaagtcaatgcaagaaatttatttattatatttctcgggtcgatgttattatttaaatatattattaaattaataatatttttgattttttttaattgaatactttttgcccataatttcatcactaaaaggagcattcggaaattttttgcatttttattaaatttttgatgaattttttggcgttctccttctccgtcatccatttgcagcatttcttgtttattttgtccatccaaaatcaaattaaaaatgtaaaatgttgcgtgataacctaaaataagtatatacataattagtgaaaaaaaaatttaaataaaaaatttaaaatttattaatttatatattatattttacttttaaatataatttttttttattttataaaacaattatttttaaaaatattttagagatcgattatggaccggatctttccgtatacggaggtattttagggacctatagcccatattttttccgagtttttatgagctacggcttttacgggttctttagcccgtatgtccgtaccccgtaaagatatagatagatgttcagcccgtaacccttaatgaactctatggtaaattttttgagaatttttttcattttttttataagttaattaatatattacccgaaagtacacggagcatttttgtgttattttcggttggctttttgaattttgccatcagttcgtccattgttttgtcatcaatttttgctggcaacattttgcgttcgggaataatcacaaaagtcacatcgtacggcacttgatcaaagatgaatttgatcaacaaaattggagcatgtggaaatttgacaaggtcagtcacaaattcattctaaaaaattgaatttttttttcatttctttcaaatttaaaaattatttttgaattaaaaattaattaattcaatttatttaactttataaatattatttcatttcgtttctttttattaagaatatacaagctaaaattattatttttgaaattataatttatatttcattatatgtatttattattgttaaaaaatctacgaatcttattttttgaaacattaaaaattttagtatttttgttaaaaattagttagctaaaaaatatttaactttatatttttttattaataaattacttaaacgtaaattattgtttgtttattattctttttactgaatttaaaagaaaatattaaattgaccagaaatctatttgagaacttaaatgtttttttttatttattgaaaatataaccgaacaaagttcacaatacaatgaccaatttgtgccatcggaacacgcgtgttccatatgttggcaaattgttgtatcatagccaaaaatatgcacttttttgatcactttgcccggcacaatacacaacagatcaatgtcagaacgaattgtatgagtgccaagcaaaaatgagcccgaaacaagcagtttggcatgcccttcggactgaaaaaaaaattcaaaaattaaatttatttttaattaattaaatttaataaattttattccattaaaaatattttttaatttcacaaacccagtcatcgaaaattttacgaatttttattaatgaatttttcattttctcctcatattcagcgaagcctttaaatgttttttctgccagataattttccaactgaacattttattgtttaattaaaaggtaaatatatttaatataaaattacatttancattttggacgttttgtgtatcatttttgatgctttcggcaaaatttatttgttgcgaaaattttggaaagtttgcatttaaatatttgtttgaattttgttcatttcccacaatttgctgaacagcgattgatctggaggaaaaaa

SEQ ID NO: 15287 - DNA, 872 bp, Heterodera glycines
aggagaacccccctccaaaaatgaaaaatttaaaattaaaaaaaaagtagatttttcacaatattaagcaatggtcttagcaggttcatgaaaattccaaagaagtttcccgacgagcgccttgcggtcactgccgaaacccccccccccctccccccattatcatggcccgaagagcaaaaaaaaaaaaatctccgaacccccttccgaaaattttttatttctggctacaggccgttgttacttgtctaaatattctagtttattaattatggcataaaattcaaaattttgggatgccaacaatttccttatgccattattaaaggacaggaaaatgccaaactaaaccaacccaattgaatttgtgcttccatcttttgccaacgcaatttcaaattgtcaaaacggatgtggccacaacgcattcccgttatttcttccaacaatttttgtctctttttggactcattttgttcccatttgccgctaattgttgccccattagtcaaaagtgccattgcaaaattttgcaaatgaatttgggccttcacatttttaaattcattttcaaaattttcaataacaatttcatttgctgcttcagccaacattaaattggcttcgttgttcaaattcagaattttccacaaaatttgatggaattgccacggcaaatcgcatacaacatccacattgttatacttaaaaaaaatttaaataaatatttattttaatttttaaacaatattgcataaaaaatttgttggtaaaattctcctaaaaaatgtttaaagggggtggaggatattatctcggttttgtaccttcttggggtgtaatttttcaaaatttcatttgagaattcagat

SEQ ID NO: 15288 - DNA, 3519 bp, Heterodera glycines
cgatttgtgcccgatttgtcaccataaacagcccatggcgttaaattgataatataagtaattcattacatagtagtgaattgattttatttttatttaaaatatatttaagattttcaaatgagctacagtagaatttaaatataaatttaattttatttaatcattaccaattggcaattgttttggtcagtaggataaattattattattatttctttgaataaattcatagaattatgatagatgtcagttttgaataagaaaattttttattcatttaaatgcctcaaaaaaatattgctatttaattggaaaaaaaatttataaagcattttggggcaacaaaaatgaaaatatttccgctattatttttaattatatttttaaccagaattggaacagaaaagaaaaaattgcagcagaagtcatttggcgaaatattaatttaaatgttacttttcaaaatgtttatgtaaagaaatccgttggccatgagtatgtcctttaaaagtgcaatcagctgaccattgatttattttagacattctagaattaaaaataattgttaaaataataactatattaatctaataaattgttgcaataattttggggcctgtctatttttattctcgacgtaagtgccactttctgatgaaaattttcttggaatcaacaaaattaactgatcaagatattattattcaatagctcatagaaatatctttacaagcctgcaaaattttaaaaattttacaaatatgttaaaagtatattttatgtaaaagttttccttcattttatttccggtacagtatatgctgtcctgagagaatatgttaaaacaaaaattttaaatcgacatctaaataaaaaaaaaattttatttgtggattttaatttgtctattcattttcaacaaaatttgttggacttattttctaatatattttcctttaaaagaatggaggaagaaaaaatgtgaagaaaataatgataaaataaaattatgcctctctttcactattcgtgcctataattatttatttattcgacaaaatttagcataaatttttgaaaatatttctgtgctatttaaagaatgatttttttttaaattttattataaataaatatactcccaatattattatttttaaatcatttcaaatataaattgcattttataataaaaagcgaaaaaacatataaataaaatttattttaaacaaattatgtaattattagttgagcataataattttggcaaaaacgatttgggcataaatttgaaaaaaatcattgaccatcaaaattgaagttgttgaacaaattccgaattgatcaatttaaatttattggaaaataaaagtaaaaaaccaaaaaacgacattaaataaagaaaagccattcatttctaaaattctcaaaaatacaatgtttttttgtggcatttttgtcaccttttttgaaatttatgacaattttacaatgtccttttttccgtttatatccaattaaaaagcaataaatttaacaacaaaaaaaacagtgcaaatattgcaaaaaatagaaaaaacttcgataaattattatacaaaattaataattataattctaaacttgagttgcacgggccgggaattttgacaaaaactgggaccggaacttaccgggaccagaaaagtcgggaccgggacctcgattttggtccgggaccgcgagaaaagccgggaccgggaccaaccgggaattttcccaagagaaaaattttttgaaaaaatttgaaaatttgagtacactttgttacgaaaatttctaaattcaaaaatgtacccataaaaatgaaaaaaaactttaaatgaatacaaatccatttttgtaattaaaaactatttttcaaacaaatacatttttttgtttatattaaatttggtccttttttctgataaaattatttttataaattgaaagttccagcatggaatcaacttccaaatttaatcatgtatgtattatatattaattaagacagcacaaatgggttaaaatcggagtaattaaggagaaagtggaaaaattttgaaaaataattaactcattagagaaaaaggctaactccgatttttttgcaaatttcggcataattttgtcgccattctttggttgaatattttgttatttgcctgaattgattattcgctttaatgaattttcgtattcaattttctgtttatcagtttttaatttatttatttctccaaaagcctctcttagaattctctcggaaaattcgattttttgatttaaatatttatttaataattcggtatatttacgacatttgaaaaaaatagcaaacctaaatgattttataaaatttatcaaaaaagttttcatgttaattctaaaaatcgaatgattttattcagccacaaattgttttttccaattggaaatattctgttgagaagtgttcacaatttttgcaatttctttgtcagtcatttttgggttttctttttttgtttgccaataaattttcattttttccattttttcgttctccgttatttgtttcttgctaattccaaattgtttcttccataacatgccttgcgacgcgcgctgtctaccttgaggcaacattggacctcacatcggaatcattcatcaatgttctccgtcgattcataagtcgacgaggaaaacccgacatcatttggagcgacaacgccacgaccttcaaactcgctcagaaaaccctggagcttctcagtgctccgggtccggatcaggaagtacaaaacttcctgactcagaacagaatccagtggcgattcattgcccaaataagtccttgggcaggaggcttttacgagcgcctcgtgaagctagtcaaggactgcttcaaacgaaccttgggtcgaaggatcctttccttcgaccaactcaacacattcgtggcagaagtggaggccaccctcaactacagaccgattaccgcggtctcagacgcagtggatggaccagttccactgcgtcccatcaatctcttacaaccagagattcagatcaattgggaaacaacaacagacccaattgattcagaggaacagttttcctccacacacgaacgtttagcttcccgaatacaagcacttcgggaagccaacgacgttttctgggccaaatggcactctgagtatttgacattactcagagaaagagcccagtgggaccacaaaggcccacgactccaacacttcggagaaccgaaggaagggatggtggtcctaatctctcaggacctcgtccctcgcaatcaatggccaatgggacgaattgttgaaacacacggacggcctggagccatccgaagtgttaaagttgaaatccctgtccgagggaccaacaacaaaaagccaaaggacatgccacgaaagacagtccttactcgtccagtgaaccgcatcttccctttggaagcgggtcctgaaatgaccaaccaaggaa

SEQ ID NO: 15289 - DNA, 3361 bp, Heterodera glycines
aaaatccttatttcctttgtcgttattggcccccccacgtccatcgtttgccacattcatttgccaattttgtgatggatagcattggcactcgtagtgaacagcagagaattggctgggtggagcggagtgggcgcgaccaacaccaaaagcaattgtgaatattagttgcattagccgaattggcactgtttaattgtccaatctcaatattgcttacccacggggagttcgtctgctgttgccgcctttcttctgcttttgtactgctcgtgcctccgttcgtcggtgggagtgccgttggggagggcaaagtgccatggagggcgagtgcgtgaaggtcctgttgggccgtgctggacggcgtgggggaagtgacgttggattggacgatggtggaggtgacgctcgtccttagccgtgagtagctgcgcgtctctgcgtcctccggcagcaacagttccaccatcaattcgtccacgttggccagtccttcaaccaatgccaagtgccattgattgtttccctccgtctgtccgcaatgactcaccaaagagtttggccaactgcgcctcctccaccaaatcgcgcgcgatggccaccagcggaggcaaaagcagcaaaaggttgcccagccgaagcggcgccgcccgacattcgcttctgcgctgcacttggtgctccaaggcggccaaaatgtggtgacgcattccctccaccgctccgaccgctgactcatcaatgcctttggccactgaaaggaaatgagtggcaaatgtaaacactgagcgactgactaactcggatcgaaaaaggccaccgctttgagtgccacaaattcgcactcctccaatcgtagccgtcgcattgggctcgtcaaatggtcgagaatgcgggcgaccactcggctgaacagaaaagacaaaagatcgagcacagtttgaaacattgcgcactttatgtcagggattttgggcgcgtcgcgcggaacgcagcgatcgttggccaaccaaacggcgtcagaggcagcgacacggacgagcgaacggaaggcggcacaaaggatgagatgctgggcagagaaatgccgaagcagcgcaatttgggaacggaggggcaaacgacggaattcgggcaaatgtttggcccattggacgagcaaaatcagttgctggtgcatcttggccaacaaacggtccgttctttccattccctctctccgttctttctttccttaccgaatccgtcacgtcgcccgtcgtcgccgtcctttggctgtcctttgacttcgtctccccgccactttctctgctcgtcgtcgtcccctgcggctgcttttcccttctcattgtcgtcactttcgttccctttagcattcgttccgcctccattaatcgttgcacaatttgttcattgtcaattgcagacgaagtgccaaattcgtcgtcggcaacaaaacaacagccaatggcactcgccaccgttgatgtttttgctgttgtcgctgtcgttgttgggttttgcccgttttggttgccaattttgccattccgtcgtgttgccgcaattcgatccctctccaattggacggcttccggacgcattccgttgctcagacatttgtcgaagcgacagcgtcggcacgcattgcgttggtctgagaatggaaaaagctaataaatgttgatttatgttgcaaatgctcacttttgtccacgacgcaatttttgctaaaacggcacaagtaattgtgcttttttcgaatggttcgccggaagaaacataaaaaagagaagcaaaaagtgaagcgacagaaagtgaaaagcaaaggacaaaacctttgcatccatcgcaagaaatgctcccgtaatgctttccttaaggcagttttacccaaatgagaacatttttgcccacccgtggctttgtcggcacaaatcagacaattcgtctgcgtttgtccgccatttgtcccggccgcggcggacacttttcgctgcggggacggagtgggcgccggggggagggcggccgaagtgccgcggggcgacggagtgccgggggcggaaaaggacggaaaaacatctgccgaacattttgagggattaatgctaatcatttgttctttttggcttgaccagtcgtgcacaatcccttctccgttttgtccgtcgcatttgctgcgccgccctcgcaatttccgccgttacattccattttcattttcgtgtcattaaaatacaaaattggaacactcattcaaagaaaaagtgaacgaagggtgggcttgatcaaagaatgacgaaattggcaacaaatgccaatggatttgccatgaaatgggaaatggcccaaagggagggggaggggacagtcgtcggctgactctattcactccttcccctccttatcagcaaagtcccctcgtcattcatcaacaaataaataatcaacccctccccccccccatcaatcgaccgactgacaatgagtcaatcactccccaaatgatcactcagcccatccgacatttgaatgaacaaaaaaaacaataacgaatacaagtgaagggagggctgatttggtgagcgaattggaaacggacgttcactttttattttgctaaaggccaaggaatggaggcgacatgaatgagtgaatgaatgtaccgtttatcgaaaaggtaatctcatgggaacttatcggaattttgtaacaatttaatgcaaaatgggggggggggattaattgtaatcgatcccccccggggggggggggggaatcacgtcgttctgctggtggtgagaaggcaaaaatgaaaaaaaaataccgtaaaaagcactccgctagcacttcgggagtttaagaaccaatttattcttacagatggattccaaagaaaatggttgaatttataaattgcttcctttaattaatgcatttgctaattgactaagatttgctaaaaaaaaatcaccgcaattgaaactagaatagagcgggaccgggaccgggaattcccggtcatccgaggtcccggttcccggtcccgggttttgaaaagctcaggtcccggtagggaaaccgggaaaaacaagcactggtaagaatgggggtctgagtgcaaaaattagtgagaaaattggagttaaaggaaaaaatttagaaataataagtaaatatattcataaggtaccgagaccaattgtgcaaatggcctaaaggatagtctccttcactttcccttcttctttcccttggttcgatccccacaacacaaatgacaatattgtgaaaatttctttttttttagaatttttggcctttcctattcgccaaaatatgtttccttatttttttt

SEQ ID NO: 15290 - DNA, 1350 bp, Heterodera glycines
taaatcttatgcaattttctataagcaatcgatagtgtaacaaatagagaagataagttctgatcaagcacacacctttcattatttccggttaaatatgtgttcatattttaacaaaaagcagtcttgaatgtcgtcgaaatttgtggtaattccatggctatagccccgaccaattgcgctggaattttgccatgaggcttattttttgtgctggtttcgaatttacaggcgcccatgcaattggagcgcattaaattttttgtcgatttttcttcaatacccacattatacgataagcatttcctcgcacaccgctctatttgctctgttttaaacaacaaaattttcccaagcattcatacctactttcttaattgcactgggatcacatctaaacgactatgctaaaaacggggaactaaactgtattaatatttttaacaaattgccgcccttttcgcctaccctgttaagagaaatcttaatttcactaataatttctcaattttcttctataacagattaactcttctatggtgagtttttcaatttctatgtactttattaagtaaacaataattatcaaacatttttctatgattgcaaagcatttaaaaaatcataggcttgtttattttcattatgttttggaaaaggtcaattaaataaacaatttttttttgtaattttattaattgtataaatcttatgcaattttctataagcaatcgatagtgtaacaaatagagaagataagttctgatcaagcacacacctttcattatttccggttaaatatgtgttcatattttaacaaaaagcagtcttgaatgtcgtcgaaatttgtggtaattccatggctatagccccgaccaattgcgctggaattttgccatgaggcttattttttgtgctggtttcgaatttacaggcgcccatgcaattggagcgcattaaattttttgtcgatttttcttcaatacccacattatacgataagcatttcctcgcacaccgctctatttgctctgttttaaacaacaaaattttcccaagcattcatacctactttcttaattgcactgggatcacatctaaacgactatactaaaaacggggaactaaactgtattaatatttttaacaaattgcagtccttttcgcctaccctgttaagagaaatcttaatttcactaataatttctcaattttcttctataacagattatctcttctatggtcagtttttcaatttctatgtactttattaagtaaacaataattatcaaacaattttctatgattgcaaagcatttaaaaaatcataggcttagttattttcattat

SEQ ID NO: 15291 - DNA, 859 bp, Heterodera glycines
  unsure (1)..(859): unsure at all n locations
atttgccggtaaatcgttgataaatattaggaataataatggacccaaaacgctcccttgtggtacccctgtataagtattatagctttcagaataatggtcttcaatttttaccctaaaacttctttgtgacaagaagttacgtaaaaacaccaaaattttcccaactattccagcatttttaatttttgcaagtaacaaatcaataggaacagaatcgaatgctttggaaaaatcgatataaatgacatcaacctctttttgattttgtatggcttcgtaaaaatcatgtaatgtctgtaatagttgggttgtcatcgaaaaaactttattatattaaattatagaattaatatccttgcattaggttaagtatctctctatttgtattaattgttcattcatttctttttcgtcattggttcgagcagaatcggtaatctggacttgtgtccagtttggtagcccttggaattggaaaaaatttaaaaaattaaatttaattattagataataattaattacggctccgtccaactggcgcatccatgcctcccactccaattctccaacgccccactgaatgttgcccatgcgttcaaaagtgtgctccattttgccattctcttccggaacggctgttcgattcattccattggctaaaaattcgaaaataatacactaattaattaaagtcgtgaaggtaaatgataaaataaatataccgtatttattgaattagaaccccgcccccctgaaataagccaccctttataggggcggttgaaaatagagccccgggggttctaattcaatnaagatggggtatttgaattttttaataacaatttgacacgaa

SEQ ID NO: 15292 - DNA, 2988 bp, Heterodera glycines
ctgacttttttgtcgcccaaacttttgacaatttctttccgttcttgtacatccgttagaatgcccttaatataaaattttcgcctttttcaaatgttgttgaaaaatctcacacgatattcatggtatgccaccggacccaaaatcattgcttctataaaatttttgaaattatactaattttaaatttttaaatatttaaaaaatttcaattttcatttggccgcaccttggatgatgggcaaaagtccgcatttcattgccgaaactgcggctgcggacgcggtgtgcaagtgcagcacacagttcacgtcatgacgcgccgcatggatggcactgtgcaggacgtagccagcctggttgatgcctgagacaaaatttgtcactataatttgaggcagttaaaagccgaaattttgaaacaatcgaaaaccgataaaagtgaattttctcatgataatgtactaagaatgtagtcccccaaaacaccggttattaacccgagagtctcaagtaactttaaatattatgaaactcgataataaatttgtaagtaaggtaagtggactaaaatcccgaaaatagacttaaaagaaatttccaaactgaggccaaattttcttcaaatgcattaaatttaaataatatgaaaactataatggttaaatgtgataaaaaaaaattattttacaagaaaaaaataaaaaattattaatttttagcggaaaaatgcataaaaatcgaaatttcattgattcaaattaatcaattttggtgaaatttaaaatttaacaaaattctcgggaaaagtaactaaaacattttttgaattctgatctttaggggccacaaaaaagcaatttaactaggtgcccctctaatcaggattttgtgaaaatgccaaaaaatggaatgtaaaatatgtaactaatgctaaaaccctcgctccctccacacagtccatgaaaaaaaaattgaatacccaaaggtgttgatcccggatcaataacgcatccgtcaacactgatcttggcaaatgagctcgcagtgatctcgcgatatagcatgccaagcgggttgatcaggatttcattgtcgctcccaggcagacgaaactttttagtgttttcgcaacttttaaatttcaccaaatattaccgtaatgtgattgtatattgactggctccagcggaaatggtcgatgaggcgataaagagcggccaatttgttacggcattccacctcctccgccgtgtactttttggtgccattcaaatcagcaattggcaccaatggcatttctgttgtgaaatttctcatggaattaaacttttttttttatctgctggcatggtactttactaaaagaaaactactaactaaaaatcagtttttttaattgccaaaaaaatatgagtatttttgataaaaaaatataccgttccgcaccacaaccttattttatgctcgtaccacccttttgcattattcaatttcaaaaaaaaaaaaaaaattaacttaaatctgacggtaatttcgctaaatttaataaatatcttattttaaagtacccccgagtccgttgagtgacaaggaaacgttcatattcgggcgtatacagaagacttctttatattaatttaataataagcaagctaattgaaaaagtaaaatttttctctgtttaatattgttaatgaatcattaattaaactccttgaccatttaaaatgtatattaatgatgacagtgcgattgatgcgctgttattttgattacatttatttgtcattcaccgataagtcatcaaaattatggtaaataaactcattatcactcaattaattacacagagtcactgtgctcgttttgtttgcattaaaaattcattattatatggctaaacagaaaaaataaaagaccaaaatgatggtggtccaaaactgtacttttatttgggtttggaaaataaattaagacaaataattaattctccattcatttataattaagcttaaaaagcagtggtgaacggaaacatgtatttacataaaaaaagagccctgaaaatgaattatattttatggttatttatttattttccttaatatataaaaatcaaaatttaatttaaattttcgaattttcgaattttcactttctcagattcatttattgaacttcttacacttgaaaaataaaagttgcattgatatttttgaaagttgtgcttatttgtcaatatgttaagataataaattgtgtaaatattttttctttctaaatgtacgggcatttttttcaaaatttaaaatttattcgtcaaatttataaattgaaattgctgaatgtttttatacattttttcacatcaattagcacgtaacggactaacagtggcggttgtcgtgcgcttgaacaattttttgtatgcatctccataattactgctgaaaaaataactaaaaaatttaatgtttcatatattcctttataataattaaggagtaattaatataattttagaaaaactttgattgaaatcattaaaacgaatgatgttatgacttaactcaaaaaacaaacaaaaaatttttatttagaactttgcgaaaaagcagccatatttttaattcttaatatcattcgatagtcctaaatgttctctattaatctgccaaatttcaaaaaatttcattaagttttccaaaaatatatggctaaaaatttcgaaaaaaacggaattaaataatttcgactgatcaaatttacttcttcattagaataagtggtccgctagcagaagtctaaattggaatacaagtcaaaattccggcaattatatccagaatggcgcttttattttcaattttgaaagctttagtgaaaataagcataaatgaatccataacattgtcacgggaaactgttgtgatcagccagccgaccaaaatgatcaatgatagcagaaaaacggacttcaacatt

SEQ ID NO: 15293 - DNA, 2931 bp, Heterodera glycines
  unsure (1)..(2931): unsure at all n locations
aatgccaaaaaagtgccataatttttgcgttggatgagcacaaaaattgccagataacaacaggtgctacacaatgaaataatgaatgtgccggcgaagaatttatgcccgacggggccccgaaaaggttcggacagccttccagtggttggactgaaaatattaaaatttaattaattatttaaatttaattgcgccatactttcccgcattttcaaatgcatttgcgagcacataatttaaagaatatgccgcataaattatgcaaattagcagataactgaacagatacacatatttgaactgtaataaaatgtccatgtgtctaaaaacataaaaataaatataaataataaaaattaaaaaaaaacactcatattttttcgaagtataatactttttttattaaataaattctcaatttttattattttttcttaattatttttatgtttaaaattttgagtcaaacctataaactttcctaactttagaggtgaaataacagataaaagtcgatcaaccgcagaacaaagcattgccattaagccacaatttatagcaaaaattgaaggcttaaattttgaaaaatttaaaattaaatttcaaaaattcaaaatttaccgccataattaagtcagcagtgagaacactgacaaaattagtgcccgaaatgacaacaaccaggaaaaaagtgttcccattttggtggaccaattcacaaatacaaatcaatgccatcagaaaattggcggagccgcggagggaactgaaaaatgggaaattaaattaattaaaaatggaaagtttaatttaatttatcatttaaatcattataaataaaataagaaaatgccatgacatttgcctggatttgacagtgaccaccataactgtgccgttcaacagaatgccaaccaacgaaaccaaataaagcgcaatggcgggcacaatcaaatcggccgacggaccggcgaaacgaaaggccaaaaaaagctgaaatcataaagattaaaatggtcttcttttaccttaattaattgattaaaaattatgaattaattaatcacttttaccggatcatttgaactggtgttaattgaagccatttgtgtggcaaagttatgggaaaggttaatgaatatcattatgagaactttttacaaattttagcatatgtagtacaatatcatttttcaaaaaaaaaaaaaaattctttaaacaattttataatgtaaattgtttatttgggtatgatatttaattgtaagcattatgtcattttttaaaattctttattttatgtttccattttttccggcatgaactaaacagtttaaaaaattttagaaaaatttggatattttaattgctgattatgaattttatttgatttattcagttctcctatgatgcgagaaggaagtcggatggagtgtgggacaaatttggaaaaaaagctttatgagaagctcaaaagtggggaaatgcccatagctcagtcggtttgagtattttcccacgctgtaagggaaggccgtgggttcgagtcccaccgggcgattaaacttttatgttttttactcttcattttaaggagtttccaaaaaataaaataaattaaatctctaaattaattaatttttatcaattcttttcccttttgggttttacgcatataatcattttcttattgctgtttgaaagagattataatgcgaaaaaattgagaagaaatcattttatttgagagctgaaaagatgttgcttaaatttcacatcacaatgaaaaaaccatttaattaaacaatttgagcgcaatgctttcgaaagtgtcaaatctaatttggcattggcatttttagggctataattaaccaattataggcattcatcactaaattaatgtaatgtctggccaaataaatgtcctgggcaaataactttaatttatataattttttttagctttctaaccaaaccagagtaatttttaaccttttaggcattttaaaaattggtttaatgtttcttaaatctttgttttttttactatataaagaattcatttgtcagcgagaattttcaggatttatattaaaaaaaacggaacaattatgggccaacagcacttaaactctaattgcacaacgcttggcagataattattacacatttaaatttctgtttgccgcatttaatctgtgaaatggtgtaaactggggaaatgatttttggtgttttaagctaatttttctttcattttatataaaaatatttctttaatcggaatttgttcattttaagtcgttgctattttcaaattaattatgaattaaatgttggataatacccacatttgggacgatcacaaaatattcgttcgcttaatggaactcagaaagtgctttgagaaatgtctttgccgtagaattatgctaaaaatatgttaattgcaaggaaatgccatttttattagcatgccatccccgtaaaacattgtaaatggcacttaaattaaataatatggttaatgaaaaaaaagtttttcgggtaaggcaaaaaccttaaaaacaggacaactcattaagagaataaaataagcaagaacaaatgctactttggtttatcaaaacattaagataaacaaattagaaaaaaaaagaagaaaaaaacattgattttttaaaattatttagaaaaattaaaacagtaatttttcgaatttttaaataaataaattaaggtattttaaatttttaaattattttcattttgtctgagttttatgcattgatgaactctcaggatttaattcaaaaaataataattattaagttattccaataataatttaagttggctcaaacccggcttttctgtatccaaanaggttttatgaatctcagatctttcccattatgacctgca

SEQ ID NO: 15294 - DNA, 5341 bp, Heterodera glycines
gaacatcccaaaatcaacgaatgcccgtcacctgctacaattgcggccgagtcggacacatttctcggaattgtgagtcggaaccaatgcaaaggatgtaccatcaaaatgatgagccgccgaaaagggaaaatttatttattggtgccgtaaatttagaacaccgagtctgaaatagaacaattcttcggaaaaacaacgaatttgtcggaaaagggtagacttttggaagaaagcccggctgttggtaaaattttggcggccaaagtttcgattttcggtcgacatttggaagcaatgttggacggcggatcccaaatttctctgatctcagccaaattcttctcacaaatcatggataaggtaagccaaaaagacgtcatatcccgctttgaaaacaggattatcgccataaatggaaaggaagtgaagtgttttggagttgttgccttacctattcgacgtggaaccttagaaacgaaaatccttatgttcgtcgcacaatcagcttttggatacgatttgcttttcggcacgaatgccttgaaacaattaggctttaaaatgatcgatgaagttagcaacaacatcgtagacttctcacccgcttcaatgctcgagaattctccaatgatcgttttcaaaacatttgttgttgatggccaaaacttggacaagacaccgagaaattttggagggaagagaaagaacacgtcggaatctaaaaacggcactgggaccaagaaaggtaataagggacggcgacaacaaaagcagccagagacggagaagtcatcagttcgaaatgccggagaaagaaggcccttattcaccaaaacatttgtgccccaactgaaacccaaggaaattccaatcaaaaattctgaaaattttggagaaattgaggcgaacaaacagcgagtgagttcggttcaaatgaaagtggcggttccaaacgacaaggcaaagtgcgtatggagaaggaaaaatttgggccagtttcagttagggacaactgaaaatttgggtagggggaaggtgagcccaaaaatggcttcgtcggcaaatgggaggttggatctatgcgatcgccgccctgactcttggtcccaatcgtccttccatcgaggcgatactgacgtcaaatttggccaaagaattttttgtcgcggaggaaagcgccgaaaagaacccgaccgtggaatgttcaaagacggatgctggcacaggcttaactcgcccaccacctatcggatgccgaatgagcataaaaggcaggggacgcctttttcttggagggtcgggatgtgttaatatttgatttttggcgtttaaatttattttaattatattgtcccttcataattttgtctctttgtctgtgattgtactctctcgcctatcgatatttgccactcccttcccagcagaatatgttcccccatcttgccttcagttcattctgttggcagtgcactttcatatttgtattttgttcttattttcctccgactcttctcccattttattgttgcggttttaaataaagtgatttgtctccgtcttggaaatatttgtggaggagaagcagtgtattagcccgacccgaaaagcattatttagcacgtggcgctcctggcgaagagttagctgtgccggcattgtgggatttttgactgctgagtagaagccgattcgagaagcgtccagaacaaacgcattgttgcggttctgcaattttcttcgttgcggacagaacatacgcattgctgcggttctgatatttaacgcattgttgcgattcgtcaattttggtaccactgttaacgcattgctgcgataagtgaggattggcgccgacgtatttaacgcattgttgcgaatttgtggactggaacgccgaattttgtgagtcttggattgccactgcggaagaaatgcaaactgatcgatcgccgtctgaagtcgacgagaacgaaattaggcggcgtcttcttcaagtaatgatgagacaaaatggaaatgcagaattgacgagacacggcgaacaggacattggccgcagagaaaacggaaggccaatctctgatgagacccaacgaccaccaattccgcgaatagcacagccatacgccgactcattgcaaatgccaaatgaattccgagagaatgaccgatctcttcaccctgggcttgtatttgatggcatgatggcgcaggcgattcgaagcctggacggattttcatataccatgactctcaacacaattccgactttggatggcagcaaaggctctgattcagtgaacgcctttttcaagcaatttgatattgcgactgaagaatggcctgaggcaaagcgattgcgggcactgcgttcgaaatgttatggcaaagctgagagagctttcaattccgccgttgctgaaaatcgccatgattatcagctgatcagaagagcgatcatccgacaattggacgacacggacgccaaacaattgacggcgtttgaccaactgatgaaaggagtttggcttcggccgaatgaaggcattgatcagcttggcgaacgtgtttcgcgcttggtccgttgtgcatatccggggctcagcgaacagctctacgacgaatattcggccatgcatttcattagggcactccctaactcagaattggcaatgactttggagatgactcgtaaaccgggtgcaacattcgatgagttcatcgcacaagcagcacgagccgaggcagttcaaaatgccgcacgaaattcttggcgacgcagccaaaataacggtttttcttcgacttattggccaagacatggaacatcccaaaatcaacgaatgcacgtcacctgctacaattgcggccgagtcggacacatttctcggaattgtgcgtcggaaccaatgcaaaggatgtaccatcaaaatgatgaaccgccgaaaagggaaaatttatttattggtgccgtaaatttagaacaccggtctgaaatagaacaattcttcggaaaaacaacgaatttgtcggaaaagggtcgatttttggaagaaagcccggcggttggtaaaattttggcgaccaaagtttcggtgtttggacgtaagttggatgccatgctggacggtggatcccaaatttcactgatttcggccaaatttttctctcaaatcatggataaagttagcaaaaaggatgtgatctcccgctacgaaagttaagtcatcgacataaacggaaagaaagtgaagtgctatggaattgtttctctgccaattgagcgcgggcctttaaacacgaaaattcgtgtattcgtcgcagagtcatcttttgggtacgatttgattttcggcacgaatgccttgaatcaattgggcttaaaaatgctcgatgtagtgaacaacaacatcgtacacttcacaccagcttcaaagcccgaaaattcgcctttaatcgttttcaaaacatttgtgtcccatgacaagatcagatacgatagaaaagatgtgatcaaaagtcaaattgttgttgatggccaaaatttggacaaaacaccgcgaaactttggagggaagagaaaggacgagtcgggcccaaaaaatggcactaagacgaagaaacataataagaaacatcggcaacagaagcacacaactgtggagaaaacgacaattcaaaatgccacagagaatttaggagagcggaagaagcagcgacagcggaaggaaaacggcgaaattgcttgggcgataaagcgcgtttggagacggaaaagtttggaccaatttcagttggggacaactgaaaatttggatagggggaaggtgagcccaaaaatggcttcgtcggcaaatgggaggttggatctatgcgatcgccgccctaactcttggtcccaatcgtccttccatcgaggcgagactgacgtaaaatttggccaaagaattttttgtcgcggaggaaagcgccgaaaagaacccgaccgtggaatgttcaaagacggatgctggcacaggcttaactcgcccaccacctatcggatgccgaatgagcataaaaggcaggggacgcctttttcttggagggtcgggatgtgttaatgtttgattattggcattttatttagtaattattttgtcccttcttaatttttgtctcattgtctgtcattgtagtctctcgtctaatctatattttggcactcccttcccagcagaaaatgttccccccgtcttcccatcagttcattctgttggcagtgcgctttcatatttgtattttgttcttattttcctccgactcttcccccattttattgttgcggttttaaataaagtgatttgtctccgtcttggaaatatttgtggaggagaagcagtgatttagccccgacccaaacagcatttatttagcacgcggcgctcctggcgaagagttagctgtgccggcataatggattttggactgctaaaaaactgatttggagaagcgaccagaacaaaacgcattgctgcggttctgcattcgtcttttgcttctgacagaacaaacgcattgctgcggttctgctttttaacgcattgctgcgaatttcaccgatttcgtcccactgctaacgcattgctgcgagaagtgaggattggtatttaacgcattgttgcgaacgctttgagtttggaatcgccgacttttgtgcgcgtcttcaagaattatgcaaattgttcgaccgccgttgcttagagggatgaccgaacgcaatttcgagcagattcgcagtcggacaaattcatcgattgtccatgaaggaaatgtccaattcgccaacgaaaacaacggaattgaaatggatgaaaatgaaattagacgccttctgcttcaagtcaagatgcgacaagatggaaatgcagaattggcgagacacggcgaacaggacattggccatagagaaaacggaaggccaatctttaatgaggttcaacaaccactaattccgcggacacagccaaatccccactcactgatacagagtggccaccaaattcaccaacgacaaaactgcagccaaaatattgccacaattaaccatcggccaaacggattcgaagacaacgagcgacccgttccaaatccagggcttatatttgacggcatgatggcacaggccattcgaagcctggatggtttttcatacacaatgacgctgaacacaattccgaatttggacggcagtagaggctctgattcggtgaacgcctttttcaagcaatttgatattgcgactgaagaatggcctgaacagaagcgagttcgggcgctgcgttccaaatgtttt

SEQ ID NO: 15295 - DNA, 1236 bp, Heterodera glycines
  unsure (1)..(1236): unsure at all n locations
gtgcgcttggctgttcctaccgcttcttccgctgtcattggcatcggatggttgtgattctgcagacggaaaagcgcgttgtgctccggcacgaacagtcccctcagcgaacaattgtacgcggaacacaagttgcgactgctccatttgcagctgaaattgcgcgcgccgtcctcgcagtacaaatctgagaagaagagaatgaggccaatgaatatgaggcgtttcaaaatggcaaatgttcccagtaaatcgcatggccatgagtttaattttctcttatttgattggtaattaccaatcaaataagagaaaattaaaatgtaattagttaatgattatttcgcgtcttgtgtttacccgtcgccggtgccatgttcgctgccaacgaattcggcatgtactcgttgttcacaatgtggtccgtcaactgcgcgtccgtgtccatctcccacaacacttggccacactccaaacacagtgccccaattgtgccgttgcggaaatggtgccgttggaagagaccgaccgaccaaacgggcgacgaacagagcagcccattgttgcttaaagttggggaaaataaaaaactgaaagaaaattttttaaattggaaaacgaaatctaagccccctccgtttcagtaccaaaaggtcattctccgaataattttgctgatcagcgacggcaaaagagacaacgggtcgacgagagccttctcttaatcaaatgggagaaagtgaaaatgattagcaaaattgagaaaccccacctttcagttcaatgttgacggaaaaatgggacgcgtcgagagaatcggcaggcaaaacggagaacagattgagcggaaaaggaaaagacaatggcaaaagagagatgagggtgtcagagtggtataaagccgccgccttcagcttccagtaaaactgcttgaccagcattccatggtaacaagttgtgtggtggtgctgcgttttcatctgctaaaatgaaagcaattataattggtttttgttgttttgacggctttaccaaaatcatcagcagcaggtccatcatcttcaacatttgcttgtggaactgcggccatcgcggcaacttgggctcgcctatttttcccgaagacctcgagatgatgacgatggtccatttgtttgttaatttcatttaaaaaaaacctgaaaaaaattcagtttctgaaggggagggngtgggtggtcatgaacaaaaatcggt

SEQ ID NO: 15296 - DNA, 1358 bp, Heterodera glycines
tttttgcgattttcataatagaactttttggctaattgtctaatcgctaagcaatagcttgaaaaaagcttctaaacatgttaagctgttgatttgtttttctctatcccttccccacaaacaaatcccaaatcttgtaaaaatttcgttaaggttcaaaaaagttattgtcaatattgtttgaaaacatggttttttgacattctgctggctttaacttttttcgaatcttaaagaaattttttgaaattttacatgctaagaggacacctagggctatcgaatgataccaacaatgtttgatttggttggcaaagaaaaaagttgcagccaaaaacttgtgctcgtacgaaaacggcctggtccgaaaaattctcgaattccccccgcccccccccccatcaccgaggtccttttccctattcgcccatctggcattttgactgataattgcccccatttttcggatatcaaaacagaagttgctgccatttacaccgaaagcattgttctttgccagctttgacctcaatttgttgctgttgttgctttttgagggaccgtcgcttggcccaattgattttgcagccaaagtaatgaattttcaggaacacccttcacgaaaaaaaacaaatttttattgaaaaagccatccagaacgaaaataattttgcaccatttgagttcgctggccgcaaggtcggcacacattgacaaaacggcgaggcctaaaaaaatgaaagaattaaattaaattattttactgaaacgtaaaaatgtattaccaaaagtaacgaacacaaaaatgtagatcagtgtcataagccgagaaatatcggttggcatttcttaaaatggtaaagtgccaaaaaggtaaatcattttattttgcgagatcattcattcaccgctcatcgtaagattggccaccaaattgaaagtgacgaagaagccttcgatgaaattgtggtcactgcccgccgctgcaatgtaaacgacgccgccgagcatacagaaaagcaacagaatggcggcatctacggaaaggggcaaacgacgtttccctgagggaagtggcactaattgctcataaaagccacacaaattaccctcattaaacactgaaaaactgacccttcggctccgttttgcctttttctttttgcattttgtccactccgccgtcgtttcctcctccgtcttcgtctctgtgcttttgccgtcctttcttcttcgatatggccaatgcaaccctattataaaatgagtaaagtaaaattgtccaaacaccagaaatttgtcgtacgaaatgagcaccacgtcggacagaaagcgaccgatgtccaccgcggcgagta

SEQ ID NO: 15297 - DNA, 1753 bp, Heterodera glycines
  unsure (1)..(1753): unsure at all n locations
aattgtggagggataaaatgaaaatgaacaaagtttgacccttttaagcgtaatgnaatgaatgaacccagcgggggaagcctaaagaaacaatgacaagacaaacaaaggcataattcaattcaagaaataattaaatttgatgaaatcagtcaattagtgagtgagtgagtgactcgactgatttgatccgctgaaggaagcggaagaattggaatttggaaaatgagagaagcattcggatttaaaaaaataataaaaaacaaagaatgaatgaatggtcatggatggatgaaatgccaaaatgtttagtccagtgcagggctgcacgcaattacggattacggatttccgtaattgcaaatccagttgcgtgcagccctggtccagtgccaaagatttggtcccaagagggacaaaaggccgaaaatgcaggcagacggatggatgaatataattattagtagaattgtgagtggagtcgagaaaaatgcatcggcatttttttttttggaattggcatcgaatttaccccaacattagtccatacattatgaactacaaaatttcaaaagcaacaaaataaatgaggatgcattgtaaatgaattcgacagatcgttacttaatttattagctgacaaaaattttgaaaaaaaagttggcataattgaaagctcttaatgagggctcaagccaataaatttttgtctggcattataggcaattaaaaattttattcataaatttgaactttgataaggacaaaattcgtcgagagaaggagagaattgggacgataaaaacaaataggaaaaaccaattaaacaattttaattgtccctccaatgccccgagccgagcaatgtgttcagatggatttgggcgggggatcggcgacaaattaagccaataattaccctaaacggctcaaaaaatactgaaaatggatacggaggcgcaacgggggacccgttttctcattgaagcgcgatggtcacacacaaagcaaatgtgtcggagggagggagggtctggcgaagacgagaagacacaaaacggacaacaacaatcaatcattaaattgtaccgcgatcaatcggttggcgaggggggggggggggagaagtccattgtttagggactgactctgatcagtcgtcatacaaatcgccgatcaattgaagagccattgtttagattttttaactccgatcagtcatacaaatcgccgatcaatcggtcggcggaagggtccattgttttgcgattgactaactccgatcagtcataatcctcattaattatgtgccgatcaaccagtcgattagggaggggtccattgttttgagagtccgatcagtcccctccccgccgccccgcccccaaaaaaatgagggagggtaaaaaacgggttgtttctctgtccgtttgtgggtgtgtcaatgttgctgggcccacccaccttgcattttctccgccatgttctgctgtaatgtgtccgacatattctcgaactgaaaacaattttattttttcatttttgcagaaatttttcaattttagattttttcatggataaaaaaataatttgttttttcttaaaaatcttacaatgcgtggaatgaaaaaaactagaattcgagaggatttccaaaaatgccgggccgggctgacttttccagaagtaaccgggttccgggcccggcctctcaaaacccggtcaacccggattttccaaaaatcgccgggcc

SEQ ID NO: 15298 - DNA, 2082 bp, Heterodera glycines
ggagacaacttttgggtgggcaaattgtggggagataagctcccataattattttggtataaatacaaattcatttgcgcccattttgggcggggaaaatcgccaaaaacgaagagccacccgttattttttaagcagttttaatttttaaaaaatgaaaaacactaaagcaaacttagaaaccttttggagggagcaaaattcgcaaaaaaaaaacaaagattttttttcactttttcggaaaaattttaacaaaagtctggcagtgcgaggaagctccgctgcgctatgagaatttttttttaatttaactaaatttattttgaaattgccctcccctttgcccaattttctcataaaattttgtgcccccaaccccacccccaatctgtcggtttatggggcacctggcaaggcaatttttttttatggagggcaaaaatttagaaaaaaaaatgctaaattaaaaaaatgaatcacttttcgacgagggaaaaaaggttctacgaaacggagaaggaattgaatgcgaaaacagaattaattttgtcgccgagtgaatgagtgatttgagtgagtgagggaggaaagggatggagcggtgcagcaaaagacggacacttccgcagaggtcaaaactcaaaaaaaaaccggctcaaactcatgctgctgctggtgcactacaaagcccgaaaaaggagggaatgggcgggtgttgtggtgattgttttggtgaaaactcattttgacaaccaattttatttaaaaaaaaatcggggaaaaatttttcaaattttttttggcacttttatagagacggggtcgacaaaaaaaccagagagggatcgaaaactaaggggggggggaccctgttgaaattttttttttaaatttttggcacttttatagagtaggagggttgacaaaaaaaatcaaatagaggccaaaaaccaaggtgtgacccttttgaaattttttttaaagatatgtaatgagaattagatacatttttaaggttgctgatacctattttggtcatttttattttctaaaaaaaattttttttgagaaaaaatggcataaaaaattaaaagtgctggctgttaatacattacagatgtataataaatttgaaagcgcgtgtgaacgaatttgaattcattgtcagctcaaatcccccacccagtgtaatgtttcctttttttcccatgggaaaatgcatttttgcacaaaaaatgggtagacttaattttaaaaaatttaaaaatacataacgccaagccaaatttaaattaaatttgaaaattttttttttaaatgctgtatttttctagccatgcttcttcttcagcgtaataatatcggaataattaaattaattgttgtaataaacaattgccagactaccccgcataatgaatgataattatgataattagggaggaattgggcggctgaccctaattgattttttgatttttcgtcgagagttacataaactgacaaaatgatattggaagaagcgaccaacaatcgtaaaagcaccaccacaaacactcacccgcattgttatcagctggagcaccatttttacgcgagataataaataaataaattttatttattgttttttagcaattaattttaatttatggtcggtccgtcgctcgctgaaatgtaatcgatccctcgttggtctgttcaattgtctgtggtggacacagcaacaaattagtatatacataatgtacaaattacaaattatacatatttacataataacacagtttttaaaatggtggcaattatgcaattagcaagggcgtagccagacccttggctttggggggggggctgaagtaaaaaattcgatttttaggggtgtatttttggttttttgaaatccctaattatggggtgtattttacaaaatttttcgccgtttttcgccaaaaaattaatattttttgccatttttgtctccatttttcaaaaatatggtaaaatgggggtccggcgcgccgggaaaattttttgagtattttaatgcaattttgttaagaaaattgcttaaaatttcaa

SEQ ID NO: 15299 - DNA, 3348 bp, Heterodera glycines
  unsure (1)..(3348): unsure at all n locations
attttgcaggatttgcacttgcaataaaacaattaaacctccagagacnctttcgggncgnaaattttgtgtnnactgacctttataagatnaatcttnagttngtnaanattnaatggnactttgncaactgcttgggccgcgtccgtgtggaaatgcacattctttttgcggcacaattcgcctgggtttggaagaaaaaggcattaaaagaccaatgcttttttaaattaggaacgctaaaaaaatttttaaaaatgggaccaatttttgactgtatcccctgaattcgagtccagggatgaccagcgtttttcagctcctctttaagtgtggcccaattcagacaatacgaagcatttgtatactgtcggagttaagtacctatttttgtttttgttcaacatttccccaaaagttgtaaaaaaattttcaataaaaatgaatcaaatttaacatagaccaactgaaaattgcttttcccataaaaaaataaaataaacatccttttaagctttttttatcagaagaaagcattttaaagatctataaaactatagggcattttcgaattaaaaagtagggaaggggaagcggagaaaatgtttaaacttttttttggaaaaaacagtaattcgtgcataaaattctaaaaaacgctgaaaaattttcaaattaaaaagctttaccaatttccttgagcggttgccgcacgccaatttcgttgttcaccgccatgatggagacgagcgatgtttcggggcgaatggcctgctcgagcacctccaaactgatcagtccgttgttctgcaccggaatgtacgtaacgtggaagtcgccctcgtgctcaaggaaacggcacgagtccaacacgcacttgtgctcctgcaaaataccaagtgatcaatcggcaaattttttgccattttttcactcattttttctatcaattggcaaaaacctcattttctaatattattaggcgcagtgcacgaacaaataggattttgaacggattttttgcccaaaaatgaccaattctgcgcattttttggatcgaattaaaaaaatatatcaagaaattttagagtccagcggtgccgacttgcattaacttattcaaacttattaataaaatgaataaaatattcaacaaatgcgtatttcttggtgtgtacttcattttcacggcccctgagtttttttaaaccacttatgttagaaatttttcaaaaaaaaaaatcttagaaagtttttaagaaaatttcaaaaatgctttttagcgatttcttggtaaaacagtttgttagtaattgattataaaaattttcaaaaatcgccagagaatttcttagaaaaatttcaaaatttatcgaaaaatttcaagggtctggaaatctaaaaatttttttctggcggatgacctgctccgatttattgtcctcccccttccctccccccactgaccgtctgtgcggtgatcacatggtttttgttggccactttgtagaagcgtgccacgcccttcaccgcaatgttgttggactcggtggcgcccgaagtgaacacaatttcgcgcgggtccgccccgatcagttcggccacctgttgtcgcgcgtgttccaccgccttttccgtctcccaaccgtaggcatgctaatggggggggggggggtggtacaattaaaggctgatatgttgtacggcataataaaaagcgtgcaatacgtctccccgaaccgattttttaaattttgaaaattttttcaaaaatgaattttttttttgaaaaataatggaaagaaaaattcggggagagcgacgaactgctctcaaataataaaaattcactcactgtccgactgtgcgggttgccaaagtcgttcaactgatagggcaacatggcgtccaccacccgtgggtcctggcgaaaaaatcagggcataattcggtgatagatagccagaaattgcttgtcaacaacaacacgacggccaatcatttatatagtttttaaacctcgaggacaaattgtccaaaaaattagtgaccaattccatcaaatcgccttcctcacccagggtccgattttttttaaatcaaggaagcaaaaaatgaagcaattttcctacgtttgccatcgaacccctttcaaagaaagagacaaaacaatttttggttcaagcaattatacaaaaacgtttgtttttaatagggcgcttgaacggcatcccctcggattacaggaaaaactgtcgaaaaaataaaaccgaaggcgtagatagagatgctggccattttttaaatttcggcaggaccacagtcccgaaaagttattaatagttgtcacattgactcctcccccgtccgcctcaccatcggtgtggtcgcctgcacgtccatgtacaagggacgggcggtggcggcactgctggcatgacgacaactcgccgcaatctccgagggcgtccaatggcaccgcaaaaacagctgtgacaaacgacgcatgagaagagagccgtccgtcggctttcagatatccaaatttaattaaaaccgcgctggcaaaacaaacaattcaaattgaaacaaaaaatggtggcataaatttcaaatatgtatgagaaacggaaaccgaaatggcacaaaaaatggtggaaaatgcgtgtggtgttttttccttacattttatttttctcattgacttttaaactttcaacgcgcaaataaaactataatatttggtgttgttgttgcaaataatgtgtaactgaaaaaaatgggtggtttctgtgggcgaaaaaaatcataaaaagagaaaaagtacaacggaacaaacggagggagagggactggggtgggggaggagacacaacagagaaacagagaggggcagagagagagaaggcggcaattgtgccgaagacgacaaaagcaaaacaaaacaaaaaaaaacagggggaagcaaacaaaatgtgtgacaaacgatggaatataatattgatggagagagaacacagcacagagggggagagggtaaccagtaaacagaagcagcgagtccagggaattttcccaaattttatggaaaaaatttaaatggaagagggattttgtggctaataaaatccaatttcgcgttttcatttcatagagctcgcacaatttggctaaccatggatttttactgaaaacccaggccaaggttttttcaaaatttattaataaattggaaattacaaatgtgtgtcagccagggatgggccaaattgaaaaataaaaagcgaaatgcgaaaagcgaaactgaaaaatgcgaaatgaaaaaaaagcgaaatgcgaaaagctaaa

SEQ ID NO: 15300 - DNA, 3279 bp, Heterodera glycines
ggggacctctagagtcataaaaagtgggccttttattctcctaaacctaacccataaattaactcgagtagttctttcaagtgacaagggtcgtagttaattatcattaaaaaatggtttaaattgattaagcctttcaccagaaattttccaaaatattgatccgggagttgcgtgccatctgcaaaaaaatttcggcacatttttggctattaaaacttattatgtagcaatattccctaatctgttatatgcacattttgaatatatttttgtcatttttggttgcatttaaaaaaaaattattcaaataaataagtgggacgttacttaggtatttgtcaccctgtactttgaaattggaggatcaatttcgtaaaattttgggcaaaaaatcgaaaaagacaggtaaatattggaaaattactaaattggaaaaagcaaaatttttgtgccaaaaactcaaaacctttacgttattgaattgtatttcgttgaaattttacgaaatttattttattttttccaatttgtaaatttttcttaagaaatagatttcgtttttcaatttattaaatttttacagacttggatttgtaaattttcaaacctatagatattttttatgaaatttgttcaaataaattcatgaaatatttaaaaatcgcaagtttgctcatttttctggtgtaaatctgttaactattgcaatcaaatttcgctgaacagtagtgatcactagggctgtgaattttagtgacaaaaaatccctaactaaaatagtgagtaaaaatgttaaaatagtgacaaaatagtggcaaaaagtccgaaatagtgacgaatagtgacaaattttcagccaaaaattgagcaaaaataatttttattcactgattgcagttgcaaatgagtaggactgggatttttaagaccaaaaaacccaaaatagttacctaaaaaaatttttaaaattaaaaatttttgccaagaaatttttgatttcataggagtatattttgaaaaattttagctcgattcttaggggtgtattttttggttttattgcatttttgttaaggaattttccaaaaaatgtcgaaatagtgaaaaaatagtgacaaaacgccaaaatagtgatttttaactattttagtgacgaagtcgccaaaatagtgatttctagtgaccgatagtgacatcagaatcgaaaatttttaatgcagaaatgcgttttttgagctcctttcttcaaatcaatcgagcaaaaaatttagttaaaacctaaaattcacagccctagttattactagggatcggattcttagttttttaactatttgctcatttttctggtgtaaatctgttaacgattgcaatcaaatttcgctgaacagtagtgatcacgaatattgcgctatttgaaacccagcaggacccgaattcgaacaaacagtcaaaaatacgaattttcaaagttcaatgttttaccaaactgtatgcatttttctgtgtattgtaatactgtattttagcccgaaaaaactctaaaaagcattctcaaacataatggctaatttgctatacattcgcatgaaagccaacgactgtccgttgatcgcttttatccgatccggtgggtgggttttccattgttgaagaagtgctgggttcagtttacaaaaatgcattttgtaaatatgttgttgggtatactgtcggacctactgtatgccggcaaaaaccatagccaggaaaaacatttcggaggggggaccatagatttttttcaaaaatgtcagcacaggagaagcaaaaaaaaaaaaacagggatttgtagtcttttcgtcaaaaaaaaagtgattaatttttgcggttttggtgtcaaaatttcagaaaataaagtaaaatcggcgttgccgataggcgccgcctggaaaaaatttttattttaaatttaatgcattttttatggaaattttgggaggggattagtccccccggcccagggtcagccaccggtcggtctctttgtttttatttttattttccccgctacatattttacaggttgtaccacctcattcatctccgagtcgttcgcccggaaggccaaccttttgggcaacattgaccgttccaattgcgagacaattcccatacctggcaaagtgcttggctggtgagtggtggccaaaaaaaacaaaagttttatgatgcactactacgttttttcaaaaattttccctaaaaatcgctggaaaattttcaaataatttttttttcttgaatttttcatatggaaaagacatttgcgcctttgtccaaagtcgggttcaaattttctttttttcaagccatgatagcctaaacagctttaagcgatagaaagtgattataaaaattaacgttgaatggcgcaaatattggggctcttatttttaagtttttcaaacaaaaaaaatttttttcgaaggcatggcttaaaaaattgggcaattaattctcttattttttgacttaatttctttgcatgttttgcagggccaacgatgttcaaattcgaattgatgagctcaatttgcaatttgtgcaccgtttgggggtgatggcggacaaacatttgccaatgtatgtttggcgtttttttaattttattaaaatcaataattaaaaaatgcccttttttattttttgtttttgaaattcattttttaagatattgcaagaagaagttcgacatgctgtaagttcagacaacaattaatgaatttaacccccaaatttttttttcattttttaattttccaagatttttttttgaaaatttaatgtttttaagacgttttagctcgtcacttcgccatgtctctctcgatgacggcattctccctgaatttccggtcgatgacagtgccatggcgtcggatggccaagcagtggccaaatggctgttcacgcctcatccagacaatgtgccgaactttctctactgcgatgtgaatttgtcgatggatcaatggtggtcaacaatggaacagttcaaagcggtgtggttttcacgcggtgtttttaattcaattttctgtgtattttttgtcccattttcaggcattttccaatgcttcttctccgattgctttccgcattttggttcactttcagccgtcttttccgattgactctattgtgccatttgatcggatcaacgaagtgactggggagaaattggcactggaacaatatggaactaaaatattttctgctcagccgttgtccaat

SEQ ID NO: 15301 - DNA, 5634 bp, Heterodera glycines
ataaggaaaagccggaggaagcgcaaggggagcagaaggaagagaaggagacccaacgggagaaggagaagcagttgggagagaaggaaatgcaaattgatgaattaattgtgttagaaagcgatgatgaagagaaggaaaagcaaggggaagagagggagatgccggaggaagagagcgcaatgcaagggaaggtgaaggaaaaacaagcggaagagaaggagacacaaggggaaaaggagaagcagcaggaagaaaaggaaacgcaagtggaggagaagaaaatgcagttggatgaggaggaaaagcagcaggaagagaaggaaaagaagcagacagagaaggatgttgaagaaataattatgttggacagcaacgatgatgaagaaatagaaaaggaaggggaagacaaggaaaggcaagaggaagagaaggagacgcaaggagaggagaaggaaaagcgagaggaagagaaggtaacgcaaggcgaggagaaggaaaagcgagaggaagagaaggtaacgcaaggcgaggagaaggaaaagcgagcggaagagaaggagaagcaatcggaagaggaggaaaaaacggataaaatggaaaagcagcaggaagagaaggaaatgcaagttgaagaagtaattatgttggatagcaacgacgatgaagcgatgaaaaagcaaggggaggaaaaggagaagcagttgggagatgaggataagacggaggaagacaaggaaacgcaaggggatgagaagaaaaagcaattagaaaatgacgaaaagcgggacaaagagaaggaaacgcaattggaagataagcaaaagccggaggaggagaaggaaacgcaaggagaggagaaggaaaaggaaaaataattttgttttactgattcatggaattttgatttttcatctgattttttttttcaaaataaaaggtattgtaatttatttataaataagagataattataatttcaaaaaataattcatttaatatttcaaaatttattgtctttcatttccttcaacgtgattcgaactgtcattgtctttgtccaattgttcccgtgctttaatcagttggtcacaaattgagttcaattcggcattctctttgttctaaacttgaaaaatattgtaaaaaaacagctgctcttgaccaatcaatgcatatatgtcgagactgacttttaattccaacgccgtttcaagcgacccaatccgaatttgtgcccttttcaatgccattcgaattgacagtgttttttgctcgtgctccgtctcggcatttctcagttcagcattcgcgctcaaaattttaatgtggcaattattaataccttagctatttttttattcgaaatattttttcaaattaaaaaaaaaattataatatagacaaaaaaatgtacttccttttttcggttgttttctcacataataaatttacaggcttttatgagatttttaaaatttttgaccctcaatttgtgggaacttgtgtcccaatgcccgtatttcgggatttttgctcacacggattcttttttgcgattttatatatccattaattgacagcagccctatttttcaattgaattcatgcgcgtactctttcaactttttctgcgcttcaaccaacaattccatgtacattttatgcaatgcgccgtattttctctccgcctgttccaattgggtgttaagcgattgttgaacctgaaaaaataaaatgcttaattttaatggatatgaatcccggaaatctgaaatttgcagatcccactggacgggatgggaattcaacaaattttcgtgatggaatcccgcgggattaatcccaaaaacttatagaggaccgagatcccgaaaaatcccgcaccggactcaaaatcgaggagcacctccttcaaatcgacgcagttcagtctcattttctcgtacaatttgaacaaattggaatagttgtcctccagcgaattaatctaaacattggatgtgctgtttgaattttggggggcatttgggtcgaaattgaaatcgtaaatccccgactttgctatattccggattttgtacttcccttttaaacacaaaaaggccgaaattttcgttgccgaactcgaagtttcgcctgtccctgatcccacttgcgtttttgtccatttaattaaaattggccacatttgtcttttttaaacttttgcttttttaaaataaataaaacacattcctttggcaaaaaagttgaagtcgaattaatgggtttggatactaatgagtccatgcttatttgttagcttatgaactgaatgaagtgccaacaacctctccattaagcgcgtaattttcccgcactaatttggactcagtttcgctgtgatttgccgaatttgtcaaatcttcatcattcgcgcacagtggcgaattcgggaattgcaaatgctgtcgaatggaatcggccgaacggtcgttgagtatggcatcaatatctgatcagtggggcagggagaggggtggcaatttttgacaacaaaatgcgcaaatagaaaaagtaaattatgcataattaattaaatgaaaatataaaaataattacgcataattaattaaaaataattatgaatattcatctttggaataaatatttatatttggttagaatttttgaaattattattgtttttaatttaacgaggaaatgatggagaaaaaatatatttttttaaattataaactgaacaattccatttcggcccatattttgaacagttccgttgctttttcactgttttgatttgctacattcaattttaattcaaaaaattgacgttccattaatttgtctttctcatacttaattaaaaaaataaaaattaatattaaaaaaaatattatttttattaattttttaaaaattaattttcccctaaaaatttgattaccttttcgaccaattcattccattgtttggccttctgattggccaactccaaaatttgttctgaaatttcatcggccaccaaattttcacgcaaaatgcgttcaaattcaacaaaatctgggcaattctctatgaatttgccattttttgaatgccttaaataattaatttaattaatttaaaaaaattaaatttacaaatttttctccacattttgatcgatcatttggctattgttcggcggcacagtcaatgcttcaggcaatagtattggccttcgcacgcttttcttcgtgatgattattgtacgattcattaagctatatataaaatgaacaaaatatttaaaatcaattcaaattaaatttaaaataattttaaatccacaaatttgaaaaaaaaaacatacgattgccgtggattcagtgcagttgtttccattttggtgactcaaaaaatgaattaattcttcaaaaaatagcggagaattttggttgtacgggaaaatcaatttggatgggcctgaaaattgtgaggttggccttattggcagcaatttaatattaatacatttttggggcatcacaaggggaagagggcttttgacaaaatgaatggagaaaataaaaaaaacggaataattaaagagcgattttttgttgggacaaaattaatttaaaatatttttaaaagaaaaacattttagcacccacccctccccccaagactcccgcccacccacaaataagagaaaaatagatttattgttgaaaaatttggatttttcgagttcgtatcccgtctaaggtgaaacatatggacaagttagagtggatttatgaatttttcaaagattttttttaaatgcggaaaacattttgaccgcccaagagaaagttgcactaccccctccaaatcccaaatcctcggactgtccatgcccccaccccctccaaatcccaaatcctcggactgttcatgcccccaccacctccaaatcccaaatcctcggactgtccatgcccccaccccctccaaatcccaaatcctcggactgtccctgcccctatcccctaaatcccaaattctaggaccgcctcactacccctaccaaatcccaaatcctcggactgtccctgcccctatcccctccaaatcccaaattctagaaccgccgtccccataaactaggcgcgtggcggggggggggggggggtaattaggggaataatcgaaggattggaacaataaattattctcttttgtgtatttatttgtttatttattatggtggtggctgtggtggtcatcgggtggtgagccgactagcccaatgtcaacacaaattattatttatatgaatggtaatgggcaaggcaattagtgacgcgcctttcccaccgcccatttgtggtgagtgacagcgggagtggccatggatacgccttttaagttctgctgctgggccgcggaccattctgtggtgaggagtgaaaatgcataaaatgggaaaacaaattttctcctcatttggtccaatccataaaagatgaaggctttgaaagtcgagattttcctatggaaaatttcaattttaatgcgaaagtcgagattttcctcttatgggccagggaaaatttaatttgatgcaaaacttgtcgaggttttcctcttacaggcatcggaaaatttcaattttaatgcgattttcctcttatgggccatgtaaaatttataagagctattgaaaatttcaatttaagccaaaatcttcgaagttttcctcttacagactttctatttattgtgataatttccaaaatcagcacttaattatacgggaaaatcaaacaacaatttatccttgcatatgagtgccatcttctgatcattccgctcgttcaaggcaaaaattaacatcagggccctgtagagattttgcgggaaaaatgcctatttattaccattttgagcaaaataaaccgggaaagtgcccccggcaaaacgggtgattttatcacggattctccagaatttgctttaaaatttacagcattaggcttgttaaggttgggaaaatgagggggaacacaaaattggggaacccttgaggcgagggggtaatttaaataggggttggcagcgcattggcgggatatgttgggatcggattggatgggatgggatgacctcgtcatcggcgtcccattgtaagccgaccccaaaaatatcagtcgcaaaatgtccccgaaatatatgcgccgccgcgcattttgaagtgctaaaacaaatagtacatatatacaacaagcaaactgtgtacagattccgaatggatctaagctttacgggggagggattattatatttttttgcaaaatgtaaaatttaatttcaaattttttaaattataaaatttaaatttcaacttttaaaatttccgctttattggttaatttttatttaaaaaagaggttaaaatggtggtggttacttctagtaatgagagattaaaccattgtgttggggtaatcaaggtcatatatttaacaaaagattattatgaataaaagattatggcttttatcagtgtagcaacggtggttcagtggtagaatgctcgcctgccacgcgggcggcccgggttcgattcccggccgttgcaacttctttttgctttatttt

SEQ ID NO: 15302 - DNA, 3965 bp, Heterodera glycines
ggttatactttaaaagatggaagtggtcgtgaatgtatgaatgtaaattttaatttaaaaataataaataaaatgataattaaaatattaattaataatttaaaaaatcaaaaaatttgttcagataaggagtacctcaaactttttttccccatcaaattttcgtttggcgaccgcgaaatttcaattgatttggaaaactttaacaatgaatttttgtttcgaaaaattggtgaaatgtggtccatgccaaatttggatgagatttgtttttttggtatgaaagaactgataaaaaaccacataaatcagccttcctttcagatttaaatcgaacaaaaagacgccacactcgatcgggacaaattgaaatatttttattttatctgtcaaaaaatggaattgcctgtttcactgaattcttgttgattgctattttttctcgttagcccttgagaaaggcgaataaatttaaataaaaatttcattgaaaataggttaaataatatttgtatatgaaaattggttgaataaaatagaatttaaaaaattaaaaaaaataataattgttattgataataataaataatttataatgtaaaaaaaagacaaaaatggtagaacataaaataaaaatcaaaaatcaaaaaaaacgaagaactgtgtatacagaaagtatttctatgtgtgaattttcaataaaaaggtttctttttaaaagagggttttttatataacgccctttttgacggttttttatataacgcccaaaacacaaggaaaaatcaataaaaacacaaaaaaaaccatttgaggattttttatataacgccctttttgagggtttttatataacgactcagcacccatatttttctaattgtattcattactttgttttccgctataagtgcaactatgttgccttgcggtttgttcaaataaataaaaataaataaataagtctgaattttagagaaatttagtcagaagaccagaaaattgaaaataacattaaaataaaataatttacaatgccgtcaacatccatggcacgctgtgacttcatgtcgacaccatcgacatcaaaaagcgccttcgcctttggtctcgatgatggtgagagaaattcaaacaaaaatttagttttttgtcatttcattttcataattttagtccatatgttcgacgagctgcggcggcgccacatttggaccgaggaggaactgcaacgacagcgccggtcaaacgccttcctccggaaacagctcaaggcccagcgcgaccggtcgacgagcctcgagcgttcgtcttcagcatgccgccagcggagagtcctttccgacgtgaccaccaacccgcaggaggacaaaaggctgagcgcggcgaatgatttgctcatcacattggatgcaggcatttcgttcaaagcccgtgaagcgtgaaagcggtcattcaccgaccacggacttgacgtttgagcaccgacgagagcggtgaagcgtctgaaggcggagctgttcgaggttttttgatcaggtggcgacatctacaaaatcctcgaccacgaaaacttcgcttcattcaccgtcccaattccacccggaccattgaaattcttgctaatcgatgctatgaatgatctgcgcaacattttcgtttgtctcgtgccaaaattcttcagcccagtgacctcaaattgacgccgctcgttacccagtccgcccaaagcttcattctcgctgctcacgtcgttccatttgcacgcactcatctctggtggggactgatcagtgaacagggaatggagcatatgcacagaatgtgcaacaatttggtttaatgaataatttttcccattaaaattataaatccaggtcggtcgttatgctcatctcggcactccagagaaggttgttgagaagttggtgaaacacgtgacactgctgaatgcccttcacgatcgaggtgtcgaaaaaaatcaagaaaatggaaacaaatacccaaacttttgatcaaaatttcatttttccaaacattttcaccatttcacatttccactatctgaatattatgttgaacacatcttttccgctttctataataaatgcgctatttggcgttatgagcaattttgtctgacactggcgcgtacccatagtgctgttattgacttttcctctccccctttctcagtcacacactatttcaattgtctctctctctgcctatctattccaaatttctcggaccccacgtctttataagtgtgccaattccctcactcatggctctccgctccattcattctcattcaacatcagagaaatgaaagcaaaaatattctattataaaatcaaagcaataaaaccctacattttttacatagttttccttgatttgaattcccagtaaaaataccggaaattaaaaaatttaaggttaaataaaacaaattgttcttattaacccattcaaatggcattcttaatcaatatatataaaacatgcggagccatcattccattgacatagttctaaaagaaaaatgcgttcctcaccaaataatcattttcactcattcgatattttgcaaaaatccaaaatgtacaaattagtcaaaaatacgaaatatattcctaaacatgtataaaatccacaataattctcaaatagcaaaaaaattaaaatttaaaacatttcaataaattcaaaacaaaaattaaaaaaaatgtataaacaaataatttaatttatttaattacaaatatgtttgacacaaaacaaaaagatacattcgtgtttgactttaatttattataaaaaaaagaaaagcctattaaaacaaaataatgtaaaattttaatgcacataattaaattaattcgtgtcattagtagtaattttgttgaataaaatttaaaaaattgttaataaataagaattgttttaaaaaattactgaaacaaataaaaaattaattttttgaaagcacaaaatgatacgacaaacaactgaaccgccctcaagaagaacactctgaaagaataataagttgtggagaaaaaatttccataaacacaaaaaacacttaaaaaatagcttaaaataaaataaaatacgtaaagatagatttataacaaatttaaatatctataaagaatagaacgcataaatgaagaaataaatcctttaaaaacaaaaaataaaaatattattttcggaataataaaataaatttaaaaaattatttaaattggaatatataaataattcttaagttatcataaaataaaatgaataaaccgcaaaattccggccatcataaatattttacagtaaataacaaaacaagtataatatttctaactaattgctttatgcatttcaaattattttagcaaaaaaagataattaataaatagtaaataacaagtgaatgatgcttcgtttattgaattatgaaaatagcggaatgaataaataaactgaatattaatgttaatataaatccaaatcaattcttccaaatatggaatatttcgtcggaaaattctgcgactcaaaaccatcaaagtttttgaagtaaaaaaattaacgagaaaatatttttaatgcaaaaacttatttgaaaaattataaactaaattaaataaaaaatcacagccaaaaaatttccgctaatcttacagacaattatatgttaaaataattaattaattattatgcatttgtgtgagtgtgaataccctcggagcgatttcaaaaaactaattaaaaaaactcattcagttttgaaaataatataatgaaatttattattcatatttaatttcaaaaacacatttatttaaaaatgaaaaaaatataataatttttagattcgtgataaaataaattagttttataattaaatcataaaatatgagatgaatagcattaaacaggaaaatgttaaagaaaaa

SEQ ID NO: 15303 - DNA, 4445 bp, Heterodera glycines
aaaattttaccctcatcgacctatcaaaaaaccacaaaatgaggctaaagcctcagatatgggacccctgggtatgtagaagaagagggtaaaacgaaaaggagggaggaagaggtgaagggggctgtgaacttaaatacatcacggttctcgctgtaagttaacggctcaagcgtcctctttgttgagcgacgcaagtgtcgcgccccaaatggtgcggcgcagatgtctgcggcgcaaaagtcggctatccgatttggtgaaggttttagtgtatataaaatgcgtatttatgggtttcaagaagaggtgcatattttgccatcttttacatttttagagcatatttcagcatattctttggaaattctcagatagaaaaatggaaaaaagtcgaaaaaatacttccatatgaaatgccttttttcgtacatatttcattttttaactttttttgagactttttttgagaattatagaaacttcttatgaaaaattgaaaaatatctttttttgataaggtacgcttaaaatggattctttttttaaatgagatatcaaaaatttttaagcatcgaaaacgttgatttaagatatcttaggttcgtcatcgcattcttagtcaaagaatcgtgaaaggccaggagttcgatataaaatcagtgctgcacctcctaagggaggaaattgtgccatcggaaattaagtgaagtattcttgaaaatcaccccacccccattaagagctattaaaattttgcaccaaaaatatacttgataacaaacttggtcttcaaaaatatgcttagtttaaatacctagatgcgagatccgtgatccggcacctctaatcagcaggaacaatttccattactagatcaaaccgaaagagttcaccttttggttttcaataaaattcaaactcggcctatttttaaaaagcgccattttcttttaataagagaaatggcctgtacaaattcacctctttcccgttgtaaacttttgataattgttgaatttccgcaaatcgattgcgcaaaatgttggacgtgccaataatgtcctcattttgttttgctgctttttaaaaaaagccatgttttattgcttatgagggtttaaaacaacaatgcttaactactgctgatgttcgctatttctctaaaaaaataattttgaacagttctctttcataaaaacatacattttcccggcggaaagggcggatgccgtcgtctgaaaattaaaaaaattcgaccaaagtaagacatttctccattttatacacagatagcctcgagcaaacacacttaagaactatggttattacaatatttttgaagattttgtccatatttttgttcttttcgaaattcaatttttttttttgtttttaaaaatacatttttggccaacatccactcaaataaaaaaacaatttatgaaaatgccaaaaaatggataataaacaaaaaaaattcggaatttaaaagttggttagataaattaagactagtttcaacaaaataaatcattttaatcatcatcagatcccccaaaaaatatctgtttgttcaccattctctcatccaataaaaaaggcattctcagagacaaaaatcttcacttctttcgcctgtcaaaacctcactgatcgatcacatgatcagttagtactttatcattcattttatccagccatttgggtggcagcaatagccgtttttccacaccatcaagcatttgaaattttgtttcacccctttggaaatgagtcgatgatgacgaagttgaaaagttgatgatgggcctgctgctggtttcgtgcggcttgaacacggccaatttctttggtgccggccgcttaaaaactgaagatgataatgataatggaccgtcagcttttcctccctttttgttgtttgtgcttgctgctgcatttcctgttgtttcttgaacaattttactgaattcttgttgctcaacatggataactggtggctcattctggtaaattactgttggtggtgccgaatttgtcgattgtgatgccgtttgattgttttggttcttgtcattgtccttcaccgcttcacaaattatggaaaaaaacgcgcaaagcagcaaaaaagggacaacaacagtgaattgttgtggcttcgtcatagaatttttttaggattttttttggaaaatactgaatttctattaaattgatcagccttaaaatataaatggttttttattattattgatgctgtttggacatggctagacgtaagtattaaaaaggattgtggattatgactctttttgactccacataatgaaggatctcaagaattttaagataaaatcttatcttacgatgccaaaggttccataatttagtggatttaagaaatgttatggcaatattcgattgaaaaagcctagtgtttagagatatttcctgccaatattgagaaatataaatttttttaatttcttttccataaaaatatgatggttttgggcagcaatttctttttatgctattaatttgccatctttttacaacgcagcatattgattacgtaatgacaaggcattaaatttgcagttttcgaaaggtttttagcccgcttttcatgcgttatacgaaaagtgtttttgtttttgctgaatgagtacgagtgccgagttacatcgtgccaacttttttttagtgaataaataaataaatatttatttccacttaattcgaatgtccactggtgtagcggtagtgcgccagtcagcgttttttaacccccaggttggcttcctctacatgcaaattctttttttgctttttatgccaagtaaattatcaaaaattgtttataaaacaaaacttttttttattttttcattcattttatacataaaatactcaataaaaatatttttattcaaatcgacatgatatttaaagcatcattgtacctttatgtttaatgtaatttttaattttaataaaattaaaataaagattttgcttcataaaaaatatttttaatatttaactttgcataaaaagcaaaaataaaaattgtaaaatgtattagcatgcaaaggattcgaacctacgacccacaaaaacttgactaacgcactacctctaaactaatggctactgttgtaaacaacgaaataattactctttttcattaatagtaaaaaactataaacttttggtacatcataaaaaacgaaaccaaaatttaaaattttaaatacgaataacgaaacgaaaattgaaatatttaaatataactttttgacggacgaaaacgaaacatgaaacttaaaaagtgacgaaaaaggggggcgatacgaaacgacaagaaatttcgcacatcactggtcccgattatgccgcgagtcgactccaaagtgggcctccagcatggccaattacgactttgaaatagggtacagcaacggctgacgttctctcgcgcctcattgccaattagccccaccgggggaggaaatttttattatgaacatttgcaccgaaaccgagtgctatatcagcacaattctgcaaaccaagaccatccagcttctagtcactgcagaagaaatcgcagaagctacacaaaaatatgaaattttagcgaaaaccttggcattcggtcgatcgaattagccaaagaacgcagcgattcgggcaccgtgccgtatttaccgaaaagggaatatattgtgggaaggcactcacccgccaacacgtacattggcctggcatcaattcacaaattgaaaggattgtcagtcagggtgaagaaaatcaaatgcctcaaaaagcaccgattcattttggtggactcatactccaaatggccggacgtctaacaaatgaactcaatgacagctgaagcaatcgtctaaaaacactctgtcaatcatctatcgactcgtcattccgaagaaatcttttcggataacgggaaaccaattttcattcgtcagaatttacggcattctgtacggagttcggaataaagcaacttttaggtcaccataacatggacaagtcgagtgcttcttttgtcggaatcaaaaaacttgaaaattaattttttgtttccgcaattgattccattcttagaaacttttttatcatttaaaagtttaattcgttgtaaataaatttcaaaaatgcttttccatttttcctccgctttggtcacaaaaacaaaagaattagctaattgattaataattaacttcaatgaaaacattccaataagaaaaattaattaattagacaaaagaaaatgataaaataaattgtgattaaagaataattaaaaaatgactatatttataagattatttgtttttaattaatttatttgattgcttttgtattgttttaattttttgagaaaattgttgccccgcatttatgat

SEQ ID NO: 15304 - DNA, 1732 bp, Heterodera glycines
gaggaatgtattggaagcgatgatcagaacgaaaatggcaccaggaggggtgtggcgatggggtgggggtatagcagaggaaaaccggggcacaaagtggaggaaaaaacaggggatgaagcggggataaaagccggaaaaaagccgggggcatagagaggggcgaataagggggtggtgggtgactgccgatggcagctgtttctgggtgggcattttagcagcatcagaagcaagaaaatttgtcggatggaatcctgagaattgacaaattcgccggaaaaagagggggaggggattaatatttacaataaattgatgcaataaatggtaaatggaatagcatgagaatgaaaagcaaacggaatgcaaatgatgagacctttaaaaaatgaaaaataaaaatggaaattttgacaaaaaatttctgcgatttaatttaggtttttggcgaattgttttttgaatttaggtgtcattttttgactgcgaacttcaaatcattcgttaaacatacaaaaaaataaataaataataaatttcattaaatttctttgttcaaaaacaaagatttgtgagaaaagaaatccgaatccgattaagtcattttttgcaattaaaaatgagacaaatttaacaaagttttatttatcaacaacaaaaaaatattcaacaatttggcactgtgacttcttatttgggctttggcacggattcgaatttcaatttgtcgaaaaggaaaagacggcacggaaaacaacagaaaaaaactcattaactaattaataccagaatttcaagcggatttaccgtaaattcttttgaaaattttggtttaattttggtttctcgaaaatggtcagtgatcggagtgtgcgggagagggcggtctctttttcagtgtatctccaattcggacatccgccgatcggtccgaatcccgccaacacccccagtgatgtcgccagctgatcagtcagtcattcagtccgactgattgatcactttgcttgttcactattcactattgctgctggtcgccgttcgcctcctctgctgtcgacccaccaatgtccgcttgcatttcgccaatgtcgcgcagccacgccctgcgcacgattggccactgctgcgcgtcggcatgcgccgatttgatcaaaaaagtgggcagcccgggctcctcaggccgaaacaccagcgtgtcctgctcgcgactgtgctcgcgcactgtgtacttgtccagctgaacagcgttttgtgaagagaggcagcagaaatggggcaaataaagataccgaaaagataacaacacacgtacccaggggataagtgcattcaccgcttggagccgtgggttcggtcgtttcgtaaaaagtgccagtttttacagattttccgaaaaaatccatcatacttttccttaaacgcaaccaaattaaaaaatcttggtatcatgcgatagcttttgattgctcttggaaaatttcagaaaaggcaattcagacgactttgtttcagaaaatctgtaaaattgtcacttttacgaaacacccataatgacactttttatgaaacgattcccccgaggcatttggttgtaatggataggtcgaaaattccaatcaaaggtactcaaaactacatcgtgaattgattccttttcgccacatacggtactcttcccattcttacttaataccgtactcgaaatgaggaataatggcgaaacact

SEQ ID NO: 15305 - DNA, 2319 bp, Heterodera glycines
  unsure (1)..(2319): unsure at all n locations
tttgtcagcttcgatctctgaagtgggatgtttcatacatggggggggggggggggaaggatcactcgaaataaacttccttttatctttcattattgtttaattaatgatcattatgctcatcacgtgtgtgtaaattcggcctaatcgcccaatgtctcccgaatagtccaacagattcttcgtgaattccatctcctgcgcccgtttcggcactgattggatcagctccaatgccttctgcatcactttggcgttctgttgttgctgaacacgcaacgaatatttgatgatttcctgcaaaaataaaatttaaaaaaaataatttttgaatttgaaaacgaaattcgaatttttgcattgccttgaagtaatcttcgtattgtctgattcgattcggcactaattccaaataatagctgtactctttcacgtcggagcccgcgttgcctttgcactccttttaattgtaaatttaaagaataataatttttaatttaatattcatttttccctaattgaataattataaaaatgattacctcgaggaatttttgtacggcgccattttctgcgacgattcgttgcgcattgtccaactcgcgcagaaatgccacgtgttgctcaaaatcgcgctccaagcgcaaaaatgtctgtccgacctttcccgagtcatccgaataatactgtaatccattcagcatcgcactgtaaacatttgagaggaaatgaaggaaaaataatacgggaggtggtaaaatggcactaattggcaaacggagtaaaagcgatgacaaaaaacattgggtacgatacaagaaagaaaagagaatacggtaggaagggttaatacaattttttatgagtgatttctaattatattactttgaatgaaaattgcatagctcgcgcatgttcaaggcaattcgatgtgtgcgaatttcgtccggtgcctcgggcgcttcgaaagcatccaaaaagtgtttggaacagtcgcgcaattgggcagtgaattgctcttcggtgcgaagcaaatcatggaaaacttgtctgccaatgaaaaagataaattaggcaataattagcggccattaattaattgccccccccccctcctcactctctcttcagaagtgtctgttgctgttcactcaaagtttgctcatccgctgtcaattcacgcgtgctcttccgctgtgtgtagtattttgacggtgtctcgaagtacgaccccggcacccaacccgtcagcgggggtttggcctaaattctgaccaattttgaaaaaaactggcgaatatgccaaacaaaagtagtccagtgcccaccttggtcctgaccagccaatttgccgggtttttgttgtccaacacttccacaatttggccttgctccagcaacagcgcctcccccggcgcttgtcctggctccggcacgtagtcttgaatggcgacgaaaacggccaatgaccgatgctcagccgtggccggcgttgtcgatgagtcgtccttctgctgttgttgttgttgctggtggtggtaccgtttgatcggatcgccggacgaactgctcgaatcggccgtggagggggcgcgagagagaaaaagctgaaatgccattttggattggcattttatttagccgagtttaaaattccgttttttccgcttcacctgctgatcagttgcgccagtggaggaacgcatctgtgtcgacgaatgtgtggtggccaatccgcgtgttgtggtgtttcgctgttcttcggcagcaattcgtctgcaaattaaatttgaattaatttttatttaatttttaatttttgctgttttttaatccaaaaagtaactggccttaaattgtcatattttctctccagttgccgctgttttcttgatattctgtccatttgtggcacagcttaatgcgattggtacccgcgttgattggacccgttggtcaatttaaaaaactttcctttaaaaatataataattgacacgcattaagcagtggaaatggcacagaaattagaacttggctttgccttgtcagactgatcaatcgaagcgatcgcttttttctttttctcacgcctacggcaaaaatctgcccgaggctaaaagctggctgtgttctctgccccatttatctatcttctctcgcccgttttttcaccactctctccgtttctccatttctctgcactccatcattgcctcattagaaaaaaagaagaagcattaagcgattgaacctgtcaaaagattcgcttatgttaggctgttgatcacccgcacatatgtaantataacaanataaa

SEQ ID NO: 15306 - DNA, 3169 bp, Heterodera glycines
attttaaataacttttaataattattaattttccccaaaattccacctccgatcaggcgaaaacaactcacaggcgaacattgatctgagggcagggacgtccagcacaaatatgaccgtggatgggcttgtgtcgggtgtgaacgacaagccgggcggcgcatcattctcattggcatcgggggatggtgggcattcttagcaaaaaattggcatttttatatggggaaatgaatctcattggcatcgggggatggtgggcattcttagcaaaaaattggcatttttatatggggaaatgaaaatggcattttcttttttaaattttattttcaaaccaattaatttgttgcaaatcgtgaaagttaaggaaattgaacttttttatttttattcaaataaaagccttaaattaaaaaaggaaagggaaattgttaggtgaaatctaaatttagcgacctttttgaaattttttgttgttactcatttttctttttgattatgcctaatttaaattctaatttactaaaggaatttggcaaaaacacattttctgttaaggcactttgatgaacaattcggcagcgatgtcctcggcactgttgggtgccgtgaacacgaccagcggcggcaccaaaatggtcggggcgtccaatttgggaagcagcggcacacagaacaaaggcggtgggttgggaaaagctaattgtgattagaaatgtgatcatgtgatctggggcatgagcctggtcccaagactcgagacaattgagtccaagagatttggccgcaacattttgatgtcgagagtttaccaaaatccaaatttcgctgcaaatttgctagtccctctaaaagcggactaagccactgatttgatgcactccaattaatttaagcaattaacacctttggaaatctgcaaatgaacggcaccgggccgagcaacggcggcttcttgtccaactcaagctttggccccgacggatcgtcaggcgccggtgtggcggtgtcgggcacgcagatgggcagcaacaaattcatcagcgtcagcgacggcataaattcgaatgatcggcagggatcatccggtatgtgttacgtatttaccgtaccatacttaatctcacagcgtccaatggttacggaaaattggagggcatcggcaatttggcggccaacggctcttcgtttgtgctgagcggataccaaacggacagaggcgcggcacaaattgtggagacggtgggcaaatcgattgccacgaacaacacggcagcagagttacgcattaaaaaccaaggcaccgaagtgatcaatggaacgatgggcacaaacagtgagtgatcagaaaaagtaaggacattggaaggacagtgccaaaaagcgattcggaaactaagggcatggaaagtaaaatgacgaaatatgatcagaaaaactaaaaaggaccaagaaaaaattccaaaatgaagaaaacaaagaaagtgccaaaggtaaggatattaaaaggaactgccgaattattgtttgttagccatcttcctattaaaagtttaagtaatgaattattcaaagtatttctgatcactaattaatcgattgtttctttttgtatttttcgtttgatcattttgccactcttttcttctccttaagcgaccagcaattcgtttggcaaatttctcggccaaagtggttccgtgcaaggcaattcaatgctcaattcgagccgtcccggcggacagaatgccaacgcgaacactgttgcccaagggggtggggcaggtaaaaacaaataccaaacggacgggggcaaacatcaaagaattttcattgaatttcattttatttctaattgtaaggcccatccagcgcaatgacggacacgggactgcttctgaacggcccaagaacagcgtaaaagtactgtagcagtatgaaaatacaggaaaaagggaaataatcaagaaaaatattgtagtcatcagagacaaaagtttgtcaattagtaattagtcgtaattttgcatcattcattatcagacatatgtaaggtcatgaatctggatttcagtactgagtcgggattttcgcattgactaaaaaatgctcaaggaaaaaatttgaaaaataattcaaaaatatgcaaaaaaaaaaaaaaaaatttcccctcctcaccttacaatttatttttaaggaaaacgccagcgggcaacaaacagatgccaaaatcccgattttgccaactgagttccaagcaggatttttcgggaatttcagaaccagaattttcgttataacattgtttgaaattatcggatttggcccatatatggcaagccctagcttatggaaaatggaaaccattccaaggggtccaatttcaagtcacgcttctttggcattaaattgttatcccatgaaaatcctgacagcatgttgcttttttcattctaatttgttcagcaacgaacatccgtggcaatgtgaacgccaccggtgatcagacgtatgtgcaaagtgtgtcaagtgtgtccgatcagaacagacaacaggcgctgttcaactctcagaatggtcagacagccgacaaaattaaataataaaaaaatgcaaattttaaataaaatgcataaaaatttagcaactgtcaaatcggccggggaaggcaaagcgacggcgagcaattcggcaatactcaaacggcgacggcgccacacgcgaaatttggccacattaagcgctgcggaggcgaaaaattggtggcaaaatgtggcgacatcggcacaatgggaaggaagtaagttaaaaacaccaattaattaataataaaaaattcttttggttttttccccaattttttaagaaaatttatatgagcaaaaaaggcgccgacgaagcgatggtcaaactttggcaaaaagaatggcccaaaaacaaaatttggtggaacggaaaaaagctggaaaaatgaatgatggcaactaattaatagaagtggaaattggcatgaaatatttaaaattaatttgtctgaataaaaaatgttttttatacaaatatcaattaaacgacataattaataagtgaaaagaaaacaataattgttgttgtttgatggctgtcatttaattgtaaactgatcattaagctgttaaagtggaaa

SEQ ID NO: 15307 - DNA, 2595 bp, Heterodera glycines
tttcttaaaccgccagggcgtttcttaaaaccgccaggtgggcgtttcttaaaaccgccaggtgggcgtttcttaaaaccgccactttgggcgtttcttaaaaccgccagggcgtttcttaaaaccgccaggtgggcgtttcttaaaaccgccactttgggcgtttcttaaaaccgccagggcgtttcttaaaaccgccagggcgtttcttaaaaccgccagggcgtttcttaaaaccgccagggcgtttcttaaaaccgccaactcatatgattatgtatataaatatatatatatatatattagaagtttacataacaataaaaaatttaaaatacatatgcatatctagtgacggtaaaataaaataattatttttatccttctttaaaacgttctccaaaaatatgaactgaccagcataatatattctaaaaaataaaatatttaagatatgagttggagaacagacttttgttagaaagcaattaggatattcattaatgcaattgcaaaatttaatatcacaatcgtaacgtttctgatatttatttatgtagcacacatcgtggttatagcaacaattatcaactgcaaaattttcgaatataaaattgctaattcgtaatttgttacttttttgaaagttgcaaaaccagattacaggagctattagacaagagtctaatagagaggtgccacaataagtcccacagaatttctttgcaactttcaaaagggaatgaatttttataaagattatcacagaaataaaacaaaataattaatttatctttgttggctgtttaatcagttcaaaatgtccatcattataatacaaaaatactgatgctgttgtttctttttgactcagattcgtaagctaaatttttaatatgaatttgtataatcaaaagagtctaaccgatgtttctaaatctggtgtatacacttgccaacggaaaattctttcctgtatacgttcgcaaactattatatttaattgaaacaatttgctggttgatgctaagtctaaattgttcatccatttctcagtttcgtgagctcctgctgctggtgaaactgatatctcgatgtgttttctaatattttcaatgctattaaatagcacttaaaattaataattaagcaacaccccaaaaaattaacacttacaccaccattcattttcattatgatttaaatgcgtgtgttggttaattgattcttccaaatactcaatcacatctcttcgaatttctgtgtgattccattcagatccagttagagctagagatatactacgccaaccacaatttccatcacctattattgtttctacttctcctggtccatattcagaagaaacgaaattaaactgagctggatattctatagtggctgcgccttaatttttagttatttgcgccattgtttgaaacaaattcatcaaagctaatacaattaataatatttatgaatgaaaagaatataaatgctaataacattggattaatttattaaaggaattaaggcaataatattttttataataaatgtatgttaaagaaatttagctatttataccatttaaattgtaataaaactgccagcctcatatttcctgctgacacctattggtacaaccaaataaaaattaagtaaataattgtgaattaatttaataaagatttttagtctgtcactgctagactaataatatttccggctgacacttacttgcacaacaaataaaaattaatagatattattgtatatttaatttaacggatatacatacataatcatatgagttggcggttttaagaaacgcccaatgtggcggttttaagaaacgcccaatgtggcggttttaagaaacgccctggcggttttaagaaacgcccaatgtggcggttttaagaaacgccctggcggttttaagaaacgcccaatgtggcggtttttaagaaacgacctagcaccataaattggtgcatgatggtgcatagaaaaagaagtatcgcgatgccgacgcacggattcttcgtctcgtccaacgctataacgatatcaataacaatattgtccctcaaaatgatcacaattatgccaatgccaatgtcaatcccgaaaaccttaacaattttctcgctggtattttccgaaattatgagatgcgacctagtttgtcccggattttgttattattataaagttatgaattttctacaaaattttatgaatgggaaacaaaaaatgataaattttggttttattagttcttaagtttttctatttgaatctgacgcttgtacaagaactcgtacgaaaatgtcccccgtacgaaaacggcggtacgaaaacgaccctgaccgaaagccagcaaatggtagtgccaaaaatgatcagtgcaatttttgtcttcattttggtccgtttgttcatctgctgctgtaattaataagttagcttgaaaaatgattaataattttgataaataaaattcacatttttaaatttatttggagaattcttcaaaaaaaattttcagtatgtttaaggaaataatctctaagaaagttagaaaagtta

SEQ ID NO: 15308 - DNA, 929 bp, Heterodera glycines
atccaaattaaaacaatccaatgtctttttaccctttcttctgaagtgcttgtacgtcctcaactcgcatgccaaaaatgaactgaaaaggaattatttccaagatatggcgatttccgtcttccctcaccatattttcggcacccatttcctccgccatttccacatttgctccgtccaaagtgccaattgtcaatgagccattgagcatgaatctggagttgcaatgtgcggcattgtgtgaaatggcatcaaaaactccaaggaaatatatttacttcatgttcccggttcccgatgcctctgtgcccgcggtggaaatctgttctgacaaatccgccgccggaatgattttttcggccattgaaacgcggtaattctccaaataaacgacctgagaacagaagggggtaaataataaatgaaaacacctggaaaaaagtataatcaacagaaaaggacgacacactttcaatttgtcgcccacaattgggtcattgttcacaacggaggcaacggaagtgatcagcttgatgatctgtttggccatgtgatagccgggggcagcctgaaatagcgagtgatcactgatcagattagtggatcaccaccagcacccattggcacctttcctccgaacatcactgtccgcggcaccactttcttcgccgggtccgccttgattcggttgtacagcgttatcacgtgcagtgcgttcaacagctgtcgcttgtactcgtgaatgcgcttcacatggacatcgtacatgcctaaaagcacacaacactttcgtcatggacatacccaaaaaacgaaggggaccgataagggactgaaactgttacccaatcagcaaatttcttaatacgtccaacccccgtgccatccccaacaacaattcatcccatggctccccccccccggcctcc

SEQ ID NO: 15309 - DNA, 1862 bp, Heterodera glycines
caaacagcactacgtccaataaatcgctgattgatcagataaattatttccaaatgacgcggcaaaaggtgttcgagcattgcgacgggccatcgctccaatgcttctgaaagaacggacatttttcagagggagaacaaaggcaaaaaagccaaatgatttggctaaatttgcccaccgggcaaaagtgtgtgattagtgtaggcgaaagtgcgcacgcaaatttcccatgccttgtcgaaactcagtccttcgacatcgacgagcagacggagcagttcggggattccgatagacggatgagtgtcgttcaattggatggccacctgagagcagggaaagaatggtaaatgatcaggaaaaagttgtaattagagttgaactggatccaggtctggattattctggaccttttttttgtccaggggaaactcatgtccatgtcaaataagaaaaaagtccatgtccaggctagtcacgaaaaactggatttccttgataatattttagagtttgtcatttcgaatacccatgttttactgccaattattaaaaaattattattagtttgctttttaaaacaaatttaaaaaaaacaagatacaggccatgataaaacacacttttgggcgtctgtccgtccaatatgaaattccctattgcctccccttttcctcttcctccatgcatttgcttactttgtccgggaaggtgtcaaagtcgacccgaactgggtcccggcttccgtaattgctggatttgaaacggcggatgatatcctggagagttgcggccaccaaaaagtattcctgcttcagacgcaattctttgccgacgaaaacgttgtcattggggtacaaaacgcgagtgatattctccgaaaggttgcggtccatcaccgcttggatgtaatcgccgtcattgactaaacggacaaaaaggcataaacaaaagagcactttaatagagagagggggggggggcaaatgggataaaatttgagaactataaaattgtatattttagagatttaaatgttccaaaattattaaatttccaatttgggctcacaaaatttcagggggaaatggttctccgccttggccgaccacaggcgcagtgtgttcaccacgttgttgcggaacccgggcaccggcgtgtcgtaaggcatcgcaaaaatcaaatgggtgtccctccaatggctctgaatgttttttttaatgtcccgcgtttcccggtgaccctccaaacaccttcccattgacgtccttttccacgcggccgtaaaggttcaccggaagcatatactcgggccgcgccttttcccacggattgccgaaacggagccaatcgtccggctcttcgatctgattgaaaggattttgcatcttcgagtagagaattttaagaggcgtaaaaataaatgcaaataatacaaagtttgcttttttggaatgtttctcggctctataataatacagctttaatgcaacataactttttttagaagcatcaaaattaaaaatcttagtcatttgatagccccttaagatctgtattagcctgcaatttcaaagaatttcgcatgtttcaaaaaatttatgagcaacataaaaaaaaatttttttgaacataaacttttgaattttgagtgaaattttttaaaccttcgtagactaatagaggactcttggggctatcgaatgatacaaaaaaatgtttactttcggtgcttctagaaaaagttatggtgctttaaagttgtcatattattttagtcgaggttatggtcgtgtgaactgcactagagccttgtcccccagaagccgcattttcacctgccatccgtcgcggatcagttg

SEQ ID NO: 15310 - DNA, 1669 bp, Heterodera glycines
ggaatgacagccggtaattcttcaattaggctcttttggccaagatattttgcgggcactttttaaaaaaccttttgggaacagaaaagcgtccgccgaaaggctcacaatcaatcagccggataatgaaattcagttagggttttttttatgaaaataagaagtttatagtctgtcgaaccaatataaatcacgcgggaaaattgctaatttaacgaatttcttagaaaatctgttctaaatttaactattttcccattcccccctttttcacgtgtgatttgttatccaaaaggacgagtgcttgaacccttttttatgcttacaatagtttttgtgttttttttctcgaaatttagaaaaaaggccgatgcattattattagtaattagtattaattgattgggttttcatttagtgatccacgaccatcaaagccaaacttacaaagaaccgtcaaataaaaaatgtaagcatttgttggtgaaaatgaaagaattaaccataaaaatttagcaaaagaaaagttaaacgcttcgattgcattgacaaaaatggaagccgaccaaattgggaaaagcatcggaagtgatcagtcgaacatccaactgataagacagaacgaaaaactgacacgtgaaaatgtgcagttgaagcagagaaatcaggtgggacaatttaggagattctaggagaattatttcattttaggggggggggattgaacggaataatttatttttcaaaaatcaggaacaacagcaacaaatccaagcactgatcggcgccaatcgggagctaatttgggcgttcaacgaaagtcgaagggaacacgacgaactgatgcagcaattacgggtcatggccaaattggtgaacaacggaagttcaacgcgtcccgcgggggtcgaaaacaccggcgaaacattgcaattcgaacagcaaaaaacgaagagtgttcgcccgaaacaaatcgccaaaaagaatgccaccactgcttctgctgctaacagtggcggaggagggggaggacgacagagaagtgggaaatcaatcaccacaattttgggaaggggggagacggagtttgaagcaaacaccaaagggatgggagtggacagaaccaaaaacgcgttaaatatgcccagatattttagggaatacggtatattatccgtgtcccgacatttacgcctatgttccaaaatcgggtgcaaacttaagcttttttgaatccctgatatcctaacaataagtagcattatataaatgatggaaagtgattgtatctgataatttgatagttagtaaatttttgaaaaagtcatcaagtattaaaacagcagaattaatgctcctattttcttaatttcaatgctctttaggctatcaaggcttgaaaaaattaaccctgaatccaattttagacataggcgcaaatgtctggacacggccaaggttaccccagaaattcgtggcctttttttggtgatagtcccccggggaaagcggcggagaacgcattcattatttgtattttcatagacttaatgttttttttagaaaagcaatgcacgggaatggtttacgttgcgcaagaacagctgccgccttcgctggccatccttaagaaaaagcccgacacttccgcaacctttcccatttctcc

SEQ ID NO: 15311 - DNA, 1588 bp, Heterodera glycines
cgacgcttgcctcctgactctgtatctatcaaccaaaaattaaaaattaggtgtaattttttccgtaaaaatataaatcaaagaaaaatgaaaaaaaatccatgaatttaaggattggcgttccgtcatcagcagcgttttgcgtaagcaatatgtgctccaactgttcgaggcgctttgccccgaattcaccggctcaaatgtggtggatttggcagtgaaaaatccaagccgtgccgacttcatccaaaagtcgctgaacttcgtcttcgatgccgaaaatgaacttttcggctcttccacttctcgcgactcttattttatggcaatcgctgagaaaatcttcacattgcgcgaggcgaaagaccgtcaaaatttggagaaaagttgccaaaatgggacgactgaacgaattggcgacgcggttcggaggaggacactggcggatgtgctgaagccgaaacacaccaaatcgagggacgaagacattttggacggggacgaaatttgaaggaggacagagtgatcatttgcttttggtattttgagaaaaattgcttaatttgtttgtccgataaaaatggacattgaaatggtatttgatgacaacacaacgatctcttaatttattgtaatggacattttaaccgagaaaataatttctttttcgccataaaatgtgtgtggaaaaagtaaatttgagaaggaatgaaaacagaaaatgtttgttttccgccggtggttcctttccttccgccattttccaccggtttccatccatccgtccgtttctcctcactttccgaaccgcgcaattgcggaccgatccaacggcgccctcttgccgaatctgtcgaatttggggtttcaaatcaacaaaaattggatgccattgctcaccgtgccaacgcggaacggtcgagcggtgcgcgcttaccaaatctgtgggggatacggtggggaattgactgcgttgcgttgccttcctactgtacctggccattgcggaacggtcgagcggcgcgcgttttgcaagactgaaatggggaggacattaattggagaacaattaatgagggtggaggggactgacctttcgaagggatagtcgcccaccctaccgtaatcctccaaaaggccttccatttggggccttaaaaagcgaattttcaaatgggcaaatggcactttcttttcttttttttacccttcggctaacattccgccgccgtattgaaactgcgcattcgttttgctgttcaaaatgacgaaacccaacaaaagggaggcgaggagaatgttggcgacggggaattgggccatttgagaagggaaaggacgaattggagaagaatgaacgaatgggaggaggaggtatctaaaagaagcatttgcaataaaccgaaaaagtgccgttttgggaaaccaatcgcaaaatgcaaaggcaaatttataggggggggggcgggaattggcaccacagggaggggcaaaatcaaattgaattatgaggaaatgccaattggcaattcgttagaaaccaagggggagtggggaaaatggccaattaattcgattaaattaaaca

SEQ ID NO: 15312 - DNA, 1643 bp, Heterodera glycines
ttatttttttttttgcaaaattattcataagtatttttcagaaaatgctttggaaccccaccaaattttaattaaaagttaaataaggctctctgatgctttttctatcaaaagggagatgaataaatatttttaaaaatttttaattcctttttaaacaggccaaaaagtttaggcttatattttaaaagtctcatcgaacctagcgcactaaaatcgatataatctctccaaattttgcaggccttctccattgtaaaggactaacttaacctgaaaaaatgccaacgcttgttgtttttaaaatttttcgaaattctgactttttcattaattatttattattttgcaaaattaattcataaatattttttagaacgtgctctgaaacgcaccaaatgttaattaaaagttaaataaggctctctgatgctttcactatcaaaaagggagatgaataaatattttaaaaatttttaattcctttttaaacaggccaaaaagtttaggcttatattttaaaaagtttcatcgaacctagcgcactaaaatcgatataatctctccaaattttgcaggccttctccattgtaaaggactaacttaacctgaaaaaatgccaacgcttgttgtttttaaaatttttcgaaattctgactttttcattaattatttattattttgcaaaattaattcataaatattttttagaacgtgctctgaaacgcaccaaatgttaattaaaagttaaataaggctctctgatgctttcactatcaaaaagggagatgaataaaaaatctaaaaatttttaattgctttttaaatttgcgaaaaattttaggcttaactttttttttataaactgatcagaagcgaaccagattttgcgagggcatcaaaaagacaaggaaaagcactgctatgatgctaactccagtaattctgaatttaaaattttttattaatttttaaagcttcactattttatttttttagcaaaattaattcataaatattttttcacaaactgctctgaaacgcaccaaattttatttacaagttattttaggcactcagatgctttcactatcaaaaagggagatgaataaaaaatctaaaaatttttaattgctttttaaatatgcgaaaaattttaggcttaactttttttttataaactgatcagaagcgaaccagattttgcgagggcatcaaaaagacaaggaaaagcactgctatgatgctaactccagtaattctgaatttaaaattttttattaatttttaaagcttcactattttatttttttagcaaaattaattcataaatattttttcacaaactgctctgaaacgcaccaaattttatttacaagttattttaggcactcagatgctttcactatcaaaaagggagatgaataaaaatctaaaaatttttaattgctttttaaatatgcgaaaaattttaggcttaactttttttttataaactggtcagaagcgaaccagattttgcgagagcatcaaaaagacaaggaaaagcactgctatgatgctaactccagtaattctgaatttaaaattttttattaatttttaaagcttcactattttatttttttagcaaaatcaattca

SEQ ID NO: 15313 - DNA, 1145 bp, Heterodera glycines
agtgatcagtgtggtcgatcagtttttgggtgggctgttggttgggtggcgagtaaacgaatgaatgaatgaagcaaacgatcagtgaagagggaggaaaagctaatcaaatcaaatcaaattgggcggaaagaaaggaaagggcagagaaaagggggggggtggaattaatttgcgcaaaagaaggaagcgggagcaaagcggagaaaggagggggaaaagcgggaaaaaagggtaagggaggaaaagaagaggaggaaaagaggaggagaaggagggaaagagggggaagaggaaaaagaggaaggaaaagaggaggaagaggaaggagggaaacgaaggaagtaagtggacaccggggatggggaagagcaaaggaagcgaacgaaggaaagaaagatgggaggaagaaagtgatgaagaaaaaagtggaaataagcacaaaagagagatttttggtggctggtggaagagcgaattaattgatttggtagcgggacaattgaaaatgaggggacggaaagaagggaaggacattccggtcttcggacaaaagaggaaaaagagaaggggggagggagggaaaaaagcatagggactgactgatcatgatcagattataggaattggaagaaggagaatttgcagagagaatgggaagaggaagagagaagaggcaaaagaatgtgagaaaatgggaaacataggaagaaaaggaaaagggagagagcgaaggaagtcgcgatgagaatttgataaaatttgaaaatcaaatgaagcagggaagtgaagaccatcatcggaatgtcaccatcacatggcaatgaagaagggaaaacatctgcgagaagcaaaaggaaggggaggggagaggaagaggaagaggaagaataagaggaagagcaagaggaagaagaaaatagaaggaataggaagagaaaatgcgggggaataggagaggaagaggaaaaagcggaggaaaaatgtatgaagaaagagaggaagagaataaggaagagatagaggaagaaaagagaaggaatagcatgaggaagaggaagagaaaaaggcgtgggaagaggtaggaaaaggaagaaaggaggtaggacgaatgagagaagcgaaggataaacgaactccgctga

SEQ ID NO: 15314 - DNA, 2697 bp, Heterodera glycines
ccatttccctctcctccccccccccccccattttcccccctttatgcctctttttttccctcctttctttcattttttccttttctaattattggtccgacttcctcacacacatcatacacatttctttcattcatccatctgtgattgttttttgtcaatatttgcttatttggcctttttctgtggatcgatggggggggggggcgggggctctgcaactgaaagatccaaccgcagcagagggcctgggccggacattcatccaccaaacgccaaattgcctcacgcgcctccatcccttctcagaccgaccattctcccaccttcccatgattaacataacatcttaatcatcattcactcgacaattaattaattaattaattaatattcgccttcgggaaattcgtccggccgttggcccaatggccaatttgactaatatcctctcttcatccttccttttcttcttcttccttcttctcctcttcctcctatgcctttccggatcgtcgttgtactacctcctccccccccccaaactttttccttcccaccccaatttagcccaacttccctcctcccagccgcgctggcaatgcccaaacaatggcacttatttcgatgccactccctgtgatccaaatgccgctttttcctgtccggcgctgtacaaatgccgaatggcagtggaaagagatggtgaagagagtaaagctgaggaaatgaaggccgggaagagagtccaatggatttgctgcgaaagtgctgggatgggaatcagagagtgtgcgtttgacggagggcggacggggggtggagggcaatccgaatcgaactgtttttgagtcgcgacagatctttcgaaacaattcttcccctctcacaacgtttacatattttagggcttttggagttgggcctagcgccggcggtgtttccaaaagtgcccgattcgacgttacggcgcgtctttctaagggacgaacaaagcggcaaagtgatcgccgtggacggcaacggggcggacatttcactactgccttttgacagctccgaatcggccaattacagccgattggagggcatcgaatttggcgaaggggtgccgaagaacgggggcttccttcactttttggtggccataagtgagcacctccaccgccatcccaacaaatgctaaacaaacaataagacagatcagctctcttccccgtcggcactccaactctatttcgactattcctcctttggcatcgctcaaatcgacttggaagcgtaaaacggtcgcttcccacgcggttttgccgaggccattggcagtgactttgtgccggcggatttggcatgtcagtggcagcaaaaagcgtccttttcgctcagttactctcccattcaaaagatcgccgccaaaatgttttggccgttttccacactgacgtgccaatggccaatctttcgcaagaaatcgatcgccaaatggcggacagtgatggcaaattgcaaaaggcaatgtttggcagcaacggcggaatggccaaattgttgggtgccacgccaatcgccggattcatttacacggtgagaagggaaaggcaaaaacggcgaattgcccccggcagattaccacgcgggccagcattttcccactgacatacgaccagcgatggaggaaagccgagcaaagcgaagtccaagcgccacagaaagcagaagaaacggcacaaggcacaaaaaacggaacggagaaaagtgccaaatgggagacgatgggccaattggagtataatgccggagggattggcacagtcgcaacagaaaacaatgagacaaaagtggtggcatcagccgacactcaaagggggacacccctcagggcaattagcatgataatgccagcaattgttgccattttgaatcatctgcataggacgttaccaaacatgaaggatttatagcaaagaagtgcgaaaccaataacatttcaaatttattaaatcattttcatcgaaaacaattagaaaacatgcataattgcttagaaaaacttacaattaacggagcgacaatattagtttaggtccaaataataaaaaagaattggaaaatgagaagcaaaaaggatatgaaaaatgattaaaaatagaattcatcttcgtcctcctcctcttccgggtattttctggcctccttcttctctgccgcctgttctgtctcttcctcctcttcatcgccctcccgttcctcctcttcgtcttcttccccctcgcctatcatttcctctgcttcttcttcgtcgttggcggtcgactgaatatttgagcatttatcagtgatagttttctcttcccttcccgccctcttcttccttttccctatgtttcttctccccttcccccaatgtctgtccacctgctgttccgtttcctcctcttcttcctcctcctccttctccacgtcttcttcttccttttcttcttcgtcttccccatcctcctctccgtcttcttcttcgtcctcattcgcgttgtctttgtccatcgccgcttcttcgccgtcctcctcgtgctcgccctcctccacttcctcgtctttgtcacagaccaacacttggtcgctcagattcagactgtctctcagtttttctatgtcctaaaagaatggacaaggttttattactaccttaattttccc

SEQ ID NO: 15315 - DNA, 4290 bp, Heterodera glycines
tctgaaaagccaaaaccaccgtctgtgatacttgaaaagacggaagttttagagccaaggtctgaaaatatactttcagcaaaagtcgaatgttttccaatggaacaaaattttttggtgaaaggaattaagcttaaatatcccggaataatcgttggacgaactttggtttcaccaggaaatagtaagaatgtaacaatacaaattttgaatgcgggaaattcagcggttaaattatatggtcagtcacatttggcagatttggaatcagttcaaattaatgcattaccaggagacgaaatcccagcaaaagattacattcctccagagacacgatggagcgaaaatttaccaaaattaccggaaaacggactaaataggctaccatcaaaaagaatcaattttgagggtaaaaaattaagtaaaaatgtgcaaaatgatttaaagaaaattgtggatgagtgttcagaagcttttgtaggggatgatggaaaaattggcaaatataatggaccgattgtgcataaaattgacctaatttctggttcgctaccatttcattgtcgaccatatcggtacccaccggagactcagaaagaaatcgaaaggcaaatcaaaatgatgctggaccagaatataataagggaatcggaatctgagtttgctagccctatagtgatggtccctaaggctgataaaaagtcgtggcgttttgcgattgactacagagcactgaataaaatgacaaaaaagagagtatttcacttgccaaacattcaagagttgttagatctaatgggggcaaagaaattttacacgtgcatggatttacagcaaggatttatgcaaattccggttgccgaggaagaccttgaaaagacggcattcatttcaaacttaggcatttttgaatttataacgatgccttttgggctaacagcggccccggacacgtttcagagagtcatgaactcgttgagacgacggttaacggcggcgatgttaatttatttggacgatataataattggcagcgaaactgagaaaagtcatttaacggatattaagaattttcttttattactaaaaaaggttggacttaaattaaaattggaaaaatgccattggggaatgtccgagatacggtaccttggctttttgctaagtgaaaaaggtgttagaattgacccaaagcaggtcgaagcggtacaaaattttaaggcaccaaaaagcctaacagaattaaagtcattgttaggagcactaacatattttcggcgctttatacacaattttgcgcatattgctcgaccattacagacattgactcaagataaatttgaagggaaaattgaagaaaattgggcccaaagcaggaacatgcatttcaaactctaaaacaaatgctcacgacagtaccagtattacagtccccatgattcgggagagcattcacaattgagtgtgatgcttcgaaaaaggctattggagcagttctccttcaggaaaatggtcctgttgcttacatttcaagagcattaaatcggcacgaaacaaattacccttcaattgaaagggaggcgttggcattagtttatgcagttaaggaattctcgccatatatcgttgggtctggggttacaaaagtaataacggattgtagtgccttaacaggcatgatgaaagcgaaggagctaaaagggagacttgagaaatatcaagtaactctccaaagtttcgaattagaaattatttatcggcctggaaaaaagaataaagtggcagattttttgtctcgatataatataccgggaaatgaaaaggatcctgaaccaaaacaggaagaaaattcagatgagtttgaccttcagccaaaaattttaagtgcaaaaaatattaatgaaaatttaattgccgaaaatgatggaattttgaatgaaaatccgaaaataaccttaaaaacagtaattgaggcacaaacaaaggtaaaggaattggccaaaattttctatattttaaaaaccgggaagtgtccaaatgatgttctgaaatggaaaagagttgtttctgattattgcctaataaatggggccatttactttataaaaggtaaagaaaatatggaaagacctaaattaataatccctcattcattacgacaaaaacttttcattattttctattcagaaggccattttggagtcgaaaagacttggcacgaaattaaagagcgattttattgggtcggaatgaaagaagacgtaaaaatgctaatcgaggcatgtgaaaagtgccaaatgaggaaaattcagccagggcaggccaaatcggctccgagtgtccctatcgaaccatcaaatggcccatttcaaagaattcattgcgacttaatgggtcctttaaagagaaccgaaagagggaatttgtatattttcttggccattgatagtttttcaaaatgggtcatggccaaagcaatcccggatcagaaagctaatactgtatcagaaaattttgttgaaatggtggtccatcaacattcaactcctgagattgttgtgactgatcagggaagacagttcacttctggaatttttaatgacttggccaaaatatacggttttgagcatgtcactacaacaccatatcatcagcagtctaatggaatggctgaaggggctatgcgaatcatggctaatattatttctcaaatggtcaatgaaaaagggaataattgggatgaaattctgccgcacgctattttttcatacaatgtttcaatacattcagctaccaaattttcgccattttttatcattaatttacgacagccaaaattgccaactgatcggttacttaaactcccatcccccgatgagcttgtgtccgatatttcggtctatacaagaattcagactgaaaaagcagctaaagcgtgggaaattgtgcgaagtgaaattctaaaagcgcaggaaaggaacaaaaaagagaatgatcgcataaggaaagcgaatgaaagagaatttgaaatcggtgatttgtgttgtttaaaaaagaagttttgggccataaatttgatcagcgttggctgggaccaatgcgttgtgtgggggttgaaaaagaaaagaaaaatgttgttttacagtcaattgatggaagagctaaattaagaaaagtacatcaagaaaaagtgaaacattttaatggaccagcaattcttcctctaaggcagtcagacaaaccattaaattgggaaaagtacgtagatgatccgaatttagaacaggaagaaattgaaggtgaaagttgcgaaagtgactgtgaggaaacgcaagacaatgaaaatacgcagtcaaaaaacaaaatgggattaaaagtttcaaaatatggctttgagagttctgacgatgagaatgattggaatattgttgcgtttgtaagagaaaaccaaaattctgaggatgatgaaggcccggaagttataatggacagaaaccccgaaatcgaaataatgccaattttcacaatactcgaagtccttattgagggttcatttactgaagtatacaccggatggagagaccccgtaacaatctcattaatctcaagcatacctgaaaacctagtaagggaaaattgggaaatttatgttaatggaaatggctcaagatttgttatggcatggatttttggcgaaagttttgaaattttcattgtcaacgaatttgatcaaattatgttgggaattgatgcgcaaatgttgttgggtgaaagatggcgaataaaaactgaaaatgaaattgagacatattgggaaatctacttcgatgaaaatgggcacgaatttgaaattcccagaattcctgaaatccttttttcagaaaaggaaaatttggaaattgggtatgggtcaaactttgcaactctccgaaattcagaagaaatgttaagtgaacagaatgatttagaggaaggaaatgatttttcaagaacagacattaatgtgataaattatgtaaaaccgtttaaaagtttattggatttttcaaacgaaattgatgaagatgaaggaaatgaagaattagtggaaaatgccggagaaagggagagaaatatgaataattctctagaaattttagggagaatggaaaacgaacagttgaatgaaaaagggcggctaaataaatcggataaaaatcaaaataaaaaatatgcgagccattcgtttttcaaggaattggaccgaatgacatcaccggctccattacacttcgaatccttgactgatga

SEQ ID NO: 15316 - DNA, 2398 bp, Heterodera glycines
ttcaaattggggtgtcacttgataaagagtcaatgcgcccttgcccagtttgagcttgaacgaatggagccattgatgccgaaaatggttgatccaattttcggctttttgtcatcggcgttgtggtcaaattgtcctgctccaggtcacagaaaacagcaacttcggactcttcttgtcttgtgtcaatattggaagacggagacgtccctactgcggaagaagtcaatgtttttcgaaccaaattcttacacacattttgtcagaggttctgccggtgtattgttcaaattgtcatgatccaggtcacagaaaaccgcagtttcggactcttcttgtcttgtgtcaatattggaagacgaagacgcccctgcttcggaagaggtcaatgtgttccgaagacgagaattggcttcgcgtttttgtttacgctcttgccgagtcgttaaagatctctttctaggcataaaaatggtaataactttaatctgaaaaaagaaattatagttaaaagctattttgtgtttgccaaaataataatataaatttttcggattaaaaatggtcttatcgtcagtttaggaaaatttatactgtgaatcagcaaatgaataatgaaaacactaaggaaaagtgaagaaggagagattgattttaagctggtaaaagatacgaggtcaaagatcatagttagtaggaggaacacataacgtaaaacaaaagagaaaataaaaaacaatcaattttttaaccacctgactaccgggtcgcttgcctcctgctcatttaattcccttttccctttcattcttttttggaaaaaacccgaccaaaagtgcatattttatttttttataaaatagttagatatgtaaaaaatatattttattttaaaaaattaattaattaaaaaacataaaaatagattaaacaaattaaaaatagaataggtaaacaaaaaaatgtaatatataaaaaacacagaattaatgggagtcgaaccctcagccatcgcagcacaaaagtcaggcacactaaccacttgaccaccgagtcacttgccccattgccatttaattcccttttccttttccttcttttttggaagaaatcccgaccaaaagtgcttgagctccttttttagggcacttcccggacccggaccaaaacaaccctggtatcattcgaaagccaagagtttgtagatgtgcacaaacatatttgttttttgatttgaccacttttaaggcatgcaaaaagcgttcaaaaatgggacattcaataaagtgtgattttttgacttgtttttcgaatgcagttcgaacagttctaaaccgatcgaaaccgcactatttttcccttatagcccttaaaaaactacgtcgatagaccccacgatcgacctgtaaaactcgctagaaagtcttaaattagtttttatgcttggatcatgggtataaatttcttatatagggaatatgtaaaaacaattttagctgtcttctccagtcaattatcactggtaaaattaccatcgaaaagaagttgaggaattcatgaacatcattagatatgacgttctgcaactggtaattaatgaactttatataattaatcatttttcaacaaaaaatattcaaaaagcaaattttgtgtatcggaattctgttttttttaaattttaaattaaatagaataacaataaattcgaaagttagatcggtaatattttatgaacaaatttttcagttgactttcggttccatttgcgccaacatcacatttgaaggtgaaaaagcaagaatggagtggtatttggggcgtctttccaaaaatgctcaaatgatactcgacaacgtggagccttccttatgtgtcaggcgaacttgtaagatgattcttttacattaatttaaaagtagtgacaaatttgtagtgacctttatttctacttaaacaatttatcactttttaaaaaattttatatttcctaaaaacctagatcagccctattatggcacctttaaccaattaataaaagcatttacaggtataaagctttcagatttttgaaattactattttttaaattctaaagaaaaaattaattgcttcttggtatcggagaatgccggattaatagggcttaaaaataaatgcatataaaaacctctaaaaattattttaggaaaaactttgtaaaacatgaaacttttcatttttcccttttacatacattcatttatagtatgaagtaaatgtttaccattttttaaattccatagaaacttttttgtgaatttttattgaatttgttgtttaattttaagctaaaatcattccccaaaattgaaaccgcgatggctaaggaagtttttgatgatatgtcgtttactca

SEQ ID NO: 15317 - DNA, 1733 bp, Heterodera glycines
  unsure (1)..(1733): unsure at all n locations
ttccatttccccctctccccctattgccccgggacgaatcggttcacccttccccagctaatcacacatattacacattatatattgtattgatcacccttccgaataaaggatattattccatcccactcgtgtaattatggggaggggctaagcaacgaatgccaaagggcatccgagatattcatggaggtcccgccacggggcaaaaatggggaagaatttaaatagaactaattatttaatgcctttattaaagaattagaaaataagcaatgcgatttatgattaaatgaatattatttaaggggatattttaaagccaattgagaaaattgaattaaaaaaagagagagaggaaaatgtgatcggaatgtgaataaaaaaattaacaagtgaaggcttgagaagtggcgaatgaattggcacaaattgctgcctcagacagaagtggccatcaaatggggcttaaaaactttttggaggtgctgcaaaatttgattgaacttacaaccgaaattgagttcgaagagcgcaaagccgccctatcacgggctcctttccgagccgatgtggtgatgccaaccgggttatggcgagactaataaaatataatattgtaaggaagaagctggctgggcggttaaaacgcggaaagcgggggttaataagatccataaaagaaagggcggatgtgcctcggtagcttaatggtagagctgcccacggaaagggtgcatgagtgggttcgattcccacccgaggtttaacattttgcccatttcttattggtagcaccggatggttgccccaccgcgccagcagcaattaactaatggaccgagggaccggtcccgatgaggatggagctgtaaggaagaagctggctgggcggttaaaacgcggaaagcgggggttgataagatccataaaagaaagggcagatgtgcctcggtagcttaatggtagagctgcccacggaaagggtgcatgagtgggttcgattcccacccgaggtttaacattttgcccatttcttattatatagaccttttggctacgccgcccggctttgctggcccggtcaatctgagcggtttccagctggacgttgagcgcattttcgatgacgagcgggcggaggacgaaagcagtgacgacgacggcggtgccgacgcggttgcacgcaccgttggcggtgcccacattggcacagaaatagggacggcacaacagcaacaattgttggatgtgggcgccatgcttgacgaggcggcggcggcacaaattggcgggctaggcgacaacaatggcagagcggacgctaccgccgccactgttcggcatcaaaaagtggccgtaatcgccgccgagaagggacaccaaaacaggaggcatcctgaacggactgatgctgtcggtgttgacaacgaggaggaggaggtaaatgcacttcatttcccctcgcgtcttttcccccgaaaatttaaaaaaaataaaatttttgataaccaatggaaatttttataagaaaattacaacaacaaaaaaattacatcaatgcccgtaatccaaaaatggtttggnggagggatgaaaaaaaattggaattctcaaatttacggcttaattgtcaaaaagttcaaataanatttcgaagaaatttcccagatccttttcacattttcatccatttcacagcagataatcgcggatgatgccgctgctctgcg

SEQ ID NO: 15318 - DNA, 1399 bp, Heterodera glycines
ttttgaataacataaaacacaacaaatatataaagagatcaataagacacctgaaaaacttcatcaaatggaaggattatatactttatttcccatttaaaaaacatagaaaagcaataatgttaatttggaaatgtttgattgccgaatgatgctcatcattaattaattaattgatccgactctctctctctgtgccaatgttgtcatatgttccgacttttcaaagctcatccgcgctcggtttgatcagtttgtgcagctcaatgtcaaagtagagagtggcgccgccggggatattgtcacggcccttgtcgccatagcctaattatgataaataggatgaattcaatttaaaaacaaatgaaaaagcataagtaaacagcatgattaatatttatcaagggggtggatgacaatttgaattttttcattgaatttatattactttttaatagatttaagtcgaaaatttaaaaatttcacgagcaaactttaaatttcgattattttaattaacgaaataaatattagtgggtgggggtatccatccgaccattagtctcgaccaatcgtatcaagcaataactaattgacaaataattcccacccaatgcggccgggatcacaacgcgacgacgttcgccctcgcacattgaggtcatggcacggtccattccggcgatcacttcgccgtggtggagacggaaaatgaacggcttaaatggggatgggatgagtgagggtaattaaatgaacaattttggctcaattaaaaaaataattaagttttgggccagagaatgtaattttttggcattgcgattcgtttagtgtgtattaaaagtcaaacaaaaattttaaccaaatggcaaatttgaaaaaaaagcttggaaaagtttgggccggtaagttggaacaaataacggatgaaattaggttgtttcccgaccttcggtaaaagaaatgttgtggaccgggcacaaatgcccgacaaatttttcaaaaatgacgtggatgaaatttgttgcaagaaagaaaaaagcaacagaaatattttcaccgaatttatttcccgtcacccgccctgcctttcccaccgtatattttccccctgaaaataaaaaaactttcaattaaaaatttttcaaaaaatcgttgaaaattttttatgagaaatcaagaagaaaaaaattgaaaattttcagcatctttttgaaaaatttatttattttttttgaaaatttcatattcattcaaattttggaaaaaatcgctagaaaatttttcaatttatttttaaattttttcgggggcggggggggggggggggcgagctgctcccgtgctatggtctcttcttcatactttgctgcgtgaagaagacgagtcgatgaat

SEQ ID NO: 15319 - DNA, 2729 bp, Heterodera glycines
  unsure (1)..(2729): unsure at all n locations
ttttttaatgaattgattgatttcgtttacccggctgtcaatcgcataattaaagcaaactagggagggctactgtaattatgtatatgtggtacggtttttgattntcgctcggtaattataacttacgggacanttgattcgcccagcagctttatttaatttaacagagactattgaatgtgtggctttatcacaatttgtttatggcctttagaaatttggttatttgtttgtttgtttttttgaaaataaacacaaaaaccataggggtntgtttatctttgaaagtcattccgaaaattttttggacccaaactttcttgtcttattgttagaaaaactactgttttttaggactaaatttatggaattttccaccaatcctaattaaaatccgtattggatgttacttagtttttagagctgacctataagttatttgactttccttttcattgttgagaaaatttcgacccaatggttgatttccaatttttccaaccctgataaataacgatttgaaatctcaaaagtttttgccattccgaggctccttcaaatgtgccaacccaaccacctcaatttcgaggccgtcctcctcacgccatcgtgggccgggcgtcggacgaaacaggtcgacaagttgtacaatgtaatgcagcacctggtccgacttgatgccatccctttttgaaaaaaaaatattttcaaatttaatttttaattaattttttttaaatttgttattttcaaatttaatttttaattaactttttttaaaatttgttttacctctttcgcccaccgtcgccgaagcccaactttccaggaatggtcacacggcgtttttctccaatgcacatgccggtcattgctctgcaaatacgaaatttaaaataaatgtaatatttaaatttttatttcaaaatatttttccaaaatattgaaattcgaattaatttataatgtctagtttgatcaaaacaatggcatttccgggtcaaaacaatggcaccttcggatcaatgttaacgattaattatcccaaaaatatgcattttattagcctcccaggaaaaagtcataaattttcaattggcaccacctgtccatgccttcgatgacctggtgcatgccgagcgtgaacgagtacctgttcaaaaaatggtaaatcattatcccatggaatgagaaaaaaatagagtgaaaaccctctgagggtgtactgtagcggttcctacggtttttcgccgaaatttgatccaatttctttgccctccggatcagtcagtttgtagtactgcttgaccgtgtcgcccggccgactcttcagagcgcacttctcctgcgcaattggccgaatgattttcacctcaaggccatcgtcgtccttaaaaatgttgcacagttttctgtatatatttaaataaggacaagattgcgcttttcccgaacgacaattgtactgtaatcctggcccaatttaaaaattcatggggacttagtctgcgcttcagccctgatcactttaattatgaaaatgaccgcaactgggaaacacggaggagcaatgtttagtcccgattcaattaacaaggaagtttcgtaaatgggaagattttgggtcctttttgttccgatcgaaccagcagcacttaatgaatgaatgcacttgccttccaggacagtttttgtccttgaaaatctttgctgctgctgtttttgtctgcatccgctgctgaagaagcactgtctgtcgcagaataaacaacactggccgtgcaaccgatcagaaacaagcataaccgaatcatttttgtttatctgcttgcttaacttagaaaagaaaaaataattaaaattttcaattaaaaattttttatcatcaaatttaaaataacctataaacatgcgcaaaatgaatgatttttttatgtaaaagttaatagccgaaaaccgaaaatcatgcaattttttaaggagttgcttaattgcaccttaattatatgtatccttgaatgttaggggcataaatgccgatgaggtcgaggacagaacccgggcatggctgaaaaaatgtccgggacaaaatttttcaacataaaatttataaaaaaaggtgaaggaggacttctcggccccatttgctgtgcaacgtaccaattagttattcccccgattcctctaatttaattatagcaataattattaaataaattgggaatcatttatttatgaatggagagagatgcccaaaatggcagtgtgtttaaggggggacagcagcagaaggacacgtctccttcttcttcaccaattttgcgctgggggagatttgtgtgtcgtgtacaaccaccacaaccgccgcagggcagcagcagcgcaaaagtgacgctaattaaatgccctgcgccacgtcaccggaggaagagaggcgatcgatcacctccattctgcccatcccccatccccccagcctaaacagagagactgatcactgatcagcggaggagggaagctgagtgatcactctctctctgctgatcagcccccagtgggacagggcagcagttcggcggggtggaaagtgttgtgtcgtcgctagagaggacggatttctgccgctaattgtcgtccgtctctccgcttgccgccggcgtcttcgtccgttccttcttccacctcacaccccctgttcctccaatgatgaatgaatgggaatatgt

SEQ ID NO: 15320 - DNA, 2987 bp, Heterodera glycines
cgggaacgggaaaactaaaatgaacggtgcgggattcccgacgtgattcccgtctttttcccgttcccgtaaaaatcccgtcaattttaacgggaatcccgccgcgaacgggaaaacattttttcgaaaaaatattgatttttttctaaaatttaatttacttatatttttaagtgaaaatattattttaaataattaaaaaaatttaattttatgtaaatgattaaatattgtatttattaaagaacaaaaacttaataaaatttattttattcccgtttttgtgaaaaaatttacgggaacggggttcccgtcttttcccgcgggaatcccattcccgccggtctctacttaaaataattaatttaaggccatcgacgacattagcatttccccgaaccctatcgggaaggaaattttcataaaaaaaactaaaaaaaatggaacttatcaacaaaaagaaaaagaagtcagaaattaatttaaagactatcgacggcatttgcaattcccagaatcggttcggggagaaaatttttatcaaaaaacttgagaaaaaagataatagaaatttttaaattaataaaaattcttatcaactcatttacccacttgttaaaaaattttaaaaatattttatctaaatatctatcaaatttttgatgaattcaccttgaaaatgtgttgatgaatgaatgcctgatttttattgtttttttcgccttttttattcatatttcgtgggtcagtccttcgcatttcattttggtgttctcttattttaaaagaatgcccgtggaatttcttttcgctaaatttcagacgtgcagttggttcaaattttacataaattttcttaacactcgcttctttggcatccagcctgttcgtggcaaacgaataagcatttgcattagctaaatttattttgaaatatgcactgcataattaaaagaaaagattttaaataaattgaaagttagggcaaaaactgattgcagaaaattgaactttccatcatacaagatctgctgagccagttaagtcatggtatcgggtagagcccggaaatttcaaatttgcggtaaatttcaaaaaatttccaaaacaataaataagtgttcaaatatatttttaagccaaaaactgatgaaaattaatatgagaaattgacatcaggaatagaattatgcaaaaatatcaacatttcagccgtctctggggaaatgcttgaccgacggtagtcatatatgtatcttgccacactaaaaagctgttcactggaaatgcttgtgcatgggggtgacaaataacgacgcgcaatcattgaaagtttaggaaatttttttcattgttgttccaccactgcaacggatcaaccaacacccatgaaaacacaaatgtcgtctttgtatgtgagaatttcttccgacatgcccatattttgaacgtgaaacgcgcgcaaaaaatatgtcgctttcagaggaaaaacgatccttgatgcgagggtcgagaaaagtgctcaacatacaaagtctaaatgttttatttataaaacttactagtattttaagtaggtatatacctattttctttttgtaaaaaacgctttttaaccgcctcaatcagcctggtacgcatttccctcacttcgtttagtattttcatttcgccatcaattgtcacagaaagatcacctcgttcccaagtggagaccaaagtgcgagtgagcggaatcgggcggagagtgtttttttacaataatataaagagacttcttcggtgggtttagaagttcctgaaaattttaaaacataaaaatatatattgaagaccaaattgccttaattaatttgagaatggaacattcttcttgactttcggtagttagcaacctgaagcaatttagctttcggtaacccaagttcgtcttgaacaagtcatccatcaattttgccgaatgttttaaagttccaacaatttttcgacatttttcgaaaatttgagccatttcgtctttttcttttgaaaagctgtcctttacacataaattgaggtcatgagcggcacagctgattcgttcaatgtgaattaaatccaatgcctctaaaaaatgctatttgaaatgaaatgttgcataaactaaccttaactaaatttgctgccgaatcagttacaaaacaatagcattcttttacattccaactttcgagaagagcttttaaaatttcagagatgcgttccgaagtgtgggccccatgaaatttttgaattgcgagtgtaaattttttgcgcgaaaattttgagttgacaccaacaacagtcaagctaaatttttgaatatttaatttgtactaaacaaataaaaaccttataaaggcatcttttgttgtatccgaagtccaaatgtcagaggtacaacaaatttgctcaaacttcgcaatttctcccttgatctggtgtttgacaactttgtaaacttaggcagaacattttttcggtaatggctttcgtcgcgtaaattttccgaaggatttcggagcatttttttgaaagttttgtggttgattatttggaacggcaaattgcaacaagcaataaaattgataatgtccttgtccatcacacataatctgactaaaatggtaattaattaaaatcacaattttattcttgtacccgaactccgtgttgtataatcagtgatttttggatcatccttctttgacttgccttcatccagctttaaatatttttctgcatacggcgtgtctttgtgcttggcaaacagatggatcttgagccctttgagactccgattcgacaatttaagagcaaaattactcacgtttttttgcttacactccaagcactcgaccgaatcttctttaattcgtttaaaaagatagatttgccaaattggctgggctgataataataacttaaattaaagtaaaaataatttttatttaaattactttgcaaaa

SEQ ID NO: 15321 - DNA, 1528 bp, Heterodera glycines
  unsure (1)..(1528): unsure at all n locations
aattgtaaatgatttatttgtcgatatatgcatctatcatttatgataaagttataaaaaagtgtaatgcaatgttttcctatcacttcctccggtcatttctctaattattccacttctgatcactctctccgatcactgcccttccgattgcttctcttttggtcactctctccgatcacttttctgatcactcccactgtcccctccaattgctctgtccttttttctgatcactgctcttttcttcccgtccgttacattacacaacagcacttccttttgtgcaccgccacttcaccgccctccgtcgatgacggtgccatcggtggcacttccgccgttccatttgccttttcccccgtggcactgttcccggccaaaactgcacccgctgctggcgcatcgtcgagcaacgcattttcactccgttgagcgacagagggacgacgattgaaattaacacggaccttaaaaataaatgatgacaaattaaggaaattaatgagacaaaaagataatcagcaaaaattaatttacattaaagaaaggaaagaaaatgagacagcacaaagaaataaataatgtgacttacaatcagttaattaacgagaccaaaacaattgccatttttattaaccaaattaattgatttatttttaagtaaattttgaaggataaaaggctttttttcttttaccataattggcacttttttgattttatccttttccctatcaatttctttgtcatcattaggaaatgccgcgcggcattattctatcagatgtagaaaactccaatttcactaactttgtcggtaaattcgcttttgccctcccaccgacctgctccaaaagcacttccacgtcgggccaatcgctcgaatcggtgcacaaatacgaatagagaatgtgcccgtgccgattgatcaatacgcatccgctgtgttcgccgatcgcttttttctccgccgtcggcgtttctccggcggcattcgccggagactgtttattattattgctatttgtgctgttactgttgttgttgttagccagttccaaagtgtaatcattgcacagaaattccgtgtactaaaatgcaatttaataattaaatttattttattattttattcttttttggcatttttatttgatatcctctccgaattttgtcaaattatcttttttagtctcagcggaataattgtgccattctctgctggacaatttatgaccaatgcccgacagatttatgggcaaaactttgcccacccatccccagcagaaattggacgtaaaaaaggcactcataagccattggtcggtccattggtggcatcttcaaatgccatcagaaaaataagcgcagcggtgctgagacaaagaaaatttacaagttgttttttaaacggtcaatcgtgtagctaaatcttttatggcattcgaattgctttttttanaacaaagtgcccaatttaattccagggacggtctcgtccatgagggggggggggggggggggg

SEQ ID NO: 15322 - DNA, 1005 bp, Heterodera glycines
ccccccctccctctctccccctcctccttctccccctttccctgcctcgccacttacccctgcccgtttcgccgagttccgtctggatgtttggcccggccacccgctccaactcgacgtcaagccgtgccaaaaaagtctcccactcgcgaaatgcttcccgaagttcggcaatttttctccctgcaaagattgaatttggtttttccttttggccactcggcccactgacctctcctctcatccccggcacttgccaattcttccatcctttgctcaaactcttccgcctttttcacttccaacgcatcgtaaagtttggccaattgtccgccaatgtcattgatgacgacgcgactttgcaaaaaatttgcagtgaaaatgacagccgagtgggcagagatcagctgaaattttgcttttttaaaacttggcattggtccaacaccctttttaaagggcacatttgtccccccccccccctcctccgttgcgcaccccctcccctcccccaagggatgcttttgctccctttcttttgtctttttgtccctcctccgcttttacgtccttttcatccatcacccgctcaatttttctacttttcatccatttgtactaagttttgttttcagcaagaagatgctccgtccgatgcgttcttccgttggccctctcttttaccccatttttcctttttccctccattttcctttctcccgcttatccctccgcttcttcatctccctatttctgcttttcaccctccaattcgaccccgtcagtcccctcgaggcatgtccccttcccccctttgtccccccaattccctcactttggcaatcctcagattttttgggcggtgcccagccaaacgtgcgtgaacagaacggaccccccgttggacccggcaaaattcggaattcggacaaatgccggacaaaagtttcacgggacagaagtaaaaggggaaattgtgttgctattgaatattaacaaaaggtc

SEQ ID NO: 15323 - DNA, 3970 bp, Heterodera glycines
gcctgcggtcaattttttgacacttcatattttttcagtacggggccgtacttcatttgcccataatctacaatttcaataaatcaatttttaattaattaattattttaattgtttcaaccaatttttaattatcatttatccccttaatgatttcaaatgctcatttttaccgttgcatggtcgagttcaagtccattccaggctttgcaccatgcaaaggctcattggtcaaggtcagtccccaaaaattgatgttatgggatttgtattcctcgaaaaatctaaaatttaaaaaaattaaaggttttcaattgttttttcaagtgttaccgtctaaagtaatttgcaaatgcgcgatagtatggaccatgcaattcgcccctgaaaatttttttttatatatataaaacatttccttggctttgtgatgatcttttaccaaaaatgtcatttagattgatttgtaaaattcagtcttaaaaattaataaaagcaaaaattaacacaaataaaaaatttttcaaaaaattgaaattatattttttattttgggaaaaataaaaattatttcttaaattaaggaaattaatttattgtataaattgtttaatcatattttagctctttctttctttacttaatatttcacattttctttgattgaaaaaattttttatttccaataaggagaattagagattttcaatttagattcaaaatttaaaaaaaaaacgaatttcttttactatactaaattttagaattacggttcaagtaactaatatagaccaacttgatttgtccagcgccgaccattcgtccgttcgttttcatccaaccaggcgcggaccaaggactggagaacaagcgtaactgatcaccactcatttcaatggcttgttgaatgttggggatcttcaaaatcaatttgataatcaatttaattaattaacaaaatagttttaattacaataccttccattccgtgtcttcctttggtaatgcaaatgtcttcaactcaaagtcgtccggcgtgtcgcagtaagaatattcgcgcacggagaagtcacaagcacccatcacaacacggccaaccgtgtacttaatgcctttgaacaaattttaaagtgtgaatttttgggaaattttttttattaggcttagcagtaaacatcctgtcagtgtttttaccatggagttgggtatttttaattcggaaatattagtaagtcggaatttttatgccgttctaacctctattttattttctattttttttattatgtcttccataaaagcgtaaaaaatgtcgctgaaatattaattctcatatttttgaatgctgataagaataaccagcaaaatagtttaaatctaattacactaattttatgaaaaattccaatttaaatttaaggtttctattgtgacaaacccaccaatgtccttgtcaaaataggcacgcaacagtgttgcacgcgtggtgttgctcaacgcgttcaaattgacgccagccgcgtcagtgaacgcaccgccaaagccaagaactgtttggtactcttttgaggcatccacaacaatttcgatcccttcatctgaaaaataatgatggtttttggattttttttttcatttgaggaaataaaaattattaataagtaacttatttaaaaaaatttttttagcattttaattttaaaaatatttaaaataatccaacattttttttcttcgaaatttgaaaaaaattgcattttataaggagctaaaacagcttcatcattatttacttttctaagggtcgttgggacttatgaattcgctaaagcggatttcttacattttttttcaattttttattcgtttttcatgcctgcttcccattaccggtaaaatgtcttatattttagaaaaattgatgattttatgttaaaattaagtaagcaaaacggaacaacaaggtattttaaaaaaataataattaattgtttatggttcgcttaatcaatttcttttaattggcatttgccaggtctgaattattactgccaaaatgtgctggtttttccataccttcgtcatccgatgagcaaatgcgctgcggcttatccttccgacgattttggtcactgtattccacctcaattggcacttgctgttgatggagacggaatttggccgggtccgaaatgtacacaatggcattgttgtcatttttgcccagccgatggggcccaattggcaggtcgcagaatgtccgattgcacacacagacaaatgattcggagccgggaaagcgccgttcggcacagtccgaaattgaaacggcatcactaaaatggaaacaatactttaaattaattttttaaatcaaaataatttattaattaagaaaaaataattattaaataaataaaaataattattttagatatttaattccattaaaaaaagttttactgtttttttaatattaaattataggcgctatcaccttccaatacagaaaaagatgaacacaatgccggcaatattgacaaaaagtgaaattctttccatttttaaatctaaaaataaataatttaaagtttccgtttaactcaatgaaaataaattaattaaatcaaaattttagggaaagggaggcaaaaataaaaataacaaaaattgtttttattttattgaatataatattttgcgagcgttgaaataaatagctgagaatgttaatttgttgggccaaataaacacattaactaatacaaatatcatcagcacatgaagcacaaaaaagaggagtgaaaaggcagcaataaaattgtcaaaaataaaataaataaatgataaaataataatgcttttttattgtgtctataaatggaattaatcacattggggagaaagaaagtcgacgggaaaaacaggggaaaacagctaaacaaaacaaaaaaaacacagaatgaaatgataaataaacaaaaatattctagtaaaactgattgacaaaataatttgtaaaattttgagaataaattatattttataaatccaaagccaaaaataaataaataatattatttttttcaaaaaaaaaacaaaaacaaaagttgtcgagcttattgtctctctttttgagtgcaatcatggttagatttaaattataattatgcattcatttctttaatcactgacgccttacaaaagtgaattttcttagacaaataattcgaaaaggcgtacaaaaagggcaaaatgactacaatttataagcaaaaatcgttcacagaattttgcgcgggaacaaagattaaaaatgattgaaatgaaaaatgtcaaaaaagagaaaaaacgatgattaataaaaaattattaataaaccaaaggataaaatataattttataaatttaaaaatgtctcgaaataataatttgacaggcaaattattttgatcctgactgatgacagagctaatttgagttaaaatcataaaacattttaaatttgattattaattactcaataatttctgagaataaaaacaatatttttttgaaataaatgggaaagcaacaaaaaagattttttacaatgaacaaaaacaggattttttactgcagactatgtcattcatacgcatcaaattctttatcgacgttcacattaggattatgagttccgaaaatatcaaaaatttacaatattaattgtactttttcattttttcattaaaaaaacggcgattttttacatttcaaattaaaaaaaatattttttaattaaatgataattggtataatcgctaatacttaaatttttcgatggtttttgtttctttgtcccaaatttcttaaaaaaatctcatcctctaggacaatttaattttgataatgatttaaattttattttcattgtttatttataatgtctgttcaagatatttgtattcaaaaaacaatagtttaaagt

SEQ ID NO: 15324 - DNA, 3705 bp, Heterodera glycines
ttttttctttttttaattggttttttttttggaaatttttattaattttttcctttgtagggtttaaggcaatcaaaggacttttaacttgaaatttttaacaaaatgaaacttaataaaaattattagtagttaattattgtaaaaatataattttttataaataagtttaaattcatttattaaaatctaaaaaataaggataagaatatatgtatccttcataattatatatcattttattaattaaattttcaatataaaatttctttcttcccataattaaaatgtttttgcttagcaataagtaaaaaattccatatatgcacgctacccctctccgcctcccatctgatatgaaattcttaacgcttttttcttaattattattatttttttcatttatttccttatttttagctatcatcaccattattattattttactaaatttattttaatatttattttttctacaactcttcatctcttcattaggcttgggttatgacacaagtaccatttgccacccctccagtcgccacatgtcaccaaacccctcaaataagttttgggttatacgaccaccatttggcaggttgccaactaaattgttcatgctatgccacactacactaaaatgagtcgccgtctgaccaacattttatgccatccacggtcagtcattagcgcttaaatgaccaccagcgggcgctcagatagcccatgcgggcgcttaggtgacacgtgcgagcgctcaaatgacccggcatcgcttccctcccgaagctgacgcccacccctccccttttaaacatcagcgaagccctataaaaacattccaataggcatccgccaaaactaaaccaatttctcaaattcaaaaataacgaaaaattaaagtttgtaccagattcaaaattttgacccaggattgactactcaaggagtgaaacggtcggactcaataggtagcgccctctcgagcttttttatttgactattataatttgtgtttattattattattattattattttataatttatcaatttcttaaatttttttcatttatttttaaatttttatctattattttaaatttatttattaattttttaactattattattttaacaatttaattttaattaaatttaattttttaatttatttattattattattatttatatctttgtgtggtattagagagagcaagagaaaagagagagagtgagagagaatgagagagagagagagaaagaaaaaagagagagagagagaaaaaagagagagagtgagagagagataagagagagagagaaaaaaagagagagggtgagagacagataagagagagtgagagagagaaagaaaagaaagagagtgagagagagagagaagagagaatgagagagatagaaaaaaaaaagagagagagtgagagagagagagaaaaaagagagagagtgagagagagaaagaaaagaaagatagtgagagagagagagaagagagaatgagagagatagaaagaaaaaagagagagagtgagagagagaaagaaaagaaatatagtgagagagagagagaatgaatcttagcttttttattcaattattttttaaattataaaaaaaattttttaaatttatttatttaatttatttataatttattatttaatttatttttaatttaatttattttttattaatcaataaaaacccttcaataggtttaggttcactcccgcacccattcaataggtttaggtttaaatcaataggttttagttttgggattgtttatttatttttatttttattatttatttatttttaatttaatttaattatttaaatttattattaatcaataaaaacccttcaataggtttaggttcactcccgcacccatccaataggctttggtttaaaccaataggctttggtttggaacggtggttttccaacaacggaaatcgcccggagtaactacttcatagatacaaattgattgaattaaatgcttttctatatttattagggatttattttagataattaattataaattagttttatttaattaatttgcttaaatttttgcgggtttcgcgcaacgaccttgcgccaggaattaaccctagttttgacaaagggtgtgcgaaacccaaaaaaataattttcgaaaacgaaaacgaaaatatttatttttcacaaaaacgaaacatgaaacgaaaattaaaaattttgaaactcgaaaacgaaaacgaaaaaataaccgttctcgtacgaaacgaaaacgaaaaacacgaaaattttttgaactaatttaatccataattaaaaagataaaatttttaagttatatcctcaaactaagggaatgaaggtcctagtaggtggaaaagcagggctctagtaatttaatttcatttttcatttcaatgaatttttgaacaatttcaaatttatcttcatcagtttttgatttgtagcatttatttttttgaagaccaattctttaatccatttttgaatttttgtacaatttcaaatttatcttcatctttttttgctttgtagcttttgagatgtttgtttttgaatttaatccatcttataatgtaagtaggtaagtatgatttatgcctaaacttttcgctattttcgtattagttttattccattcttttttttaatattttcttcacttttgcttaattttctctccgatgttccaataatatttttcagagggcataattccttaattagaaaggcgaaacgaaaattcattttaaaatagagcaatgataagacggaaaaagttaaataatcataaacagcttttcagctgttcattttgacacaaaaaacgccaatttcaaattttccaaaaattttttcggtcgttttttttggtataaaaccgaaaaatgatcaaaaaatcgaaaaagtcgaacccaaaaccgattttaggtcgtttcgtgcttcgtgttttattttttgattcgcaacaaccctgctgtcgaagtaagtggttagtgtcgtcaccttgttagaaaattttaataaatttctaatattaattgttttaagaaatttaaaaactgttatttttagcactttttttgcttttattatttttatttaagtattattatttataataaatttttgaatttttttattttgatataattagtttaatgccaatgtttggaattcaccctttcctctacaatttcacagaaaagtaagttataactacttttattaaggacaaaactatttttctggacatataattttttcgtaaataaatttttttgagtgattttttctaaaataattatttactattctattatgacagacagaattacccacaaaatttatcacttcaataataacaacaaaaatacaccatgccaacaattgtggaaatgaaaaaaccaaaactttagagataataatcgaaatgacagcgcaacatttcagtgtgtaaaatttgtttttgatcaaaatcattatgaaaatccattaaattttgaaaacagaggggaagaattgaaaaaatttaatcctttttaaaatttggcattcttttaaaaaaaaatccctaaaaaatgtaacagtgaaacagtaccaaaaagactgatgctaaccaccgaccaattagattcataatca

SEQ ID NO: 15325 - DNA, 3789 bp, Heterodera glycines
  unsure (1)..(3789): unsure at all n locations
tttaaatggttattttttgggaaaaaaccttcgtaaagtgttaaataggcgtaaaatggcataaaaatgacctaatatatttataatcaccttttaacatttaaaaaattatttttggaggggtacatttaaaaaaagtttttttttttaattttttcactagaaatttctaaaaattttcaaaaattctcaaaatatgtataaaaaaataaaaaatttgccaaaatccttccgtttcttaaccctatatttaatttctaaatttcaaaggtcacagcaacaagcacaggaaatggtggcatcgtcggaggaggaaggtgcggaccaaactgacactctttcggcatttggagacgacgaaatgctcatgacagagcttctggacgaagtgccaccctttgacctaattaaccaaggggtaaaaatgcataaagtgatcaaaaattaaattagaaaagtcattaagataggaatattttcatttcctcagttgaaataggaacccaaataaaaaaatgacattaaaattttccttttccataaaatttgggtacgatttgaagtgatcattttgaaaaacctaaaaccgacggcgccgaaatttttgaaattttaaaacgcttatgggagggtcataataagataaaaatggaaataatataatgctgagaaacaattgttttgaagattgttgacaccatacacctcgcaattatggctcgccatggagttttgggcggcaacataagaacagttgacgtgagagtagttgacggacacggcaattgcatctacactccgccacctgcagcgcatgtgccgcaactgttggagcaattcatccaagacgtgaataatgtgattgggcgagcttcgacaggactgatggaggcacgcgttgttgccgcgtgggcgcattaccaattggtaattggggtattacctttaccatttaagacaaaaatttgtttaagtttgcaatatttttggccaattaaaagtttttcattttatttatcaattttgaatcagacttttgtattattaaggctatgctttaattggggttttcgctttgaaatttttgattgttttaccctattttcccactttttggccttttgaaaattaattgaaaaaaagaattattccaatcttaatgatcaaacgcacgcaagtttcctaaaaatgaatctaaaattaaaaaaatgaaatttttctacataaatattattttcggaaaatgaaaaaaataatgcatccacaaaataattttttgatacgtcaaatttttcataccttgttcaaaaaataagtcaattcgtcagtggaaattcgtcagaaaatttttttgagcaatgttcaaaaattcttgcgaaaatgattgttaaatgtaataaatataatttttatagattcttatcatttctagttactttatacttcaattaattgactaaattctttaaaaagattatttcataattattataaaatatcacaaaatattaatcaacatttttagcgacttaaattaattatcacatggttttaaataaatctgtggtttaaaaataattagcttatgaattagttactgacggattgtccactgacggattgtccacttactgacggattgtcactgacagattgtccgggagccatctattttagcgtaaacctgttaacaaagcgcatacaattttcggtcacagcaaggcaaataaacttcaatgtaatttcctttttgcgtcctcgcgttgcatggaaaaatgctgctgttgttggggtctgggttccgaggatctaaaatttttcggaaatcgtaaatcggaattccgggggtcaatgccttccattcctttttcttcttctaaaaaatcccccaccctgcaaataattgttttggttctttttcctatccaaaacattttcaaagatttttaacattaataattttggccttaatatttttaaaatttttttcaaccttaattttggcacatgtattcaaaatcgatttttaagggtatagtttataaaattctcaaaaactcgatccttaggggtgtatttcgtttttttttttttgcatttttcttatgaaaatttgctaaaaatgaccaaaatatgctttaaaaacgcaaaaatgtcgaaatatgcacttattctcgaaatccccaaaaatgcttttatatgcattatacgcactaaaaactttcaccaaaacaaaaaattttaacgcagaaatgctatttttgagcccctttcttcatagcatatgcttagaaaaaatatgcaaaatcatacaaattataaccctactgattagagaggggatttttatatgctaaaaatcctaaaaaaatgtgccaaaatatgctcgaaataggtattaaaattgaaaaaattcggtgtctttatgcataaaaatctagaaaaatttctttcattatcattttctccccattattgtaaatcaatatatttatcgatttcattaccatttgctggattcaaattcgggattcgaatcgctttaaatatgtgttttatgctaagcgcatgaaaggctatggaatggttttcgaaataatttttggataagttgacaaatcatcgcttttttgctgagatgtcggatcattgcgcgccaaaatgccagttttttaatgctgaaatattattatattctgctagatcccggtgggaaaaattaataaagtgattcgaaaatataaagttaataaattttgttcgaataaattaaaaaaataatttatttgaagtaatttgaaaaaattttctgtttttcgaccctaaatctgttttttattccaacttttctgcttgctaaatttttcaacatttaataaaaggattgcccttcaaatttgtaattaaaaatatttttgttgagtttttaattgaattttcgaattccctctcccgcagggattcccgtaaaatttctgcgggatttttacggaagcggtatttttacgggattccctttcgcgactcccgtccaggaaaatgtgaactctcgctctcgaaagtttttcccaaaaacgggagtaaaaatgcactggtaagaattgttatgtttatcattttcaaaaaaaattattttttaaaggaatattgaaaaatttgacatatcaaaaaatggggtaaacccaactcatctaaacccaactcacatgcacaaaaaatgccacggccaagaccgcataagtagaaaggccacgacaattactcgttgtgttatggatgagttgggtttggatgagttaggggtgactcaaaaaaatcattttgtggaatcattatttttttttctaaaataatatttatgtataaaaaattcattttttaaattttaatgttcatttttaggaaacttgctgagtttatcggggaagggaccagaaaagtcgggacctggaccaagttacgacagggaccgggaccgcgagaaaaactggtgccgagaccaaccaggattttttccaagaggaaaattttttgaaaaaattctaaaattttaatctaaattcattaataaaattaaacaatttaaaatatttctctatgtaaatgatttagtattttaactttcatggaatttaaaagcattaaggttttgtatcttatgagtagggcatggctttcttcagcaattattttcgcccttatttcgcaattttaaattttttcatataaaattcacaatttctttaaaaaaaatgtaatgaaaattttttttggcagaccnntgcaggc

SEQ ID NO: 15326 - DNA, 2154 bp, Heterodera glycines
  unsure (1)..(2154): unsure at all n locations
gttatacaataaaattagaataactgcagtaaagcatttatttaaacctgaaaaagaaatttttttagtccttttagaatagaaagaaatagagaaatattttattctatatctaagtatatttaataaaaatttaataaataatattaattttttgtttagtttattatgttataaattaaaaagaaaaatataaatttaatatgaaactcctaaattatctttatacctcatattatgaattttttttcaaataacaaatttattatattcaatatatatgtatggtatttttaattaatatcgctctcttggttcacggctcatttccttattttaatttatatttagtttattgtatatttataatttaaaaaatcaaaaatatttttaatattctaataattcattcaacttttacgatatcgggaatcgcccactttctttatttttgctccctctctattagacaaattctttaataaatattaaataacaaggtgaaatttacagtgtcaccttgatatttgaaaaattgtgtatcaaaattgcattcatttttgaataacttacatttattttatttcgtaaatttataaagatttattttctccatatttaatgataaaatatttgattttagtatgcttttgtttttatttattccttataatttacgtttttttttaaaagcgaaaaaaattttaaatgtaaaaaatattaaataaagaaactgcgcaatcattttcgagtaaatgaaaaatgttctccatttctcgtcttagcggtgcattcacaacgttttttttcgcgggaaaattattcttcaaataaattgaaaaattattcatcaaataaaatttaattataaatttttttactgatttttataaaaagtatttttcaattaaataattatatttcatttcacttttttgaatattatttatctagctaaaacacaattcccttccccgggatttagtttagcttatttttttcgttttagcgttttcagtattttatttttagcgttttcaatattttatttttcttgtcgtaattagataataataatagtattatattttattgcatttttcgtcaaaattgttttctcaacattaatttccataactattctcgccatcatcagataaccttttctcattttttattttgcttagcatttttaatttttaattttctattaattatttttgatcttaaaagtttaaattaaaattaattattattctttctccatttctcgttttataggtgatttttcccagtgttttttttcgcgagaaattattcaccaaataatatttaattatatttgttttgatattttttcaattttaaaatcaattttctaaaatttactaatcgtttttacaatttctcaatttcactattggtaaaaactaaatatatgaatatatattttaatgtattttaggattgaagtttgatttaatttttgcccataaattataatagaatttataatttttcattttttgtaattaacttttatttaattgatatctttatttaattttagtatattatcttattatttctagtatcaattttttaaaaacattaaaaaaatatttttgaaattaaagaacgcaatttgctcacgttttgtttttttaaatttatttttgttttttcttaatttttaatatattattaattttcattaataatatttccaagtccagaaagtccaaataattggtggaatggtcaattgtaggaatagctgaagaaatatgtctcaatgagtaaaggccctaacatttttgcggcttaaaagttgattgattgaaaaatgttaataagttttttgctctttttattatgtatataatattcttttttgtcttttttagttttattatattttgagattatttattttttaattctcttaaatttatttgtattagatttttaggctaatatttgaaaattaataactcacttcagcttaggttaatttaagtaaaataaagctttataaatagggaaaaataagaagaattttatggatttttctcggccgcttcgcggggccattgggttttccccgcgcttaaggtaccagctcggccgcttcacggnctcgtacgggcacgg

SEQ ID NO: 15327 - DNA, 1379 bp, Heterodera glycines
cccccctgcccgctttccttttttctgcgcatttatttatttataatttttaattagagcgagagtagtgcaagagtagtgcaggagttgttcatcagtggttcattagttgttcgtgagttgttcaaaagttgattattttacataccgagatgcacatgcagtatcttggtgagagttgaagttatatccaaaattaaaaaaccgaaaaaaaccgaaaccgaaaaaaaccgaagcaaaattttcggtataccgtttcggtttcggtttttttgaattttttaaatcttttcccaaaaaaacaataaaccatttttatcaatagaaaaagcgaaagatcacctctgaggtgggggaggggggtgtccggcggtgccgaaagtttttcggaattttaggaatttttaattatttttattaagaaaattgtacaaatttaaaaattttcaagagtccccaattccccgagttagtgtcggggggtcgggggataaaaagtcggaggtagggggctcggggtcggggagcaaccctattataaacccccaaaataggtgctaaaaatggaaatgagttaaatattttaaaaatcaaaaatgtagtcaagtaaataaataaataaatcttgaatatgaatttttgataaaattttccatttctcaggggtttatttttcgtttttattgcatttttgttaataatttttttcaaaatagcagaaaatattttacaaaaaattcttcaaaatgaaaaagagcacaaaaaagcaataaatttattattattaacaggttatatcgctccaatttgattcggtttttttcggtttaaagtcggtcggttttttcggttttttgattatttcggtcggtcggtttcggtataaaacccgaaaaaaaccgaaaccgaaaaactcaaaaaattttcggtcggtcggtttcggttaaccgaaaccgaaaaccgaaaaaaaccgaccggtccgatctctagtttgaatataatgaatgtaattatcattctttctttcttctgaattaattgaattttcattttctttcatttaatattttaaataaggtctctccatccatcgtttagagtaaaatttaaacttcgattgcttaggaatttgtaaaattttaaattaatgttgattttttaaaaatttaattgcatcaattttagatttcataaatcttactttacttattgagcaatcataatattaatcacagcgttatgcttttattttaaaaatgtaactgttgttgaataaatgaaaaaactatcacatttattttgatacgaaaaattcttgaaaattttaatgaagaaagttatttttaaaccaacctattagttgaaattatataatttaa

SEQ ID NO: 15328 - DNA, 3077 bp, Heterodera glycines
attcttggactaattccttttttctcaacatcttcaccatttatcaatttgtcttgttctgtcaatgtcaaaagcaaatgaatgtgcggtagtccccttccttggttctctaccgggtacatccatgcaatcacttcaccaaagatctttttcttgcttatctcattcataatagctttaacttttaaattaaaaactctgacaaccaaatcaggtctatcacttgatgtctgttcatgaaacaaattgtctgaaatctctccccattgcgggttgcatgtcatggtcaaaaacatatcaggtttaccaaaccgtctaacgacggccattgcatcttggaaatgcttctcaacatatctagggctgtttgtcacacttggaggaagaatgaccttccttcccagtggcaagcctctttcttgtgctcgtctcattaacatattgtctacattcttatatgcatcagccaaaatctttttctgattactttttatccagttcattctatctccttcaatcttaacatattcatcaacacaatactgttgaaagagttttccaccgtacaaaatagggttaaactctctttctctaattgctaatgtgtaacacacatactgcaacctcgttactcttctgttactatttctatgcttcatttcagggtgccagccaagcgtaccacgcggataaaacagcgggtaagtcattggagttaccattgaattagtacaattcaaaatcttcaattcctttccacgttctctcacaacaatcttggcattaggtacttcaccgtcagctccaggtacataaactgcagcaacttcatttactcttggtacattgtaccccaaacgtcggtccaattgccttccggtctcaaacaaaagtttaatctcggttggctctctgttctcatttctcgctctctcagcttcatcattttcttcctctttcatcatcacataagcttcagcaaatggattcacatttctaataacttcataagcagtcctcagcaattggggatcaatagccacattagcatgtctcattgctctcactgcatgctcagtatctacgatgaaaatttgcccataagcaggttcatcgccattttctgggttcaaagccaaattcattctatgataaacttgaccataaatgcgaaagcaatacggtcctcggttcgggtatctatatctaagcggattcattgaagcaaatgaaacgctgctattcaaatgtctaatattctcaaaaaaattttcatgtcttgcatcaaatttcatgaacaaatctctcaattcctccggaaaatcctgttcaggaatttctgggacaaaaactttaccatagtgacagcaatccttgaaggaattgccgcgaccatgcactttctcttctgcaaaatgcagagcatcacaaaaatcacatctcatattcattgggctaaggctatgttcatgagcattctcgttagaccctgctgcataaacattaataactccttgtcgaatagctctctgtctaattcttttctgttctaagcgcaactgtttttccatcacattttcatttgctattatattgctatttctaattctcatctgttctaagcgtagctgtcgctctaacacactttcttcagatctttgactattatttctatttctcatctgttctaagcgcataattctttggtcttgtgactcgtttgctcttctcaatctttcgcgttctctttttcttttcaaatactcattacttcttctttcttcaaattgactatcactcatacgtgatggtcctgcaatggcaatatctaagctcagagatgcctggctggaaccttcatccacaaatcttggtctcttagcataactgtgctcctcaaacacagcatagtttctaatttctatttcattttcttggtctatgatctcaacacattcttcaacttgaacaaaatctaaatcataaacataatcataatctcgaacataatctaaatcatttattgaagccataataataaacctgaaaattaatttaaaataaaacaaaaagttttgaaggtattgaaacaaaaatctgttgaataattaaaattattaagtgtttatgttttctttaggtttttacattttgcaaacaaataaacaaaacaaaaaataatttaaaaagtccaatgatgagaccgtgcatgtttcattgcttcacgcttgtgtgggtttctgaaatttgagaagcacattaagtcacaaaacaaacactaatgttttatcaatgtcatgccagactttagtgtctcatacttaagtcacagaacaaacactaatgtcttatcaaaaacatgacacacataattgtgtcgcactaaagtcatagaacaaacactaatgttttatcaaaaacatgacacacataattgtgtcacactaaactcaaataacgaacactaatgttttatcaaagacatgacacacataattgtgtcacactaaactcaaataacgaacactaatgttttatcaaagacatgacacacataattgtgtcacactaaactcaaataacgaacactaatgttttatcaaagacatgacacacataattgtgtcacactaaactcaaataacgaacactaatgtttatcaaaaacatgacacacataattgtgtcacactaaattcatataacgaacacaaatgttttatcagatatttggctatttggcaaatttaccacaactcttcccaacccacttacaaaaggggccgccaaagttgaagtagtgaatttcttgaaagtgagcaaaaagttgagtggccgaccgacaggttcaacacttcagagatgaaatcacaaccaattgtaagccaacagcatttcttcaatatgatggttctcatttctaaattttacataataattaacataacaaagcaaaatataattcgaaacaaattaatcccagataaactttgatgaggcacttaaactcaatctgggcaagctgttgaatgatggacagggcagatttcaaacttgtgaatgaattcacagacgaa

SEQ ID NO: 15329 - DNA, 3731 bp, Heterodera glycines
  unsure (1)..(3731): unsure at all n locations
agaaatccttaaatttatttattcgtctaccaaattttccaaaaatttcccaaagtttcgtcatataaattggcatttccttaattcgttcaataaaaaaaatttcaggaattttacaccccaacggaaaaatacgcgctgaaaacggcccacaagcgtccgcgtcggcccaaatcgttgcgcatttacgagacgcatgtgggcatttccagccaggagcccaaagtgaacacttaccgcgattttgccgacacagtgctgccccggatcaagggacaaggttcgggaaagcggaaaaattttaaaaatcaaaattttttgagtccaaattttattattttttaaatttttccaaacaaaattttttttattgttagtaatttctgacgggtagggttggatgattgaaatgtggcattttgttttttaaattgaaattattaaaaaaatttatttctaaaaatccgttatggcgatagacattctgaatttcgattttaaaattaacagtttgatggtatttgacagtgttgccacacgaaaatttctttaaaaaataataataaattttgaatttggttgaagtacatcaccttttttttcacttacacattttaaaatgtcccaacttttcagggtacaacgccattcaagtaagtgggccggccattttcatccaattttaagggtttttgatcaattttcattttatccaccattttagctgatggcaattatggaacatgcttattacgcctcatttggttaccaggtcaccagcttttttgccgcttcaaggttttgcaattaggaaataaatatatacaaaattgggatttacgaaaaaaagaaataaaatgtttgtcgaatttaaatgattcactaaaaatggcacattgacgactttatgacaaaaatacaaaagcttggaccaaaaggaaatttcgagtttactttttttgcttgacatctgattaggaattcgaatttttttttttttgcaaaaaaactcataaattaggttttatagactttaaagtctaactagcaaattttggcggtttttcatacaaaaaataaaacaaaaagttgaaataaatgagccctaaagctcgtccctttttgtaatttattcctcttttttaatataaattgccattttttccacagtcgttttggcccgcccgacgacctcaaatatttggtggaccgtgcccatcagttgggcatcactgtgctgctcgatgttgtccattcgcatgcgtccaaaaacgttgcggatggactgaaccaatgggacggcacaaatgccgggtcagttttttttttttgtacaaattcaagcccttggggtctcgtaaatttgtaaaaaaaaatttttttcaaatcctttcgttttcattttcagaccattttcccgatttcctttccacgccatcgtttcaccaaaccaaattttgagtgtctaaaattaccaatttttttcaaaaatttagtcgagccttgtaaaaattaagcattttttctttgcattttgtctatatttttgccaaatcttctatttttctccacttttcagctacttccatgacaatgtgcgcggctatcacacccaatgggactcgcgattgttcaactacaacgagtaaattatttgttattccttgtaaaattttttttctttattccgtgtaaaaaatttacatttaatcctttaagaaccgaaactttgcgctttttgctctccaatttgtgctggtggattgatgagtacggctttgatggtttgtctgcccattttttcgtttttttaaattttttttttgaaggtttccgcttcgacggcgtctcatcaatgctctaccattcccacctgatcagtatgttgtctaaatgattaataaaattttgtttttaaacttaatcgagactgggatttgataatagaccccagggtttgtgaaaccctcaggcccataacaaaaaaaattacggaaaggagagggggggggggcatccgaagactttttttgggtttcaaattttcaaaagatatggtaaaatgggcgtccgaattgtaaatgttgcgaaataatcgggatttgtttcatatttgggcctggtactgaaacctgaccgatagatacttcatttctcaactacgttccatttcaaatttcctaaatccattatacaacccaatcccccacccccccaagatgatgccccgggcagttatgacgactattttggactgaatgcggacaccgagtcgattgtctacctgatgttggccaaccatgttttgcacacggtataatatttggaaaaaaggttggggaggatcaaccgaaatgataggcgccgccatcgaaaaaatttaggaacttaatgaattaaaaaaaaattgttaaattttttccgtttccctccttcgcctgactttttggtaccatcccatgaaagatcttttttggagcaggattaaaaagaattcaataaaaaaaatttcctataaatcgctgaaaatttttcaattttgtgtcggtccagtactatccggatgtgatcaccatcgcggaggaagtgagcggaatgccggcactgtgccgtcccgttgcggagggcggccaaggctttgactaccgactggccatggccatgtacgttttgtgcattgctttattccatgggggaaatgtgctaactctgacatggcgtccttcaatctacgaaatttgtttaaaaaaaaaactaatacaaaaaaaattttctgaaaaaatttgaggttttcctgaaaaattcccaaaaagcattgctaacgctattttctctaccgacaaaaaattaaaaattcggcatcctctccacttttcagtccggatgtttggatcaaaatgttgaagcatgttagcgacgagaattggccaatcgccgacatcgtgcaaacgctggagaaccggcgctacggcgagaacaacgtggcgtatgccgagtcgcatgaccaggcgctggtcggcgacaaaaccatcgctttttggctgatggacaaaggcaaaaaacaaacatacaaattaaacaaatattgagagaattcgacctgggcctgaggtcctaaaaaattttttgggatttttttcgagaaaatcttcgaaatttctgaaaaatgtcggaactttttataaaattacaaaaaaatacataatttttatgcaaaattaaatattccgaaggctttctttaatttaggatttgcaatttgccaagatttctcttgtttctgatttcacccgtttttatccagaaatgtacgacttcatgtccgacatcaacaccccgttgactccgatcatcgaccggggccttgcgctgcacaaaatgatccgtctgctcacctacgggctgggcggcgaggcttggctcaattttatgggtaaatttgcgaaatttcttgcatttttgcatgtaacttaatgacaatttttgggttaaagactactccccttacaagggaacattccgagctgtgagtgggaaaatgcatataagctatataccattggatagagcggggtcgacttgtattgtgaatttttaattttagcggtgcattccgcctgcttcaaaagttacagggcctcgaaatttgaaaatttgtgcttcagggctcattttcaactttttttcacatgatatcaatttttctccactnttacaatgacagaacacat

SEQ ID NO: 15330 - DNA, 3865 bp, Heterodera glycines
  unsure (1)..(3865): unsure at all n locations
ttttgggacggaagggtccgaaatgcggattgctgattctttcaagcgccgcaatggggattgcgcgtaatcagaactcggttggtgcncagccctggtccgatccctaatgacaattactgtggatgagcttcacacattcaaaaagctaatattgcttaaattcatataaaaataaaaaagctaatatttcttaaaattcgtaaaaagcccattttctgcttacttatgcaaaatcgatgcttctctagatattctttgttttccatttaatagcgttgacagcaatggcaaaagatgtggtgatgtatttgaaacaaagaaatgaattttgcaaaaaataaaaagggcactcactaatgcccatgtttgggcatgacaataaaaatgtcatttaatatttggcatcatgcgaatgccacacgtaaccgagcgaatgtgggagggggggggggaggcgttgnccgtttgagcgtgtctctttaagcgaagaattagccaccaatccatcgaagacattcagaatttttcaatagcttcattattgcaaataaagctaaagaaaatcggaatgactgtcatcgtatttctgctatgtctcatagagccaatatgccaacttgcattagctgatctccaaggaagtgtttccagaatgggggttcgtgaaaatggcaatttgactaaaaagaaagtgcttcataaagaaaataatattcctgcacttaaaaatgcttcgcttacaagttctaagcatgaggatgatgacttactgagtgaggcactgattaatcttcataaattgaatggtaaccattttttaaaattatttttctccacgattttttagaacaaacacaaaatggaagctggtcagaaaattcggagtaagcattttcgtttaaagtttcattgtttgggataagtttaaagtttcacggaagttgatgggagttttttgagcttttgcaatacaaatggagaaaaaaaggaatttagaaacacttttgttttggtcatttttgagaataagactaaaagtagctttgaaaaaacggaagaaaaatgtcctttaaaggcattttcagggaaaatgaaacttttattcagtaactttttggatcggtataacgtgaatattctttaagaagccgggacctgtggagaatacaagtaccaagtttaggtagacatgaattttcaattgtccacatagttacatgcattatcgtatctttaattcccaccagcatattggcatttgtctttttggtataaatcaaatatagcatagaattgcgatttcatattttgttatttgttgggtcggaattccggtttttgataaaaatcagaattttcacaaatcttttttacattttttaccaatttaaaatgatttatttttatagggtcctttttatgtcattttgactcccaaatgaaactcaaaagcataaaattggtcatttctgggcaaaatttattaataaaatgcaaccaaaaattttcctggccgcgcctacgccgcaaaaaagtgttgtaaataatccctttttcaaaaatgtaataaatgtaaatggacatgaaaaaagtttctgatgaaaatcatttaatattttttaaatattataaaacatttttaaatcatatttatttttaattttttgttaagaatttaaaatttattaattaatttcttcaaaaatttccgacttccgctttccgatttttggggttggaattccgatttccaaaaattttttgggcctcgaaatttcatttccgaaagagttttgacctcagaatgccacaccttgtacaatctgtaacatatggacctttctatttttcccaccgttgcctattaccaacgctggttcccaacttaatgaattttaaatattttatacggcgctgtttgacccttttctacataagtgcaataaatgagtctgagatttgttcaaaattattatgcaagttttttaagtgaaacattgacaacgctgtattcattagtggaaattgaaactaaactgaccaaattcgatgaaaaagctgcaaagactatccaagagctcaataagaaccttatgacgaactccgaaaatgtgatgataggcgaaagtcaaagcttaaaagaactgagtgaagaattgagcaaaactattgacacgatgaaaaataaggaggacaaggcagcaaaagttagcattgatggagtaaacggcactctggtacaaatattgcaaaaggcaaatgtgcacaaaaagtcaataaggttgcaaatatatgtgcaagtgatgaaactgctaaatctaattcacgagagaatcgagcaaagcccggaaaaagacacaatcggaaaagtcatcggaaagagtacagtcgcaaacagcgtgaagactgtaatgccaagtcaattagtgggattaataagggaactttggatacattttttgcaaagaatccgtaaacccgaccaaaataaagctactcaaactaacccaaaggtaatacttataatattttaataaatttaaaatatatacaataaattattattcgaaaattacaattattttagataaaaaaatcaattcagattaaacaaaatgaagtgatcccaaaaaaacaaaagcatgctttgtcaaataaacaaaaacaagagacacaaaagcatctagtttcgcttggcgataaattccgacgacgacgacgttccccactgcccatcgcgataattcgctctctatcattagcctttgctatactttgtatcactgtaattgccttggaacatcataacccatgggccgttgttgtaattgcgtttcttgcactatattcccaacaggaaaatactcgtaactttcccacacaaattgccgatggaattagcaatatcgtgaatcgaatttgtggtacacgtcacacagagggaggtccctgtctcaacggacacaggaacaattacggacacgaatcacatagaaacatctcacaaacagatgtaccgcaagcctattcttgtggcaattacgtacaacacgattggcacaaccttgccccacaagcaaatgagctatgtgcgacggtgcgaaatgccaacccgagtgccagcggtaacccagctaggcgaagcagcaatgataacaacggcagagctgcggctggctcagttcggcagcgattaattacccctgatttaacgcttgaaatcaactaccgggcgccagccaatcggaacaaaaataaaaacaacagtcgcccgggtgttgagccttcccgaagtcgacggcctaatcggttcgctactaattcactggctagcagtgggaacaatcagcagaatgaaaggccgccatcaagaatatcagaaggaagtggcgaggagacggatgacaacaacagcatacgtagtagtaaatgtactgcttgcaagtttgaaaatagcagcagttcagaaaacaacagtcggcctggtcgtgaatcttcccgaagccaatggcctaatcgggtcgctactaattcaatggctagcagtggaaacaatcagcagaatgaaaggccgccatcaagaatatcagaaggaagtggcaaggagaaggatgacaacaacagcatacgtagtaaatgtactgcctgcaagttggaaaatatcagaagcagtagcagttcatcagatatgagaaatgcaaaagccgctgagaaaaatgatgattccaatgatcatgatgatgacaaaggagaaaatgatgaggatgatgacataaaagacagtgatgatgatgatgatgatgctaatgatgatgatgatgaatgtgataatgatgtcaaaaatctcagtaatgataaggag

SEQ ID NO: 15331 - DNA, 3043 bp, Heterodera glycines
ttcttaaatgtacaagctgaaatttgctcaataaatcgaaaaattctttctgaatagaaaacggaaattttgtgtccattttgcagaattttctaataagttcgataattgggcccattttcttaaatgtacaagctgaaatttgctcaataaatcgaaaaattctttctgaatagaaaacggaaattttgtgtccattttgcagaattttctaataagttcgataattgggcccattttcttaaatgtacaagctgaaatttgctcaataaatcgaaaaattctttctgaatagaaaacggaaattttgtgtccattttgcagaattttctaataagttcgataattgggcccattttcttaaatgtacaagctgaaatttgctcaataaatcgaaaaattctttctgaatagaaaacggaaattttgtgtccattttgcagaattttctaataagttcgataattgggcccattttcttaaatgtacaagctgaaatttgctcaataaatcgaaaaattctttctgaatagaaaacggaaattttgtgtccattttgcagaattttctaataagttcgataattgggcccattttcttaaatgtacaagctgaaatttgctcaataaatcgaaaaattctttctgaatagaaaacggaaattttgtgtccattttgcagaattttctaataagttcgataattgggcccattttcttaaatgtacaagctgaaatttgctcaataaatcgaaaaattctttctgaatagaaaacggaaattttgtgtccattttgcagaattttctaattagttcgataattgggtaaaaaagaatgaaggttaacccctttttacaaaaaaatgattattctattgttattttggataatcattagcacattacttagttaaaatttgctttatttttgttattttgaaaaagtttttcaagcctagaaaaaattttattgagaaaaaacttaaaaatttcgacttttttaaaattttcatgtgtaacttttttgttaattgtctaatctcggagcaatagcttagaaaaagcttctaaacatgttaagctttcaaatgatacaaacaatgttgggatttggttgataaagaaaaaagttatagaaagatagtgtaaaagcttgctggggccgaaccgtgggggccgaactgacgtagaccgggcactatcacttatcttttaaaatttgattatagtacgaaacgccaaattgaaacattgtacgaactgcctttgtacgaactgcccattgtacgaactgccatgaccccgcaatatccgcggtgcaactgtctgcaagcaaatgacgcggcgcatcacggtgggctcatgacgaaaatggccgtacgaaaatggcccgtacgaaaacggccgtacgaaaatggccgtacgaaaacggccgtacgaaaacggccgtacgaaaatggcccgtacgaaaacggccgtacgaaaatggccgtacgaaaacggccgtacgaaaatggccgtacgaaaacggccgtacgaaaacggccgtacgaaaatggccgtacgaaaacggccgtacgaaaacggccgtacgaaaatggccgtacgaaaacggccgtacgaaaacggccgtacgaaaatggccgtacgaaaacggcccggcccctcaaattcttcccaaatgcacaaaaaattttcaaaattttctttttagtatttttttgaaacttttcatgacttttttaactttaaaacagggtggccaagtgtgcttatttctaagatttgtgcttattttgaggggtcggatcttagaaagccaaaatgtgcttatttctaagatttgtgcttatttcagcattacgtgcttattttgtgcttatttttgggtttgaaaataaaaatgaaaattttgaatgacagttttgacttatagttttttattgaagcgaatacttgaattaattcgatttttgaaaaaaaaattacatttttattttaatggactgacacgcggaatttgttgcaagtcgaaacagtcaaggcgttggtccaaaccaaagccaattttgatctttcttgcccacaaatgtaccaaatgctcatttccaatcacaaattgttggagaaaatcggcggatggggaaaatacctttgataatcaatttcaattgtttttacgctaataaaatattgttttaagtcgatttttcatggtttttttgcgtttccctcgcgctactattagttttagaaaaaatcttatttttggggtccaaatcttagttttagcctcgtttgtccttattttgaaaaaaaacttggccaccctgtggaaaaagccttttttgtattttttattataactcaagtcctaaactgctgatttcaaccaaaatgcgaaaactaatcattttctattgattctaagtgttcaaagtgattttgtagcatataaaccaaaatttttagaattagtgaatttgatgttttttcatgtgttagagacatgaaaatagtacgccaaaatgagaggaaaagaaatgcaaaattttcatcatcccttaactttaaaataggatagaaattcattaaaaccttatagaacattcgatgcagaatttttttcataggaaaaagcgacatgctaacctggtggtatgtccgaaaaatacgggcccgggcgggctctaattttcccttctaaatttattcgttttccttaaaaacagcttaataaaagtttttgcgaaacaaaatggctgatgagaagaatatggtcgtggagaagaatacttcatcttcaacttctgctactgactcttcaccagacggagggaactatatcaaagaggaaatgctccagagagaggtcaaattattccagattatctcaaaaattctgactttatataagtcgactatgggcattactggataatcttggctccacccaaaaaaaaaaaaaattatcttcgtgttatgaaaagatcaacattatcttcaggttttttgtgagtgtcttggtggcgaccgtgtttc

SEQ ID NO: 15332 - DNA, 3807 bp, Heterodera glycines
gaatttcagcaaagaattattttttttcacaacacgagttcaaatcgaacaaattttcgctcaaattgtctactctctattcacttttaataacttaagtattgttctgcatcaaaataaagttttaggtaaatgattcgaacttttccccagaaaaatattctttggaaaaaaatcaatttttctttgaattctggtccgatgttcgaaattaggcaaatccgagttcagattcgtgaccagcaccctcgaaaacccccaaatattcattttgagcacaaataaaaagtaataattttaaatagaacccccattctttaggattgccaaaaggggtaaaaatgcgtgggcaggaagacacaccatcccagaaatgagctccaataccaaaaaagattaaaatacttgtctcagtggtctgtgagaaggtcaccaaaggggtgggtcccaggttcgattcccagtgcatgctattgatgtatttctatgattttaatgaataaataaaaggaaaagtgaccaaaatgattttaaaattgtttacaaatttttaaacatttttatttgtcatgtgtaatgaaaaataaccatcaatcctcgatcagtcaacgatatcgacgtcggcatcttgatcactttcttcattcgttttgtcttcctccgcttgctcccgttgttcctcctcccgcttaattagttggattaaaattttaaatccccttccatcaactcaccagcttcaattcgtcgagtctgccggtgtccagcagccaattcgagacgaaatgatgctccagctgttgtcgcatttgttcagagtccggcatcgtcttccaaagttgctcaagtcgccgccacacggaatgcagtgcctcatctcctgaaaaatcacaacttttaaaattgaacccccaaaaatgatatggtcccaccctgctcatccaaaaggcccaaaaatccgtgttggcgcgcaaacggaacaaagtggtgaagcagcaaatgggcctttgtcttttttgaaagaagcgttcgcaccattggttgttcgtcgagaaatgccttgaactggtaaactgccgtctccagtccatccaagccacctggagacaatggctgggccttaaattaaaaaaaattatttccacaaaaatgaaaaccaattactttggtgaaaatttggattttccccaaatgtgccattgtttggaaaattgttttcgcccattccgtctcgaaaagggcctccatttgatcggcatggacgaggattttgcggatgctgttccccgttaagtcgcgctttctgaacgctttcctctttgcccctattcgtctgaagaattgctgagcaatttcggcattttatcccgcttccaactccttgatcagagcatttccgaggccttggaagacgtggaatggggccaacagcatctgctcaaaactgatcgacggcagcagagatgcacaaacaatgcctttcgtcagagcccgagtctctgccgttgctttgtcgccgccatgggtcagttgctggaactgatcggcttgcctctccaattcttgcacagttcgaagttggcattttgctgaactgatcagatggtctcttcggcagtcacacacaggggatgggaatgctgtcattgccgaaccgcaatggccaaccgcccatagaaaacacagatctccgccaagaaacctggaaaattttccgaaaatcaaaaagcgcccgtcaatttcattgaggtgctcaatttgttcccacaacgatccgcagaaattcttcaaattctttcgtgaatcttttgcgggaaaaacagcagcaacaaaattgttggaaggggaatttgggcgcaatgcatgggccaacgaaatggtgatttttgtgaatccccgcccgtgatcgccactgacctgaatgacattgtatttcaaagcagcgcaaattattcgctttacttttgttgtgactgagtcgaagatctgcgtcttcttgcgcttccgcgttgaacggcgaggttcagcgttggcctgctgttgtggctgctccggttgcggctgttcttccggcggtggcagctgctgctcgtcgtccatcgcttcgatcggcacttcgtcttccgagtccgaattgtctgcactttctgaactcggattgtccgaaggctcttcggtccaattctctttcaactgatcaaagtgtctcttccaaattcctctcgccgttcgaacgaggaacattgccgtgccaatttgtcgggtgatttgtccttggatccattttgatccgtcgcgataatttctcgcgtaaactctttggttcaccttgaaattttttcgcgcatttgtctcacggtcgaaattccttttcattcgttccgtgtaggaacttttttgcattttggccgcttcaaaatcattcgccgctgtttgttttactaaatccaacaaagttcgaagcctgcggccgaagaggatttccgaaggcgctaattccgttgctgcgtgcggcgtgacacggtatttcaggagaaattgagacaatgcaatttcttgcctcatcccctcttttttgagcttgttcatgccttgcttgaaggtttgaacaaatctttcagcagctccatttgacttggggttgtatggcgcaatcgttgtatggataattccgagtgattgacaataatcaccgaattcttttgagctaaattgcggtccgttatcggatacaatttgctcgggaagtccatgcgctgtgaagacaattcttagcgcttcgatcgttgccaatgccgttgtcgttcgcattctgaccacttcaggccatttgcttttggcatccatgatgatcagccacattgatccccaaaaaggtccgcagaaatcgatgtgtattcgttgccacggtctttccggtgattcctacgggtgcaatagcactttccgctcatccggcgcctcttcttggcaaatttcgcatctttttcggatcatttcaatttctttgtcgatgcctggccaccacatcttctggcgtgccagggccttcattcggaccatccccgggtgggtcgcgtgcaaaatttccaacatttttgtgcgaaattttgacggaataattgtccgatttccaaacatgatgcacccttccattaaagcgagctcatttcgaatgacataaaaactttttagtccttcttcgactttttgtggccatcctttttcgatgaattctcgcaatttttgaagaattccatcctttttcacttcttttgcgatgacattcacagtgaccggcaaacacgaaatgttttcgttttgaatttgctgaacttccagtccaacatggtcgatggttgtctcttccggacaaggcagtcgcgacaaaccgtctgcgttgccaaattcctttgtcgagcagtacaccacttcaaagtcgaagctcatcaatgtcagcgaccatcggtgaagtcgtttggccgccacgatcggaaactctcctttgggcccaaagatcttttttagggctcatggtcggtttggagcacaaactttcgaccgtacaggtactgtttgaatttgtcgaccccgaaaatgattgccctcgcttctttttcgatctgcgagtaattgcgctccgacgaatttagcgttcgagaggcatacgcaatcacaccaactttccctttttcatctttatgaaaaatgactgctccaacaccatagtcggacgcgtcagcggcaagaaaaagtggtttttgcgggtcgtaatggaccaaaacttcggtcgatgtcagaaccttt

SEQ ID NO: 15333 - DNA, 1965 bp, Heterodera glycines
cttggcttaaatttatttttttatgatactagatgaaaaataatagacataacattgatttttcgaagacttaattcagattcttaatcagcgatgtttttttaccccaaattcttgtaaggaaaattcttttaataataaaaaaatttggaaaaaccaaagtattgtgaaaaaatcatagacaaaatcaatgttttttaaaatctgagttcatattcgtggtcagcacgttttttaaccccggaaaaaaggctttttaaaattttactattttttgcccatcgggaccacaattctacctatacatattttgggtgcaccccaaaatctcgccgccgaaatctcgccaccaaatttttttaaattttttttaaatttcaaaattattcaagaaaaaataaaattaacaaattcgcttcccagctcaagtgcctaaatttaatcaacaaccatttgttcgcttcctagtcgcttttcgactaggattagcctctctatctaagtaaaaaaaaagatagtagagtttccagcacgtggccacgaggaggcctgcgattggaaatggttaaaccttaacgtgccatttttttttttttggttttgaaatataaaagtgaaaagtcaaagaaagattcaaaaagttaaaattgattccaaacgataaaaggccaatatcaaagaagtgaaaagcgcaagcatgcatcaactgggcacaataaacctccgggacgactctcaaatgtcgaaaaaagaatggaaagggcaaaatagaatgggaattttattgttattgcgagatgcattaaatttgttgacccgttaattattgtgcaatgttagaaaaattgttaatcaaatttggaatttatttttattttttcttggataattttgaaatttgaaaaaaaaaaaaaaaaatttggtggagagatttcgaccggcgagattccggcggcgagatttcgtcccgtcccctatattttattccacagaaaaatataacatataaaaccatcctcactgtaaagaacacacatttattataagaaagtaaaagataaataatcgtaatcaaaaataataatataaagtgaaaagggagagtttgacaaaggacgacggcgataaattcgggcctttaatagaagaattaggagttccctgaaaatcgaaggaatgtaaattaatggcgcaatttgtggtcgtttgtgcctccggtgaaaaacgaccggagaacaatttgctataaaccttgaaacagaacgaacactctcctcccttctccacaactttcatcaattgagcagctattaaagagatttttttcagttccctaatttatttcggatgggccgataaattacttaaatataatttttactttttagtttcagctttgaaaattattcctttcggcccattccgattttgcacaagtgtaaaaacctcagtgggcgggatttctgtaatgttggccctttcatttttagatgatcaaaaacgatttttgtgctgatggcagtgtacggtagcgtgccgcccaagagggtacggtactccctcaaaaaacacactgacacccggtaggtgtactgtacctgaacttcacaacacagtgcctctctcattgcgacactgttgtgggaatacctatcgacgatgatgatggtgattgacgaagtcaccgtggccattgttttgatggtggtggtttttttgtttggtggggggcggcgatcgcgaagccgagttgcggacacgacgacggcggtggtcgtcagacgcatcgccgtgggcggagtgtttttcgttgttattggcatcgtcgcggtggcgcgagtgggacctcgaggaaagtgcaagtctttgacactcattaattaatattcaataaattgggagaaaaggaatctaatctttcccattcgcccgtaaagggggccaaaaagggatccgtcttagcat

SEQ ID NO: 15334 - DNA, 2418 bp, Heterodera glycines
aaattcgctcatttcgcgctccaatcgctgcgccttctcctccaactgttttttcgttatctcatccatgttctgacaatgaatggaatatccaaatgggaagtggcttttcaaattttttggtgacaagggaatttaagactcaaaaaatcagctgattcccatctttcccttatttacaacctgtgccccctgggtgagtgccaaacgctctttgtgccgctcaattcgtctcatcatatcgtcatgaatgcgccgcaaaaagtaataaaactggcgttcatatcccagcttttcgaaatgttcgctctttcgataggcaatacgcaaattctcgtcatgaacatagcgacaggcgcctgaaaattgtctttaaaaactcttttatgcgacaaaacagttaaaaacctaaatccgctttggtattgacaaattcatcatgagggcagaaaccagcaagaaagaatttacagacatcgttgtcctaaatgtcgaagtttaggcaaaaatgacaaaaaagacaaaacccgaaaattcaggtccaaattcttgtcttcatttcggcctggccccatcaattcatttagcattgccgcgatttggtctttcgccgtcatttggacaaattattcgtattacgacaaaataaaatcacagcagaacttaattagtctaattaccttttttcaatgtgtgatcggagaaaaatatttttttttctaacaaattgtaaaaacactatgggtcaactccactgtgcaaagaaaagcctagtactatctcgtcgtttctctttttctttgtaatttatctgtaatttatctcactttcgcatactatctcttcattttttaattgaaaaggtgctatgtcattacttaaaaaccatcataatgggcgttacttaaaaaaccatcattatgaaaatttttgcttataactttgctctaaaaagaccaaatttttaatccttgctatcattcgatagatctaaatgttctttatgagcatgtaaaatgggaaccgccaacttcgccgcggccatctcgccgcgagaaactcgccgccgggccaactcgccgcgcgctttctcgccgcggggccaactcgccgcgcgctttctcgccgcggggccaactcgccgcggccaactcgccgcgccttgttttttggctatctcgccgccagatttttcgttgaaaaaatgcattaaaagcaaaaattctttacagttaattgtattcaatgtgttatatttcagcaaagtttctctccaataattggaatttttcgattttgatttttaatctaaaatggtttaaacgattttattggaccactgatgagtatcagggatgactttcagttcgtttccgtgtgtgtaaagaaaggttgaacaaaatgtgaaatttaaaagaacttgaattttcaacttttttatcagtattttgggttcggggttcggaatttctggtttcaaattgtgttatggaccagtgtttgttattttaatgattcttttgaaataaattaatgcattttttaattttatatcaaaataatgaggtaacctttcaatgaaaaaaatctggcggcgagatagccaaaaaacaagacgcggcgagttgggcggcggcgagatggccgcggcgagttggccgcggcgagttggccgcggcgagttggccgcggcgaagtgaccccgacccgtctatataatcacaagaaaataaattacattaacggaaaccgaaaatgcttggtaatctgactcataaaagtcgtttgtggcgtataatttaaaataatttggaagttatttagtctgaatggcctgtaatcgggtctgccgtaaatggctctttctattttcaattttcaaataaaaatggggccgtttatgaaattcatttgatttatagcattgtttccggtttcaattaaaagagggattaaaaaagaccttttgttcatgagcatgggccccagtttataaaaatattttggagtttttaaaaaattcgcttttaaaaaaaaagttttggcactcaaattcttggcaaaatgacaaaaattttctttttttgcatttatttactcttttcatgacttttttcgctttctagacgaaatttgaactttgcgaaaaaaattccgaaaaataagtcaatcttaaaaagtgagtagatttacgtccaaaacaatgaaataattgtgatttgcaattgtgcaagtaaaatagataaagaatgagaattttgagaaaaacacgtatttttggccttttttgggtttttagtagatgttttgggggtttttaggctaattatttagggagtgatcatcatgtattgcggtccgttttatgaccgaaacaaagggttggacattggcaacaaccatattggctaaaatgca

SEQ ID NO: 15335 - DNA, 912 bp, Heterodera glycines
tgcaggtcgtaaaagaatttaatgaaaagaacggcgaaagtcgaataaaggaaaatggccaagtacaaattgcccatgctttgttggcacctaaagcaaagaaatgagcacagatctcagcaaaagcttcttggaaaagtgccggccttgccccgtcgaacactttcagcttaaaaacagtcgcagtgattgccaccccaaaaagcatttgcgtcgtctgaacggtggtcacaatcatagcgaaccaacggggcaatttgaagcccaaagaattgagggcgtaatacgaatacatcagagagtgagcaaagaagttcatgggcagaaagagcgaagaggcggcggtgtgttcggcaccttcggaggggagagggaattggcacaattgcaaaaaggagggggggaaggggaattggcacaatggcaggaggggggggggaaggggaattggcacaatggcaggaggggggggggaaggggaattggcacaatggcaggagggaaggaaggggaattggcacaatggcaggagggggggggggaaggggaattggcataatggcaggagggagggaaggggaattggcacaatggcaggagggagggaaggggaattggcacaatggcaggagggagggaaggggaattggcacaatggcaggagggggggggaaggggaattggcataatggcaggagggagggaaggggaattggcacaatggcaggagggagggaaggggaattggcacaatggcaggagggagggaaggggaattgtcacaatggcaggaggggggggggaaggggaattggcacaatggcaggagggagggaaggggaattggcacaatggcaggaaggagggaaggggaattggcaccatggcaggagggagggaaggggaattggc

SEQ ID NO: 15336 - DNA, 1576 bp, Heterodera glycines
  unsure (1)..(1576): unsure at all n locations
tttcatgattcatttcaaatgagtgaaaaagttgatcagcgaaggacattgttcacaaaatatttaaaaaacaaataaaaaaacaaaatataattatcgcactttcaaattaattgtattttttttattgaaaattttaattgataattatcctaatctttatggaagcttgtttgaaaaatgtctccaatttaagtatttattaaaaagaaatgagaatttaaatttatagtcaattaaaaaatgttcgccaattaacaacttttaaatgatccgacggcgacaaatttaaacaaataaatgctgcgcaataattactccttatcaatgggtttatcagcggagagaattcaaattgacgaagaatgttcccaaaaaacatgaattattgcggagactgcaaaaagtcaccgcattaattgttaaacatttcggggggggggggaacattttgccaaacaaaaaaatgaaaaaattaaactgaaatggcgaaaaatcgaatgtaaatttttggccattccccccccccccgtgggctttcgttttataaattcgtttttcgcgcaaaatgtcggcccaccaaatgggccattagtgaatgagctgagatggcaaacgaacttttgctaattgtatgtttaatttacttaattttgtttgtttcttctgtttctatgtgcacgacaaacggcggttgcgcaaagagaaaaaggacaaagtgtaaattcataaattaaccccttgggggggggcaaagcgccggaagtgcaaatggcgtaattgcaaaacaatttgtacaatattatgaaaacaaaaatgaaaaatcaaatgggcaccacggggtttgaacgaaacattgtaattgaaaatgattttaataggcaaaagaaaaataaatttaaatttaaaaaacgaaagacaaaaagaagaaaatagcaaaatggtgaagaagacggtgaaaactcttttattgtataatttccattttgagaccagtggaaaaagttcggagatggcaatccaatttaattgcttcgatcatcggatggcatttacccgaaatcgaaaattaaacctcaaaattccgaattttaaaatgaatttcgcnccctctctgtcccctttatccccttcccccccccccccctttccctaatggactctttcgagcaaaagacaaaatcctcgctaagggaggaaaattgcaaaagtgcaattagattgaagcttgaatttagatgaagtccatatattctctcaattataatactttcctatttatttttttctgaaaatatttgccttttttttgctgtttttaatgcctttttcactaataccaattaataaactcaaaatctggtaaggccaaagtcaaaaattgttcaaaaattgttcatctgaatcaatttaaaaggaactaaaagcgaagaaaatgcaaattaagggtgcgcttggcatttttcatgaaaaatcagtactgaagtatctttattttaaccgggactcaggtacccatcgccaaaaaatggagcaaaaaaacttaggaaagcccctaatttgcattttttttttt

SEQ ID NO: 15337 - DNA, 3098 bp, Heterodera glycines
attgcatttttattctttaatacttttatttttttttttgatttagaattttttaaactattttttaataattaaatcattttttttagttttttttaaatttattttttcattttttagccttgaatgatttttaaaaaaattagctaatattaatattattaataattttgatttacttcctaccagggatgtgccgaatcggaatcgtaatcgtaatcggaatcgcaattaatcggattttgggccataatcggaatcggataatcgtaatcggattttgccttgaaatccgattattacacccctaagaattgaccttttgaaggaatttttttagcgagaataccaatgaattttgaaaaaaaatgttttctgaaacgaatgttttaatcttattttaacataatgactgaaattaaatttttctcacaaagcagtgccggattaattctccccgatataatcaagttttttgttatttagcaaaaatgtcaaatatctgggaatattctccaccgctgggttgattgtgacagatctgaaaacgtttattgcctgagaatgtggacaaacttttatttttgcatcacaatctttaaatttatgattttgattatgaataaaatttttgggaaaaaattatttttaaaaaatcggaatcgtaatcggaatcgcaattaatcggattttgggccataatcgtaatcggttttaaaaccgtatcggatttttggccataatcggaatcggcgatttaatcggaatcggattttgtctggctcggcacatccctgcttcctacccatcgtcacagtgtccggctatttcgggaaggcgaaattcgattccgaatgccttttcatccgtcccatttgactcgcgttgttcaggcgcgcggtatgagacaaatgttagtccattttgtccattcgtcagatgaacactataaaaaacaaaaacaaattagaaaattaaattccaaattttacggttttgtcgaaagttggccggaggcaaaaggcaaattcagggggcaaataatgaacaaaataataataatcatttttgcttaattacaaaaatttattattttttaactaataaaaatttttcctttttttcattggaataatacgataaaatcatttgatggacatatttatgatttgctgaataaatgattgaaaatgagaatgggatgggatgcatttttgtgatgattcaatgcgaaaacggattaattaatgcataaatattccaataaatagaaaataatatgttaatttaacaactaaataaatgaacaattttattataaatttatatgattttaaatatttttaaatcagttttaaaaaatggaagtcccggtcccgatcaaaaccgggacttaggtactcagttgtcccatttttttcagtaccaggtcccagtcccgttctactcttaaaactttgttcataaacaaccaaattttaattttttgcttctcaatttggctttaaaaatctaaattttatagcggttaaattgtcggaatttgcttaaattaaattgttttttagttgtatttggatttaaataatatccgtcctagctggtcactaattggatgcgcattttcttatggaatcatcgctacacagctgtaaatcaactcgtactacagcacatcaaaatcaaccgcctggaatacgctgatcaccacatgaaagctaagtgattgttaaatgtttaaaaaccgaatcattgtaaatatttgtatgaatttattgatttaattatgaagataatattttgtttgaaaaattactatattttttaatcaaattttagcatggcattggctgtgcggtgccaatccctcaccctcttttggcactcaaaaatgacactcaaatcggaaaaagagctccactcattgagaaaacttttgaaattaaccaaccaaaaattagtttcagtttttcacacaaattactatatttttggaagcaataaaaatgcttcgttttagcattttttgtcaaaaacttcattcaagaacaagatggaattagaattgttcgatttacttgactttcggaattccgattttttggttttattgcatttttattgagaaatttcaaaaaatctcaaaagagtgaaagaatagtgacaaaacgccaaaatagtgaattttcactatttttgtgacgaagctccaaaatagtatttctagtaacatcagaatcgaaaattttcaacgcagaaatgcgttttttgagctcctttcttcaaaacattgagcaaaaaaaaaaatatagttaaatcaccaaaattagcggccctaataattatccacgaaatatttttagccgttttttctttttaccgtcaatgtccgggtaaattcgtgaaaacatgtgttttaacgtgcggcgtttatctccaaaaaaagggttttggagaacgggtgggggtggggtaggtccgggcggtgccgataggcgccggccgggggggaagatttaaatttgagtgaaattgttaacagattttgtcgaaaaatttgtctaaattttacgattctgagacgtttttttaagaaaataaatgaattttgctagtttttcaacaagcgtttgtccaaaaaatggacaaattttgcgtcaaactttagattttcttgaataaaataaagaaatagtatgtagggccgcgatttttaatgaaaaactttttttttttgtttttgcttaattgatttgaagaaaggacctcaaaaaataaaatcaaaaatacaccccctaagaataggcctaaattttttttggaaaattttctcaaaaatttatcttaatatttttaaaaaatattatggcattaaaatttggctctacagcagtttacgcctccaattgacttttacgcgtccaatcaacgcccgtccccgagtttctacttgcttaaagcttacattcttggtaccaatcgaaagcttgaagtctaaagaagtttttgtatagcaaaattttcgggataaaggcaacgagacaaaaaaatttttcgtgaatatacgcgaaatgatgaatttcgtgttttctcattgc

SEQ ID NO: 15338 - DNA, 3647 bp, Heterodera glycines
cctatccattagagccaaggcagggccaaaatagaaggcgcatggaaaggcaaggccatgacagcgagaatcattaacacaaccaaccactctcagtaaccccaataattagctcaaaattgcgaatctaattcagagctttcagttttgatctgggactggataattgtaaaaataactgattgattttgcaaaatgttctcatttttgaccctaaagtcttattttttgccttgctgttctgattttgaaaaattttcgatggaagccctgcaaaaactcccatgggaaaccaataaaatcggtttcaatttacgcctcagggcattaattcaggggtttattagaggcgatgagtttgccgccggataaccctcttcggctggaacattttcgcctcttcgcgcgcatttacggccgatttgacgcgaagagaaagccaaacaaagcactgacacggcacgaacgaattgtgaacgaagcggcggcacagctcagtttattgagaccggaattgctgtcacggagagacgagcttttcccattggccagaaaggtaaaggtgacttaatccattatgaataacgacatggcacaatttatgaaatttgtcatttttggaaatttaaatggaaattaatttgaatagagttaacaagccagtaactaagtaagtgtttgtggacttaaaaaataaaataaaatgctaaacccagcacagaaggagttgagccgtttcgccatttttacgtacgtaacattggcatatgtttgagggcattcacctctttttcccgtaactttggcattctttttgagctcgcccgtctattcgaactcccgttgaacctgagaacatcgtcagcagtggaagcgaaagggagtgcctccccgccggggtcgtcgatgataccaaattccgttcggaacagctcaccgacatccaacgaagaatgttgtgatgggacatcaccatcaacatttgtgccgacaaagcacgaaaagggggacgaattttaccaagggggagacgaggaagaggacgaggagagccaagaatcggaagaacgatgagggggggggggcgaatgggatttgccatttttggacacattttggcccatttattcaatccaaaaacaaaaaatgccattttcatatttcattcatttgtaaataaatatatgtattaccaacaaattgtattctcagaaataatttatgaataaattatatttgtgtcatttgcgcaattcaaagtcggcccctctttttcagctgttgctggtcatttcttggctgataacatgacgagattaaaatgtcaatttcggcacaagttgcagtcggcaaatacattttggcaaatgcacaattattatgcacgaaggagggcacgtctttgacgccgtaaagactcgaataatggtcaacctggtgaaagtgtgccaaattatgaaattcgaatgtaatgacaataaaattaaccattttgcaatgttccggcgacaaaagtaacggcctcccttaattaattgtgttataatggacattccttccggcatttctctccactcattgcccaccttgcgcgtcgcgttgcacattttgtatcggtggcatcatccgctgctccccgccttccgcccactgtccctccccttccgttttggtaccgtgccattgcttcgtcttcatctcttccgtttccccctttgtctgctgctgatcagtcgctccctttcgtaatggcgttattctgatcagttgttgctgctgctgttgttgtccttgcgtttcttccaccgttctgtcctttggcttttcgtccttttcaatttctccaaatatttctttggcttctgtttgattggcatcaatggttaattttttgttataatttttgttactttctgctttatttgagagaggcggtgccattggtacgttaaacggcctcattgatgctttgattttaacagccggcataaattgccctactattttgttttctgccttttcgtcgataattttattggtaccaccgtcaaaaaccgcgacgccaggaatgccttttgaaatgaatttcaattaagcattgtttgagggcttcacgttacttcgtgcccttggcattttgacttgggccctttttgttgcttctgttgttggcattgtttgttgttgctgaacgggcggtttccgtgctgttgttgcgatatataagtcatcttaagaattattatgaatatttaaaagcagtttcgccaaattacctccaatcccttcgatatattcttcctcttgctgcttttcatcagatgtttttgaactctttgaatttaatttacaattttcacttattttatatttaatacccaatccgaatactttaaatgcttatataatttttattttttcatttaaccaccacaggtgttgtagcagtaattgctgtttgcatgttcaacttctgctgcttcggtggtgccatcgccctcatcgtcgtccgttgaggtgccaatgctccgattgaaaattcggccgtgccctcaaaaggtgcggtggtgccaacttcggcctccttgagattgtcctcgtcaatgtacttgaaagaagcaatttatgacaaaaatatttacgtgtatttattaatccattaaaaaatgtacttttatcattaaaatagcaattataacttaattgttgtaattagtccacaaacttacctcaattattggttcgggtgttgtgcctttggttgaaaaatacaaatatcgtgccccagcagctccagcagatcgacgggggctttcttcccaacctgaaaatggcatgattattacgcggaattaatcatttttaaattggaataattttcattaattagtcgaaacaaacccaaaatgtcagtgggaagcctttgacgttcttggaatttggcaaaataacttttttgttgagtcaaattctaaacacagtaacgaatatttaaatcggcatttaaagttaaaattttctttttttaatgaataattaattgtttgtcattacctcctccgagtcgttgtcatcgaccaaaaaacatttgtaccgttttgccttcccattatttgttttggcatttgttcttttttcgtccctttttcggtgcgtaattacttcatggttttgccgtaattgcagcacacgagccaaatgagccgaattgtctctaaattgttagcagttttaattaatataattatttattttttcttccttttcaaaaggaaaataaattaaaaatttaatgatcaaaataacctgcttaatggagcggaattttctgtttgcttattcgtttccgtatcagataaaacgccgacacaaaaaagaattaaaatgataaatggacgaagaaaagttaattgaccaaaagcaaattcactcattttctgaacaaatttagaaaatcattaaatacaaatttacaaaaaatttttcaattataattcaaataaatatattaattacttttgttaaataatcaaacgacaaataaaaaggcatgaaaaaactgcaaaaagagaggagaaatcaaaacaaaaatcatttgcaaaatcataaactgaaaagagcaaaagctgctaatagcgaaatatgaa

SEQ ID NO: 15339 - DNA, 2358 bp, Heterodera glycines
gaaaggatgctttgatgggaagtgaaatcaaatggttggaataaacatttacatttagtagttgaaaagttttttcctttgatcggtgtaacgtctccagccccccccccccccccgttggcctcccatcactctgtccgcctcatatccgcagggcatttaatttatcctttttcatttatataaatatttacctgtcttgttattattttttgcttttcaaattaattttaattaactttttatttttagcatattcaattcattcctgcattaatacaaaatcttcgacaactaatggcggcagcgcttaaaaaacaacaaaattcaaatttaattttttaggctgcccaatgtaacaaaacggcttcgcatgtccggcgcctgatttgggcacttggtgggcgagggacaataccctttggaaacgcatcggctgaacttatgctgaatgctgccatcgacttccactacggtgggtaaattttaaaatccaataattatcaaaataaattttaatgttgatttgtttgaaaaaggatataggaattgaatttgcgttttatgtattttttggattaaattaaaattatttagcggatttggagttggtattccgattacaaatcctaaaaatgtccatttaaaatatttcggtgattatgataattacagaaaaaacggatctttaatgataatatttatcataattttaaataatcaaataaatggcttttcagaagtgcgcctccaaatttcggcacacaacaatcattttgcgcagaatcttgccccgccgattcaaaatgatgtatgttgaatttttgttaaaactcccatctattacgtgtaattttttggagtattaggcaatgaaaattttacgtatggccgtaactgaagctgagttattttgtgcgctgccgacgactactccggagcaattacacgcgtttggcaattgtaagtttagaagaatgctgtacgactcttaatagacattttctgagtaaaattttagaatatcatttaagactgatcaaaaaaatactctttactttttcattgatttaaaaaaaatctatcttattattttttagttttgagacagtttagccaacatctgcacgatgagcacggcttcactgactagggcaattggtataatcaaaattttttatgggattatttccattgtattaaaccgatttgtttatttttgaaacaatttttttatgatacatttttgtaggagtgaaaagtgctttttggagaattcaactgatttttgtggggaataagagaaaaggggagggggggggcagattatgaaaatctaagacagagtcatttccagattccatttgatccccttcacaaaatgtatttgccgattgtctaatggactgtgcacgagtgtaagttttggttttgaaattgttttatcggaaacaaatttggtgcacagtctttgacagttttgccattccgtttcgtctcccattttttcattactatcataacaattacttaattatttgtgccttatgcttctctcccactctaatgtgccatcacagaaattttccttccgttcataattatctcatcacaaaatatttttatcgcgcatccctctttcatccctcggcggtgccattgcccagcgctttgtgccgtcgtacgtcgcctgtcagtctctcttttcttccgttcttctctttttgcaaaaacaatcccgactctttgcaatacataaagtttatcaaatgtcaatacgtccaatgataaaacatataaagctagaaatgcgtcattttttaaaattaaatttaattttttattcctttgtccttttgcgcatttgaatttttgatcaaaatatgcaacggttttgaaaaagataatcaatacttttaatgatgagtgcttcagggaatttatttcaagaattttagcaattaaataaccaaatattttaagaattttagcaattaaataaccaaatatttttgctttcctttatgtttttctgggtgtattttttaattgtaaattgatgacagaacttatttaatctatttgttaattgattgactctttggttcgacctttcgaccttctgcatcattaaatgttgctaaaatggttaatgaacactattgttgtaaaccaaattacaaatttatctttaactactttgggatgcggagtgtttttggagggcactggcgccaaaaatccgcccacgattcgataagaatgtgaattgccgataattaaggttagataagaaagtgggtgtgccatccatcgccattataaagttggttgcccgacctcaaaattacaatccaa

SEQ ID NO: 15340 - DNA, 1491 bp, Heterodera glycines
  unsure (1)..(1491): unsure at all n locations
atcatttttcaaaattaatttcctttaatgcttctttagtctgaccagtgttngagtgaggtgcaaacgctgtgccaattgttgctgtgcgtgccgggcatttttcgcntnaaggaatttcaatggtacggtcaaagaccgatgcgcacatggctggtggattaaaattcaattatttaatttgttaacaattttaaataattttaggcttactttccctttttgaagggtgtaatattccggttctaaattggtacgatcctcccacgcttaactttccgcgtgacatcagagcgcgagttggccttccgttgtcaaaagatgcgccaaattatgtaggcccttttttcaccgatggaaattgggaaaaaaattaggaaattaaaaattttttagtcaagaaaaaggaaatggctttcaattttgaccttttttattcccttaaatttatttaatccaaaaagtggataatgcacgatttataggtgaacgaaatgcatgccaaattcgtgcaaattgttgccattgcgtgccaatggccagaagcgacgttgaccgatttgaacattctcaaactcagtgaggagaaatgaaaattaaaaaaagaaaattatttttttcttttttagcctttaatttataaaattatttattcatttttattttagttttgaagagcatatgtagccaggttcgttttgtaacccaatggatgattgagaaaaaagttgatttttatccgtgctgaatcgtttagtaatagacatttatgaatattaattatcatcttaacttttttcaggggtaatgaaattttttttaatttgtgcgttaattgagaaacataagagctattaaatggcccaaattgtatttaaataaattgcttatgagaaagttttgaagctttaaatttacattttatgataaagtatattttaaaaccttgtgctaacaacaatatttaatttttttttgctttggtggaactgtttttccaaaagtattaaatgcgtaaaattatttaaatttaaatattctttattttaattaaattggatgaaatttattttatgtattatcccttggtggaatttatgaaacaacttagcacattttgcttttgtctcatctaccaaaaaaattctcgaagaaatataaaaaaaatgaaaaaaaattccctaaccaaaaattagatttttgtggctaaagcagaaaatccaatttttaatatccatttttattcgttaaaatacagtactttttataggcaccgaaataaaagtcgacgtatctcagcgggcctaaatcgtagacccactattccaaaggcaattcggtagcaaattttgtgctctataaaatgggcctactcaaaatttccagaaaatttttcctaaccccctagaattttttttgaaatttacccctcgttcccagccaaaatgggctgatcagatcaccatgaaggagtgatctgatcaatttggg

SEQ ID NO: 15341 - DNA, 1347 bp, Heterodera glycines
cgccttttcgccgttctcaactttcctaattttgtgaattccccaaaatctttggaatttttcaattttttcacctttcaatgtttccgtttctcctaaatttgccttttttccttttatttatttttctttcagtaaatatttcatattaactcttttaaataataatttatattttttgcactttcgatttctcctcattttctctcattttgtctccccccccccctttttccctttttctcgaggggcaattgcctttaccccgaaaaaattcgattaaccaacggagaaaattgccctgccaaaatactgcatgcagtgaaaagctgaaaagtgaacggcgaaattggggagaggaaaaacaaactcacgtggtgaggacgcaatgaaaagagaaaaggggggggggggagacggaactttggcaaaatgacgagacgaacgacgcgatgagacggcataatgccgactcttgttttgagaaggaatggggtcaagcagcagcagtgtgttcggtcgcattattccctcccattagccctttggcattgatcagcaattactctgatcactgattgtttaatgtctccccttattttccccctctgattttcagctgttgcttcggttctttctgtgccaatgccatctttttcttttgtcccttctccctcttcttcctcctcacgttccgtttccttttcctcttttccaccctctctctcttcgctgtcctcttttactgcctctcgcactcctttcgctgcttcttcttcttccccttccttttcctcttctctcttttcttcctcttcttccactcctttttcttctttctcttcgtcgccttctcttttgcccttttttcctctgcttttcctccccattgtcctcctccttcttctcacgccgttttgcgttgcgcaacatcgaagaattccaattccgttggaaatggaccgaatgttaggggcgggtagggaagtgtacgacaaacagatcgacaccgactcagtacgaacagcggccgacaagcgtaaagttggccatgtacatcgaggggatcggctcctttcgtacccacacaatggacaatcattcgttttttggcttttttgccaattttccctttttaggacttccaattggacgtttatttgcaacagttttggagggacccgcggctggcgcacaacgaaagcaggcgagcaaaaacagcgcacaaagccacaaacattctcaaaacgttcgctttactataattctgatccgtgacaaatccatcctggaacgaatttggcatccggatgtttactttgccaagttggcactgtgccaaggatt

SEQ ID NO: 15342 - DNA, 1570 bp, Heterodera glycines
cattttctccttttcccttcttttcccccccctccccctctctttccttttccctctttacccccctctctctccttttccccttttccttttcacccattcgcttcttttctccccccgtcggtcatttaaatgttctccccttttcgcaacttctccccctcctttttttgcttttgatttccaaattttgcccctttagcgacaatggccgccgcaggtttactgctggacgaaaagggcgggggaaaggaattcgcaatttggaaatggttgaggaaaacgatggaagggaaatggaaaaggacgaaggagcaaaaggagaagcacaaaatggtcatagtcagtggaaaagcacaaaaaagggggaaacattggccaatcatttgaagagggaggacaaaactcagcaaaatcactgcaaaaacagtggcagcaaaagcaaaagaaggccttctcggctgagaaaggcgtcgccgagtgatctcgaggggggacaacggacgaaggacgaacggagggccaaagtcagaagcaccggtgccaattgatcacccaatgccccgctttgaattgcagaatatttgtgcgcttcaaagtcaacatcagttgcgacatttgccgaagagtgaagcgaacgacggaggaaaggaagcggcggaagtgccaatcattgtctacgaagagagtgacaacgagacggagcagcacacgcaccaccaccagcagcagcagcagaagacggtgggccaaccgccgcggacggccgtcgaccgacgcgaggcggcgcgcattgcgtgttgggcgagtccggagctgagttgtgaaggactgtcgctgaaagtgcgcgagacgcagccgcgggggacgacggagggtggggaagcgaggccggaggtcaaagagcggacggagcaatccgagggaaaagcaaaagcccaatttgaggtgtgtgccgcggtgcagacggactgctgctcgtcccccacctcctccacgctttcctcctccgccgttctgctcgtccccgactgtcccgtgccatcgcttccgttgggccccgccctttgcgacggcaccgcccctccggcgctcccttcgcttttcgctccctcccaaaagcctttccttcgccgcgcttccgcgttggcctcactgctcgacccgataaatattggcagcggagaaaagacggaggagcagccgaaacagcggacggagaaggacaatttggggggagagaaagggacgacgcggcgacaacagccgatgatgtcatcgcaagcgaaatggagacacgcggtgcgcaaattgcaaatgaacaagtgagcggaggatggaaaacggacggagagagcaattagggactaattaactaatctagacgcgaagccgggcgaattcaggcaaagaaaatcgacgcgtggagtcgctgggcatttccgctgtcctatctgagtttccacggcgcctattggtattattatttgagagtggccgcctgagggcactgaaacggacagaaaatggaaaaatccaagcaaaaaagaaatttgaatttcattttaat

SEQ ID NO: 15343 - DNA, 1166 bp, Heterodera glycines
actagcgagcggtgtccgtagaaaaaaagccaaagcgtggctgtgtcccgtccaacaatttcctagtgcttagtgatggactagcgagtggtgtccgtaggaataaaagccaaagcgtggctgcgtcccgtccaacaatttcctaatgcttagtgatggactagcgagtgatgtccgtaggaataaaagccaaggcgtgtccgtagtgatgagcgagtagtcgataagcccaaagcgtggctgcgtcccgtccaacaatttcctaatgcttagtgatggactagcgagtggtgtccgtaggaataaaagccaaggcgtggctgcgtcccatccaacaatttcctagtgcttagtggtggactagcgagtggtgtccgtaggaataaaagccaaggcgtggctgcgtcccgtccaacaatttcctaatgcttagtgatggactagcgagtgatgtccgtaggaataaaagccaaggcgtggctgcgtcccgtccaacaatttcctaatgcttagtgatggactagcgagtgatgtccgtaggaataaaagccaaggcgtggctgcgtcccatccaacaatttcctagtgcttagtgatggactagcgagtggtgtccgtaggaataaaagccaaggcgtggctgcgtcccgtccaacaatttcctaatgcttagtgatggactagcgagtggtgtccgtaggaataaaagccaaggcgtggctgcgtcccgtccaacaatttcctaatgcttagtgatggactagcgagtggtgtccgtaggaataaaagccaaagcgtggctgcgtcccgtccaacaatttcctaatgcttagtgatggactagcgagtggtgtccgtaggaataaaagccaaagcgtggctgcgtcccgtccaacaatttcctagtgcttagtgatggactagcgagtggtgtccgtaggaataaaagccaaggcgtggctgcgtcccatccaacaatttcctaatgcttagtgatggactagcgagtggtgtccttaggaataaaagccaaagcgtggctgcgtcccgtccaacaattccctaatgcttagtgatggactagcgagtgatgtccgtagtaataaaagccaaagcgcggctgcgtcccgtccacaatttcctaatgcttagtgatggactagcga

SEQ ID NO: 15344 - DNA, 928 bp, Heterodera glycines
gcttagtgatggactagcgagtggtgtccgtaggaataaaagccaaagcgtggctgcgtcccgtccaacaatttcctagtgcttagtgatggactagcgagaggtgtccgtaggaataaaagccaaggcgtggctgcgtcccgtccaacaattccctagtgcttagttgtggactagcgagtggtgtccgtaggaataaaagccaaggcgtggctgcgtcccatccaacaatttcctagtgcttagtggtggactagcgagtggtgtccgtaggaataaaagccaaagcgtggctgcgtcccgtccaacaatttcctagtgcttagtgatggactagcgagtggtgtccgtaggaataaaagccaaggcgtggctgcgtcccgtccaacaatttcctagtgcttagtggtggactagcgagtggtgtccgtaggaataaaagccaaagcgtggctgcgtcccgtccaacaatttcctaatgcttagtgatggactagcgagtggtgtccgtaggaataaaagccaaagcgtggctgcgtcccgtccaacaatttcctagtgcttagtgatggactagcgagtggtgtccgtaggaataaaagccaaggcgtggctgcgtcccgtccaacaatttcctagtgcttagtggtggactagcgagtggtgtccgtaggaataaaagccaaggcgtggctgcgtcccatccaacaatttcctagtgcttagtggtggactagcgagtggtgtccgtaggaataaaagccaaagcgtggctgcgtcccgtccaacaatttcctagtgcttagtgatggactagcgagtggtgtccgtaggaataaaagccaaggcgtggctgcgtcccgtccaacaatttcctagtgcttagtgatggactagcgagtgatgtccgtaggaataaaagccaagg

SEQ ID NO: 15345 - DNA, 1708 bp, Heterodera glycines
aaaacatgaaccctgagcttttcgggggtgctgatcacgaatatgatatccatttcgactaatttcgaaccccggacccgaactcgaacaaaatcgaaactcatttttaaccaaaattcacctttatttgtccaaaatcgatttatatacacgtaatggccttgaaaccctattttctattcattccatgcatttgatcggtttagacaaaagttggattttttgtgaaaagtgagttttcgattttgttcgggtccggggttcgaaataggtctaaatggatatcatattcatgatcagcgccccctaaaaaccctataaaaagttgttttacacaacttttaaaaactttttttaattaattttgaaaaatatgggacccccattttcatgattgccccttttttaatttcattttgttttcctgtggtattttttcttccgcattaggtgcaaaaggcattggacgcgttggtcgaggggaaactgatcagcgaaattgaacgcgtgggaggcgcgggctttaaagtgttgcgctgtttggagggggccactgcttacgtttttgcctcgaggggctgcaaaaaatgggacaccgccgcacccgaggctttgttactcgctgctggtacatttagaaattatttttcacaacaatctgcacttttcggtggaactttatcggatatgtccggccgactgattaattacggcccctccgtacagttgataaacagcgggggagtgctcgcgaccgccccgggcgtcgaccaccaagtaagtgaaaaggaaacattggggttattagttgttgattttccattcattttcatttctaagagtttcgttgccgccatcccccaacttgtgaaggaatcgctgccagaaacagaaattgttggtctgtgaataccaatttgacagtgttgtgacatctccacctccgtccgggttcccttcccattttgataattgtgacgaattcccttatgtaacattccgtttttgaggatttatcgaacaaaaacaaaacaatgtgacatttttattattttcccgctttccaatcgcatttcattccaacccttcgctgacaatggctttcgccctctccgacgtaaatggttctgttgcggcacttttcgtgtttttccgcctgtttttgtcctttcttctctgtgattcacgtatgattctgtgctcccgcgtggcactgtgaatttggcataacaattgaattttttttaaatcgaaaaaaacaacctgtaaatagctttcggcacatgccgatgtttgacgatacgccgcacttccggatggccttggaaagtgtcgcgcaatttctggctgtattcgatcgccgctttctcgcgtggacagagctaaaaaaaatgctctttttattatctattctggttgaagccatcaaaatgactaaccgggccaagtttttcggctgcgtttgccttccacaggcgaatgttcatgtcatcactgccggacaacacaaatttgttgtcggaagaccacaagacggacagcacatattgcatccgcggggtgtggtacacttcccttacaaattaggagggaaatttataaacaggaaataggggagatgcatccacaaacatcgacgcaaaaataaaatattaaaaagttttaaggggctagacaatgtaaactttggtgtccagacatttgcggc

SEQ ID NO: 15346 - DNA, 3002 bp, Heterodera glycines
  unsure (1)..(3002): unsure at all n locations
caatttgacagtgtgtgacatctcttcctccgtccgggttcnccttcccattttgataattgtgacgaattccnttatgtacatttccgtttttgaggatttatcgaacaaaacanaaacaatgtgacatttttattattttcccgctttccaatcgcatttcattccaacccttcgctgacaatggctttcgccctctccgacgtaaatggttctgttgcggcacttttcgtgtttttccgcctgtttttgtcctttcttctctgtgattcacgtatgattctgtgctcccgcgtggcactgtgaatttggcataacaattaggaatttttttttaaatcgaaaaaaacaacctgtaaatagctttcggcacatgccgatgtttgacgatacgccgcacttccggatggccttggaaagtttcgcgcaatttctggctgtattcgatcgccgctttctcgcgtggacagagctaaaaaaatgctctttttattatctattcgggttgaagccatcaaaatgactaaccgggccaagtttttcggctgcgtttgccttccacaggcgaatgttcatgtcatcactgccggacaacacaaatttgttgtcggaagaccacaagacggacagcacatattgcatccgcggggtgtggtacacttcccttacaaattaggagggaaatttataaacaggaaataggggagatgcatccacaaacatcgacgcaaaaataaaatattaaaaagttttaaggggctagacaatgtaaactttggtgtccagacatttgcggcttcgcccaattttatcatcgataaataaaaaggacccacatataataatttttgcctatttacaaaaacaaaaaatttttttttagtgccaattaataggctcaaagcctaacgagttgtattttttttttacattttctcattgttgcttgcactttttaaatttttgcaaaaaatatttttgcgccccgccgcaaaaagaggtgtgaaagcagaaagtctcatcgcccatgaatggtgcccccccccttaactgataatcctgggacgtccatgggggaaatgtttctcaccgacttcgccattgttcaacagggaaaatgcgcaaggatctgtcaaaactcccactgacaaattcgtgaccagatggcgcaaagtcgacgtccatcacagcggaggtgtgcccttggtggacgtggcgagcggagtccaacctgcgcatgtcgaaggtgtacaaactgacaaaaagcggggaaagtcaaaaatatacccaataaacaacggaatgataggttcgtcagactgacttgtagtcttcatttgcagcaacaaaagtgaacggctcaagcggatgccaggcaatgcttaaaatcatttggtttattaaacggcatttttgcacctgttcgtcctcagtttgagcactacgcggctcagcggcactttctggcgtgtgtcgaacagaaaaatggagcgatctgcggcacatccggccataatgccttcctctatggggttgcagttaatatgctgcacagtgttgggcccaacagcgtaatggcgaatgggcgaagatctgaaaaggatgacaccgattgggaggacaccacgtctggacaccgcacctgtgcaaccgccacaccgaaatgccctcaccacaggtgacgaaatcgctggacatcgccacgtgggaacagccgtgagggaccccgtcaagggacaactgcgaatggccaaggaaagggacagaacgttacacaaaagaaaaggccaattcattggccaccgaccgaatggacgggctgcgttggctgagcatttccatcaaattcaattggcaacggccacactttgagctgcgcgtcttggccaaccgtgacaaagtgcaaaccgtcagatgcatcaacagagagaccgttgatggggccggaatgtgcctggaggacgtgcaaacagcggcgagtggccaaatgccacactcggacttggccatcacgcgcaccggacagaacggtggacagacgggtgggatgtttgaccaacaaattgacctgcgaacgtatggattaaacaatttgaaaatatacgaagaaatgtaggtaaatggggataccgaaatgccaataaaaaatgaaatgccaacaccaactgaccgcctcattgtgcccatcaaaggcagccagaaatggcttcgcgaacatgcgctccaactttgccgcgttcagtgctcgcgtgtactccacctgctgctgaaatgggtcgggcggggcggcgtaattccgaggcactaattttggatgcgaaaaatcaccaaaaatatcttcataaagctgctaacccttgaatatgtcatgttttgtctcgcgttggtattcatccggatgtctggagatcactttgactttcatctgaaagaaaacgcacaaattaatataacagtgaatttatttgccaaaataaattaaattttgcatttacagtaaataacgcatcataaaatagtcagtattattatcatgatttatttgtttgaataactatttaaaatggcaatgaaaaacggaaaagggatgcaccaatttttctcattaaaaaccaattttcggcacatctctgacgatactgcagacaatgctggaacattgaaacatcacaatttatacaaaaaaggggcagagattgacaatgaattgtggagtcaaaaaataatcattcttaattcttatcctttttgcgaccgaaagggggggggggggtcctctctcgcctntaagntacgttttgtcattccatgaaccagcaaatgcttttaatacaaaaaaatatatacacaaantttggaatatattttcaaaaaaaatgtttgactattcagtaaaatgggatttggctgaanggtgcattttgagacatgacagaacgtaataataaaggagtcgcccaaaaaagggctcagggttcgccagcatttccccgtccccattc

SEQ ID NO: 15347 - DNA, 594 bp, Heterodera glycines
aatgatatctctaaaatgcccgaagtgacttaacatggggactcaagaaatcttgccccgacaagaaatgaaaccattaatttttaaagtttgcaaaactgaagatcccaatggtctcaccagcaagtgaaaacgagaacggcgcgagaagcagcgaacggcagcgtaaatagggggggggggggaatggaggaagaaataaatattctcctaatttagatttcgtctttttttttttctttatatttcctacgcattggcctaacccaagcaatttagcttgggacgaagcggctacatttccttatatatattccaatttttactataatatgagtttattttttactttcatgtccatttgagattagcttaaaatatttaaataattcaatgtaatctggctaatgattttatttacgtattaaaaattttcgttattctttgattcgatatccaacttaattttgagaagaatgtgtattttaatcattactttaattaaactcattcatatttttgatttatgcactttctcgtgaagagacccaatctcgcgtctctcgcctcccgtcacccaccgtttccgatgag

SEQ ID NO: 15348 - DNA, 2404 bp, Heterodera glycines
  unsure (1)..(2404): unsure at all n locations
tatcagaacncgccggaccctaaaaatcctttttcttttttttcaatttaactcaaagttgcaaaatttggccattttgtggacaaatctgttaacaaatcacattaaaaattacaaaaatttttccggcggcatctatcggcaccgccggcccctcaattccccaagttttttggaaaaagcgccgcaaaaaaatcaacttcgatttttcatgctcagaatctcacaaaatgcttatttcgaacaaaaaaaattactcaaatcgatcatggacaatcaaaaatataacatttgaacattttatacgtgttttgaataaattttgtaaaaatgaggctttttgacccaaaatgaggcttttttgcctgccaaatgaggctttttaaaattttcatctggcaaccctgtataaaatagttaatttgcatttaaaaaagcgatttttatacggtatccaaatatccaaatcgtactgtccagcaacaaaaaaaaatcctttagaatcttggatttgtgcttattttggcatatgtagcagcttattctgtgcttccagtatattctttatgtggaccaacactctgaatgaagttatggaccacgagaattggacaatgaattggtgattagcattttggccaaaattggaatctttccggttcttggtactgagtcctcactttattattcaactaattcccaaggaaaaaatctattagttttgaatattatgattagggatggattcttaggtttttacttattttttctgcggctttaactcgacgagaaacatacgaaaaacacaatttttgttccaaaaactttcgttttaacgcccctatccgaccctaggaatccctattttggatgttcgcccctaaaaatccctattttgagtgtcgcccctaaaataagttttatcccttttttggcgtttcgcccctatttcgcgatttttgggaaaattattaacaagaatgcaataaaaatgaaaaatacacccctaagaatcgacctaaaaattttcaaaaaatgcaccccactcttaaatcccgaaaagttcgaaatgtacttcatttctaactacaatccgtgaataaaattatttgccttaattttaactaatttacatagagaaaatatcaattttaataaatttcaccccgtacatttgaaactttttcgcccctatttttgcccctattttgcgaattttttgcccttatttaggtccctaaattggaatttttccccactaaaaatcccatccctaattatgattgtaaaaaatttcagaaaaatttgactaatgaactgtgaaaataacaaaataccttatacggcccacaaatgacaaaatcggcctaaagtcgcaggctaataaatttggtttaattctggctcgaatccgcaaaacaaaagtggttgaaggaggcgggcggaaagtttcaaaccgaatttctaaaaagctatcttcgatttggtgcgcaagtaaattgctattccagtgctcgtctgttagtttgggagtttccattgccacaaatatgcaagaaaacgcttcgtcgcttggcgtttcattctgcggtcattcctggtggaatgactaaatcaggtcgaccctcagaaaatgctggcgggataatatgccataaatgggtccgtatcgttttggcggcgacgttttggcgccgacgttttggcgccagggtcgttttggcgccgacgttttggcgccgacgttttggcgccaagctataataaaaaaaagaaaacacccaaatttaaaaattttgtaaaacaacaaaaaaaacgtatttttcgcgaaggtaatactgccgatggttggttgccccccttttttgaagaaaatttttttgttttcaaaagtcatgaaaacatgcttccaatggttttcagggtcgctgctcacgaaccaggcatccatttcgaccaattcagaacccggagccgaaattcgaacaaaaaatcgaaaataaaaaatttcaaaattctctttttgtttctaaaatagattaaaacaaccaaaacgttttggcgccgacgatttggcgccatgtagggaggaggtagaaatgatgaaatcgttataatttttctgacgaagtctatcaaagagccggatttaattcttcatttactctttcgctttggcttatgttctcttaattttgtatttaaatgaatcgtcaaattgatacgaaaaaacaaaagcctaaaataacgcatgaaggccagcttcggccggtggtctgatcgaatgaaagaatgtttcggagactcattggcacctccaatgttctaccaaataaattgtttccatttcttcattttgttaattattatatttaacganaaaatttcattttttatttttttt

SEQ ID NO: 15349 - DNA, 3885 bp, Heterodera glycines
  unsure (1)..(3885): unsure at all n locations
tgatttcaatatatcgagcttcgaaatttcgggtttcgatacttgcgtatcagtttcgagtgctaagccgagcttcgcccgtccctgtctcagaccagcaggaggccccatttcttatgctggactagaactgattttttgaaaaactcccaggaaccagaccgctaacattcgatagcccaaagtgttttctattagcctgcaaaatttaaaatttttgatgaaagttgtgacggaaaatgttaagaaaacatttgagtacctcaggtcacaaatagatttttcaacagaatgaaaattgtttttcggcgcaatcgtttcggcccaacaagtttttggctataactttttctttgtcaactaaattcaacattgttggtatcattctaaagcttaacatgtttataatgtattttaagttattgcttcgcgattagacaattgctaaaaaagttatacatgaaaatttcgaatttttaaagttttatcttaataagttttttacaggcttgcaaatcttttcgcctttcgcagggctaatagagcatttgaagggcttaagaatgataccaagattattagaattggttaacaaagaaaaaagttgtaatcaaaaatttgggctggcaccgaaacgccaaaacggccaatccctttttttagatttaaatgtttggccttctatttcctaataataatttcttattttttacttttattgtaatcgttttcaagaaattgcttgaatttagataatttgattcacatgaaaaatttagattattcttttatttatttaagttgaaaaaaatgataaaagagcttcgagatgaagtgttcggaaagatcgacgagcttcgagatgaaatgaaccaaaaatttggccaaatcaacacgagattggaccgaacagaccaacgactcgaccaaatggacaaacgactcgaccgaatggaccaacgactcgaccaatttgaggtaattttgacagatctaagcttagttgtcggtagttctgcttttgggcttacatttattgttgctgggtttgtttatggacccattgtactttatttctcaatgtttggacagaccatacatttaatctcattgaaacccaattcggggcaggcgcttttggttagcggcgttcgttccccaaaaaatgaccaggattcagtatcgcgtttgaataatttccctcccctccactgatcagcagtatggccctgtgccgccaccgatgccgcttcagtccggccactacagtggtattgaggtatattcccaaattttaattttcgggaggaaacgacgcagaccgcaggttgggaaaacgaactgctccgcttgttttttggcgttttgtcggggccaaaatttgaaaatgcaattccttgaattacaaatacacaattcacagtctacctccgagttttccgagttgcgccagattgggacttctgccgcatttgacacccgccaaaacaccggcagcgaattgcaacgccgccctccatttcttcaccacgtgtccgagaccggcaaccctgtgccaatattggtgcggagcttaactaaaaacctttcctattgataaatttttcaaaaattttcagactaggctgattaactataaatttttgtgatatcagactttcagagttcgatcgggctcaacgctctgttcactcctctttcccatttttattttggcaactgtgttccgtcaatgacgtcgccgatctgcccaaaggacaaagtatatatttggtcgctggtttaattcactacggcttaggcttaattgggccgccccccactctccgtaccccatattcagtttttcaaaaaaaaaaaaaatcaaaatggcgtctattttacaaaatttgtagccgataaattactgtttttgccatttggtcactatttttcaaaaatgataaaatgtgggtatcgcagctttacgttgtacaggtcaggcagtgccgtcaggcaccgtcgggaaaattaaataaagcaatttgttaagaagaattgcttaaatttaaaataaaatttttagtttttttgatgggggggggggggctttagcccctcaatccctcctgtgaatcttttcaaggattaggcagccatttgcttttggtcatccccagtagttttttgcataagatattttttcacgttttctctttgaaatatttttagttttcgggaggaaataaaacggcggtgaatatcatgggccggttttttgacattttctgtaccaaaatttgaaactgcacttccttgaatacaaatgtacaattcacagcccaacgtcgagttcgacgtggacctcggccacgacttgagcacccaaaatgtgggcgatcttttgaaagggcaacgcagcgttttggccgatccgccgatgcaattgtttcctcgccatttgttcgaggtttgcaacagagcgccaaaattggtgtggagcttaactatagtaagaacccatcccagggataattttttttcaaaaacttgaaattaaaaaaaaagtttttgaaaaagatgaaatgttactgacacaaactttgtgaatttcggaaaaaacttacgcctgccaatttttaatgtaaaattgttgaagagtggcgaagcttccgagacggcgtccgaccgcaaagaaagcatgggaaaaggacggaaaaaaccgagcaaagaagtcgctgatgctgggctcacggtgataatattttggctgattacgttagtcaatacctagactagaatttcaactatttttttttgaaaatgtaattattcatattaaaatacaaaaaaaatttagaaaaaaattccattttccttgaaaatttctttaaatattttttctaaaatctcaaagtttgacaaaaaaaagaagttatttttgatatggaggagggaaacggagagggggggggggaaacgttgagcacccataaatacaacaaatgcacaaatcacagccctccgacgagctgaacaaaaccgcctcaattgtgccaacgtcggtgcaaacttttcgtcgccacttgtccgagaccggcaacagaatgcgaaatttggtgcggagcttaacaaagaatccagcccagggaatttgaaaatcataaattttaaggacagcaaaaattattgggattcaaaattggaaacacaatttgcaaaaataatgactaaaaaatgttaaattttgacggtttttaaagggaaaaaaactaaaatccggaaatttttcaagattattccctgatgagaaattccatgggatgtgccaagttcaaattcagagcaagtggcgaatttggggcggagtttttaagatttttggactttctttccattttccatgatatgtttttcagttccgtacgaatacacgcagctattcctttaagaagtgatggaattccattttattttgtcatggttgttgcgagttcttcactattttttctcaggaatttaattttaatttttttacattaatttttggcttaatttctcttaatttttgttttctttttttgttgctttatcacttttttcgatcttttggttttttacaggtctgtttcacttctgaataaacgtgtacttttttacttttggtccaccacttttaagctttgaacgcgatttcaacaaaattttaaaatgctaaactgataatccaaataactgtcctcatctgactgtaggatttggaaaacgaagaaaacccaattaaatttncaaaataattaagcgtagaaagagattgtatccgatcatctgatttcggctaacagggcttgaaggaattaactntgaatcggattttgggcaaatgtcgggtgcttcggtgtatta

SEQ ID NO: 15350 - DNA, 1127 bp, Heterodera glycines
  unsure (1)..(1127): unsure at all n locations
agcgagtgatgtcngtagaataaaagccaaggcgtggctgcgtcccatccacaatttcctagtgcttagtggtggactagcgagtgatgtccgtaggaataaaagccaaggcgtaggatggctgcgtcccatccacaatttcctagtgcttagtgatggactagcgagtggtgtccgtaggaataaaagccaaagcgtggctgcgtcccgtccaacaatttcctaatgcttagtgatggactagcgagaggtgtccgtagtaataaaagccaaggcgtggctgcgtcccgtccaacaatttcctaatgcttagtgatggactagcgagtggtgtccgtaggaataaaagccaaagcgtggctgcgtcccgtccaacaatttcctaatgcttagtgatggactagcgagtggtgtccgtaggaataaaagccaaagcgtggctgcgtcccgtccaacaatttcctaatgcttagtgatggactagcgagtggtgtccgtaggaataaaagccaaagcgtggctgcgtcccgtccaacaatttcctaatgcttagtgatggactagcgagtggtgtccgtaggaataaaagccaaagcgtggctgcgtcccgtccaacaatttcctaatgcttagtgatggactagcgagtggtgtccgtaggaataaaagccaaagcgtggctgcgtcccgtccaacaatttcctaatgcttagtgatggactagcgagtggtgtccgtaggaataaaagccaaagcgtggctgcgtcccgtccaacaatttcctaatgcttagtgatggactagcgagtggtgtccgtaggaataaaagccaaagcgtggctgcgtcccgtccaacaatttcctaatgcttagtgatggactagcgagtggtgtccgtaggaataaaagccaaagcgtggctgcgtcccgtccaacaatttcctaatgcttagtgatggactagcgagtggtgtccgtaggaataaaagccaaagcgtggctgcgtcccgtccaacaatttcctaatgcttagtgatggactagcgagtggtgtccgtaggaataaaagccaaagcgtggctgcgtccccgtcaacaatttcctaatgcttagtgatggactagcga

SEQ ID NO: 15351 - DNA, 943 bp, Heterodera glycines
atttttaacactacaattaaaaattccagatttatttttactttcatccattccttttgcattaaatactttttatttacgggcttcttccctctgctgatgttgtacaacatcactgtaatcttttcttacttttatatttgttgcatttgatagtaaatacgcttttcagtttctcaatagactcagtcgatccctttgcgaggcggtgaatgaccaggaaaggcgcgaggccgaggagactctgtcaaaactgattgattcgcaagactgtcttggcaattgtttactgctcttgcaagatggagaggttagagaagattgttggttgccatgagcgtaatcggagaaggaactgagctccaaaaaaattttgcaaaacaaaagggtcccccctattgtttttgataaaattaaaaatttgtcactttataacaagcgccaaatttgcttaataggcccaaataattgtgtatccatgatcagcggcctctaaaacctccgggtacttggtttcagtcaaattcgaaatttacaaagcatgtttaaatactcaaaacgagctaaaaaagatatcaacaagtgatggtttctccttgttttttttggtacataaactcggaattcaaaaacggctatttttcacacacttttctctgttaagcagccatttgcgcaagttgtggccagcggagcactcaagcgaatgttgaacaggaaaatcagcctgagtatccaagatcgactccaattaagtgagggaatttgaaagcggaaacccaaaagaaaagtgttaaatgatttaggaaactacattcttgaatatctgattgcacggccaactttgcctcctttcattttgaattcgttatgcaaacttttcgcgctcctaacaaaagtcggatggttggagaaggagccgcaaacggacgcccctcctttc

SEQ ID NO: 15352 - DNA, 2405 bp, Heterodera glycines
tttttcgggctgatatttatttctgtgtatgattccttcaaattttaggtccaactctcttctgtccgacgaatgctttttgacagcaatgaccgacaaaagtatttggagcaaattgtgaatggcctaaagcgcgttttggaatcaccagagaatctgaacactgctgtaaaatgggcttttgtggttttattcctgttcaattttaggacaatttccaccaattttgccgcgttattagccgaatgaaggccaattaccaagtgtccgaattggtcaaatgcgatagtttttccgagttgttaaacagtctcaccaagttcaccctggaatgtctgtccatgtcccatttcttcacaaccaacagcatttactacttgatctctttctggagcaaactcgccggttccctcggttacgcccgtgtcgacgtcgaattggtcatcagttttcttttattttgttcaatttccgttttttcagatttccctttgcattcccaaagtttgcactgctttcattcagtcgagaatcgcattgtgtgaaagtgttgttaggtcagtgaccgttttctcatcccatgcatttatttgcctttcctttttcagacagggcgtcgaagacccattggacgacatgggctcagtgaagcaactcatggaattgtttaccattctgtcgcggaaggactacaagcaaacggtgaaggaattgctggtcaggttcgatgagagtcttggcattcttttcacgcagggcatttctgaagaggttcaaaatgtagaacgaattttggaaatggtttgaagttaaactttttaaggagcaaattatcgcccggaaaaggctgatttggctgattacaatgatggccgctggaataaacgggaaggcgtcttccaacagcagcgaattggacgacgacctttacgacggggaagttgccgcgcgcgtttggaaggtttgtgccggcgtacctaaccattgcaaaagtcaattgacattttgcagacaatgcaattgacaaacggacgattggaacggcaacatccaagcgttatggacatccaattggagttcgcttacatttatctgatggacgaatttcgcaaggcttacatttccgaccaagtgatgcgtgatagtcaagtgtacgaaaagttggcggaactcggcataacggacgactccgaagtgttacgactttatgcccagaaaatgttgggggatttgttgtgcataatgagtgattaacatgcacttttgccttcttagaatcgtcaatttgacttactggggaaaggacgagaagatcctttcgtccactctctctcttctgaatgatctcaccgtcggatacgcaaatgtgcgcagacttttgaagacgaaggaaatccaagaactgctccgaaaccatgctgtgacttgttcctgattctttttcttttatcgaaatcttttcattgccaggcctttgactttgtcatttccattgaggacatttccattatgaagtcgcggacaaatttctacgcttcacttatgcgcctgttgaacattgaattggaagatgaccccgtacttttcagccagttcatgggtcccataagcggtattataatgaatcaataaacattttttttaatttactggtccttagaaaagttcaaagggattctcgcgatgttccaaagcaattccgccgcgactttttccagcgaggaccaactaaaaatggctgtgattggatttgttcgtgaccttcgaggtatcgcactcgcctgcaccaaaaaagccaattaccagctttttctcaattgggcgtaagttttttttcattcattatcctctaaaatggcactttggctaattgagaatgccaaatgtgttcgccgtgatgattgagtcggtgaagcgatggactgacaatgccgacatttgcacgccaattcttaaattggtggccgaaatgactatgaacaggtcggactcgactttccatcgctgcttttattttatgaaccgctttagacagtcgcggctcacttacgacatgcacagttgcatcaccgtcgtgctttttcgccatgtttcctccgtcctttctgagtacggtaatcgctttttgcaacttccgtcggtgcccaaaggccagcactacaaacaacgggtcaaaaacatcggagtgatttgtcaaattctgcgacacgttctctccggcaattacgtgtgttctttttttatttgtaattttggactctttatttattatttagcttccgcatggcgttttttggctttacggttagtgaatttgaataaataggcatggaaagaattggcaaatgaaattgacaaatttttaggtgacagttgccttaacgatgcgctcgacatcactttta

SEQ ID NO: 15353 - DNA, 2902 bp, Heterodera glycines
atcatttatataactaaaaattgtacaattcagatcacaaaaaacaattatttcttgctaattattcgtcatgaagcgaaccaacgcatcaaacatcactccgcctcgcgcaaaacgttcaatggcacctgcactggacctggacccaaacactgttgcactcgcagagcaagaacgacaacgcactttggtgttcattggcctcccggaaagcaatgctattcgcccatcggaacgtgttcaggaagacagggaagccgccacaaaaatcctggaccatcttgaagttgaggcccaaccaaccgccgtctttcgactcggacgttacgacccgcagcgaacaacacgcccgctcaaggtggtcatgccaacaaccacacaccaacacatggcactcggaggatggaagcgcgagcgtgctcgactccgttctctacaaaacctgaaccgcctgttcgtccgcccagcgctgaccaaagaacaactcaaggaagaatatgaagcgcgcttccgaaaacgtcaacaaaaccctgctcccgtggcaacagcaatgcaacctcgccagacaaatgttccgactcccgtcaaagaaaatggaccaaatcagaaggaggccagcgacgacatttccaaaccgccggaagtttttgaccaaacaatcctcgtatgttatgaagcattaaaatcattaccaccaaacgacaaaattgttcaccaaattcaatcactcgaaaaacaataccctcgtcttttcaataaatagttctgtcagacctccaaacatttcctcaaaaaaaatacatttattccagtacttcacatttctcaccaaaatttttcctcaaaaaaaaaaaaaaaatttttttttttctcctacaaccctaaaaaaaaaacaaccacttttccctttgttggaggtctgacttttctaatttctgcttctccattcaaaatttcaattcttttatcactgctttccatttcacctcatttccgccaaaagtgtaagtggcacatgtccttcttttggttatttttatttttgaataaataaataaataaaaattgaaaaacttgagttttcgatttttgttcgaattcggatcaggggttcggaattggctgaaatggatgccatattcgtgctcagcgaccccaaaaaccttataataaatatttgtataaggtgtgataccatcggtactattaccgaatcgagctaaaatttctcaaaatatactcctatgaaatgaaaaaaattttctcaaaaatttactttcttggcaaaaatttttaattttaaaaattttttaggtaactattttgggttttttggtcttaaaaatcccagtcctactcatttgcaactgcaatcagtgaataaaaattatttttgctcaatttttggctgaaaattatgtcactattcgtcactatttcggactttttgtcactatttcttcactattttggcatttttactcactattttagttaactattttgggatttttcgtcaccaaaagtcgcatccctagtgatcactgatcagaaacggcaaaagcagaaatgaattttgattgattatttgatacgattatgagacggaatgtttggacctttgccatttaagtgagccgtatatgatttgattttttgctcacgaatttgatcataaaaacattgaatttttattgtatgaactgctacatattgcccatcaataagacaaggaaacgcataaatggctcatgaattctatttttgccgttaggcgccgccgggtgaaattttgaaaatttgagtgcaatttgttaacagattttcaacaaaaaaggctgatttttaggactactaggcccaatttgtacgggttttctttaaaatatgtggaatttaaaaaaatatgaggaatcatattttgtcaataggaaacatatgagtagggcccggaatttagtgataaaaaatccccaaataattaactaaatagtgacaaaaaaatgccaaaatagtggcaaaaatagtggcgaaaaagttccaaatttagggggtgtaattttttaaatagctgttttttaatttgaaaataatttaaaattgaggtaaacaattttattcactgattgcagttacaaaatattttcttagcaaatattgaacaagaaaaaaaaaatttgggggaagaatttttgtgaaaattttccaattcttaggggtgtattttttgaattttttaggtcgattcttggggtgtatttttcgtttttattgcattttttgggaaattttccaaaaaatgccaaaatagtggcaaaaataatgacgaaacgccaaaatagtggcaaaaaattattttagtggccaacttccaaaatagttttttttagtggcgaagctccaaaatagtgattcctagtgatgaatagtggcgttaaaacgaagaatttccgaactaaaaatgtgtttttcgtgcatttctcatcaaaataaagccgcagaaaaaatagttaaaaaactaagaatccgggccctacatatgagtatacgaaaagaaaattaaatataattcgatttctgtagagggattgaacctggggaaagaagtagaaaatcaagaagattagccactaagccatttgcacaatttttagtgttacttttagactatatcaatttttttttaattttgcctttaactccaattttcagcattaaattttcactcagacccccttcttaccagtgcttgtttttcccggttgccctaccgggaccgggaaataaatttttaaaattcgggacctcggaggaccgggaattcccggcccgctctattctagtctattggatcatctagaagaacatttgatttttgtaatcaaacaaatgaaaccaacat

SEQ ID NO: 15354 - DNA, 3275 bp, Heterodera glycines
atttctgttttttcttccaaatttgatctctttcccttttgttcttttgactttttccaatatttacggtaaattcttcttttgtctttttcagttcgattgtttgcgaatcaattttatgacaaatttgctctaattgattcaaatcatttttttgttttgttgctttttcatcattagcaaatgcaattaacttggctaataagtcaccgttttctggtaaaaaagcgttaatttgtttcaaatcctcatcagtaatataagaattcgtattttctttgtcaattttaaaaagtttttcccatttttgtagcacttcttcaattttttcattcattccttaaattttttgattgtcttttttccgttttatttatttatttttattgcaaattgctgttaaagttttgtaaaatcaaattaatgaacatttttggtactaaatttagtcacattattcgggatggatttaatatattctattctaaatttattctaattttcactggcctataataattattaaagtaattatgccattatcaacttgccaatttccaaattttttgtttctgctttttctctgctctgcctttttgattttgactttccaactccctaaaaaatgcattgataagtcattctctcagctgatttggaatttttggcccaatttattcttaaaattttgcaaattttttttatatttttagtctattttttctcaaaaataacgacattgagtctcggtggtgagggaaaaaggatccatccaaaaaaggaatttaaattgaaaaatatataaaaaggattatttctatggattatttaaagcaacctgcacaattaaagtgaaagaatacaaatataagagaatggcaagtgttagatgaccaataataagcattttaagcaaaaaattaatacggaattctcaaaaatatttataacgacgatttttggagatgaaaattcgtaaaatgggatgaatttagttaaaacaaatggagcaaattttcttcaaatttttcagattgatataaaataggatcgatttacacattgaaaatgtaaaaaaaatttatagaatacaagtgcattcattcttcatataattgatattttttagtaattttttttttgctgaacaaaaaaaagaaatttacaaaataataaaatgcaaattaaaagttaaaaataatgcatcattaaaaaatcaaagtgaaaattattattaatttagccaaacgaatggcatttttcaacaatggcactttgttgtgctactcactaagagactataacaacaattcagttggtaaaatcgttttggttttttaatggctaaagagcttttaaaatctattaaattagagagttgaatttttaaaaatgccggcagctgatgggcgttgaaaattgattgaccggtggtaggtagagccggccctttttcaaaaacccaagtttttgggtgcccccagtccacgttatttcaacaagaaatcacggggcggattgcgatacgcttttgccactttaagtgtaaattaattgaaatttcatttttaaatatttatgttcaaatataaaaatttacaaaaattgcttattaattttcaagtaaataattttttttatgattatcaaataattttgcctttcatttcaccatacaatttattaaactgttaattaaatttaatgtcaaatgctggcaatgaaaacatcgaatagtgcggttagtttttttaaaatttgattttcgatagttttaataacttatcaatagaaagagaagctaattagctaattacttattattaattttgttatttaaaaatatttatagtttttctttatgtgttaagtagaattgggattttaattaagggaaaaattgatttaattggcaagaggtttcgtcagcataataaaatttaatgaaaatatttatttttctttgggaatttgtaggaactttttttttgtaaaatcaatagagtcactataatttttacaataaaataaatatacaaatttttgtttaagaaaacatttaattattttaatgaattgtttaaaaatgaaattattgcaataattctttttaattatatttttggtcgcccaaattactcaaatcgaaacagaaatgaaaaagttggaacaaaagtcatttgaagaaatatttggagaaaaatgggaagaaaaaggagaagaaagattggaagaaaaaagagaaataattaaaaaatattatcaaataaatgataaaattaacccaaatagaaagaaaatacccagaaaataatgcaataaaattgaaagaaaaatagcgaaaaaattgggaacaaatcgaacttatattcaacaatggattaaagaatttggtcttcagaaacaaatactaaaagctacaaatcaaaacatgatgaacaaaagttagaaattgttcaaaagtttattgcaatgaaaaatgaatataagcaaaaaagaaaatattcaagaaaagaatggaaccaaaattatgcagaaatttgtaagaaaattggagttggctatgaaacaattaaaaaatggaagaaacaatttgggatttgccgaaaaataaacacggagaaacaaaatggataaaatgaaattttattggagaataaaaggagaaaatacaaaaatgagtaacacggaaattgcacaaaagctgaaaattgatagaaagaccattttgaactggaataaacaatttggtgatgaaatgcaggaggattgaaatcatcatttgatattattttctcatttttgtaatcatgagaacgggggagatttattttcgaatcgtagaaaagtaaattgttgtaaattaaaaattattgaaaattcccaaattaaattaaataaataccgtattatctctgattatccacccggggggattatactgaaaaatttttaaaatttttttgaacatgtcgccaaaaatgtcatcgcggcaataaataataatgttattgcatttttgttacagaatatctgaattttacatgaaaaatttggaaaaattccatatatttaccaatggaatctttttgctgcgtttgtaaagcaatttatggggaaagagagaataattcaccaaaagaatgggaaaaaatttattcaaaaatatcaaaaattttgcacgaaaaattggagtttcgcaaattccactattaaccaaatggaaagaaacaatttggaatttctggaaaaagaaaaaacagaacaaagaaaaa

SEQ ID NO: 15355 - DNA, 3010 bp, Heterodera glycines
  unsure (1)..(3010): unsure at all n locations
acgggggaaatgtgtgtgaattttctggccgcccattttgccacgtcatagccatggttgttccactgaaaaacagcggattccaattttattgtgtagagaattgtcgattttttttttgtgaatttttggcttttttgactcatgcgtcaaaaattatcaggaaaatcggtaatagtgccgatggtagccccccccccccccctccttctcaaaaaagtcattttatgagatttcaggacggagaattttattctgatagccatttcgacacaattcgaattccgaatccgaacaaaaatatgaaatttaaaatttttctagtttcgcatttttggttcaaaaccggtttaaatgtaaggaaataaactaaaaaaggaaaaattgacgaatacggtaccaacgaaaagtcgcataaacacttttataggttttcttaggcgctgagaacgatagaacagctcaaaattgggcgcggaaaagcatttaaaccggtttaaaactcgaaaaattgagaagcttcaataaatatcttttaaaccgattttagaccaaaaacgcgaaaagaggaaaattaagtttgattttttgttcgaaattatccaaggttcggaattaggccggacacaatcggattttgagctaagtttaaagcaccataacttttttctttgttgaccaacaaacttggtatcattcgaaagctcgcaacaagctttattggcttttcaaaaatcatagatataatcataaataaaaatatgcaaaaattctgattttttgcggttttcgtgttacatctttttataagttttaatcgcttagtaaattcttttcactacactcaccggtgtcacatatcccagcgtagcaccgctcgtaaatttcctcttcccattgtccaatttgttaaaatcagacaaaatttttgccttcaacagatcgagctgcaataattaacattcattgagtaaggcgtggattttaagttacgaaaaatcccttgttaactaaatagtgacgaaaaatggcaaaaaagtgataaaatagtgaccaaaatttttttaaataaatttaaataacattttttgttcaaggatttttccataagattttggtgtaaaatttgctttcccattttcgtgccctttttgataattaattgtcttaaaatgcacacatttttaatattgtataatttttcatcccttacattgtcctccttctcctcctcctcatcctcctgtttaatttcatccattttgttttggtgatgtccattattgtccgtgccaatttttcgctcggattttggcattttcccatcggtctcttcgaagaaaaataaaacaacacaaaaaataataggaaaaaaatgtcggaccatttaagctaactgtatgaaaaatgcttttggcttaaaacggcccgaaaatggaatttattggtcgtcgaaaagagtaaataaataataaatacgctaaataatgcaaaatggaagaacaatcgatgacggacgacaacgacacgacaaggggcacatttgccttttcatttgcgatgaaatctttcagttttttctcagttttttaaagtaatttaaaccataaaatatttaaaaacattgaaaaatgttagtaaaaaaacaccgaaaaatttactcatttattctcttttcttttcgttttctttttcgcagagaagcaaaaatcaatttcccttttctcttttcatcgcttgtcctttcctttctcatttttttatcctttgcaaatgaattaaaggacaaattaatttctcatttctgtccttaaaatcagaggcgtcctttcgcgaaagaatttaagccaattttcaattaatgataaatttttgcatttttttgataattaaactaataattaaatttgcaatttaaattgtaattttatttctttctaattgttatatttactattttcacaaatattcaatcaaatggcttgttctgttcgtcttgatccccacattttgctcccttctcatttctttccgaaatttcctccccatggtccgccgccgcccattccgccgccgtacggcgaaccgtacattccgcctaaacagacaaaagaattatttacataaatattctgaaatgttggcacttttaaattgaatttcatttcaattttcaaaaagccttttttcgaatgatttaaattaaaatgtttgtccatttaaatttggcatgtaattaattaataattgcttaataaaaactcacgtctggcgcgcagagcagcaggttcattgtcaactctctcttcttgcgcggttatcagtgcggaaaaagcgcacaaaacgaccaaaagaaaggcaatgataaaacggagaggcgacatcttgagagtaattagtgcgagggtattaaaaggtaattaagtcaattatgtctgtgtgagttttggggaccctcttttatagtgtggccttcttctgctaatgtgctactgatcttcggtttgtgccagtttttcttccttttttttctttcctctttagtaaattttttttcagtttgacaaacaaattaattagggagactaatcagcgctaattggcaaatcggcgcacaaaaatcagtggtgaaacatatttgtttattaaatttaattttgtcgtacaattaatcgaaggtgttcttcaaacttgctgctggtgaaagtgaatcacttgcgcaagtttagtgacttcacaataaaataattattctttcccttttgggcaacaaaatcaaaaatttaattgcccatcatttgtaaaaataattaatgcaataaaagaaaataaaattaatttctccatgtttcctccagctaatttttaatattagtggatagagctgagaaatggcaaatataaagggaaattatagaattttcacttnatgtaaaattatttccaaccatagttttaaaaaataagttaatttncttaagntatttttaaattaaatttatcttttacc

SEQ ID NO: 15356 - DNA, 1259 bp, Heterodera glycines
attttacttgtcccaattatgacaatccgcgcggggaccgaatccatcgcattattcatttttgcaaaaattgcgagatctaataaaaaaatgatgtcagattcgatattagctgattagcaaggccagccaaaaacccctcggtaaacatttaaaaaatttttgcaagcaagaaaaggttccccaccactatggttttaataaaatacaaaagggtatttgcaagggagtgccatggttttcacaaattaattttgccggaattgcttattcttaagcagaagcggcaaatgtttgaaaattcataaatagtgccaagaaaatttaaaatgaaaatgcatatataaatttaaaatgttacctatttgtttcagtttttaattagttttcatttttcaaaatcataaacctctcaatctttaggtacaaaatgctgaagcggaagcgttatttgccaattgatagttatttggaagcgcttacaattccgttagaacggaaacaaaagcgagaccaattctaccaaaatattcgctcgttctacaaaaggaaatggtgactatttgtgcaaaatagcattgttaattttctgtatttcatctcaggggcttcgatttcaaggcgccttcagcgaacggacaggagctcgacctttttgagatgtacgaagcggtcacttttctcggcggctggcaaaaagtgacagcactgaacagatggagcgaaggtggccactttacacaaatctttctgctgattttgacatttttggtcgatgttcggccaactaataataatttattttactacaaaagcattttttgccccgagtaaattcagccgttagcatttgccaattttagtgctgcaactgctaaagattgatgaaaatattcaaatggctgagcacgccgttcaattcctttacatgcgctttctcagcaaatttgaacagagcgaagcgggcaacgacatcagcgaagagcacgaagcggaactgatcagcggacgcaccaatcgtttcaaaacgtttgcctccctctcacaagcgaactgtgcagagccacccttttctgcaccaaaaggtcggaaaatgaataaacttcacgggagtcgctgatcacgaatcatcttaagaaaaaatgcaaaaaaaagggcggtgtatgcggcataatggaaaagtagccattcatttgcaaaacaaaaatccttggttttttattttttcaaaaccgtcacacttttccgtagcacaaaaa

SEQ ID NO: 15357 - DNA, 2016 bp, Heterodera glycines
  unsure (1)..(2016): unsure at all n locations
ttataatccggacgggatgaaatnnacgcgacgggagtgaattgaaaggacacagcgccancttatggcgggcgaccgacttcgacctcgacagaccgaccaattgggagggtcttcaacattttggccgtcttccacaatctttcgtttgaggaggcgaacacggcccttatgggcgaaagtcacgcgcttgtcaggtcgaaattggatcatgaatttcagtttgttttttaaattatttttcaggtttttgctgctttgctccaattgtcggtggcatttgctgcgtaaaattgcctatgatacactgagtaacatcgcaagaaatgtttgtttgtttgttccccgctaataaaaatgcatttctatcagataaaattggtcgacaaattgtccaccgttttgctgaacaccgtccaaaagggtctccactcggacgacaaatgcaaagtgatgcgatccatggaaattgtggctggtttatgcgcaacgccaaccaacgagtcaattgtttgtgaattcttcgaagaatcggttccacgcttttaactgtgtttttagagtaattattaatttatagcaaatcataccgcggattttcgctcttttgtcactgaaggatattttgatgtgtatgtgtgccatggagtccgtgttggccatttccgagttgggacgggtcgcgtgcgaagccgtcgcccgctgtgaccgcgtcgttgaaagtcagtggcaaattaatgctttttcattttataataattagtttttaatcatttctgctgtcttttagtgctcgtcggctttttgaccaccgatgccctttcttttggcaccgtcggtttggcggggatgcacgtggttgaggtgcacggacaccaaaccaggccttatgttgcggttagtttccgtcttgaaaatcacaattaaatgatttaaaacttcgcaaaatgaatcaatttttagccaaacaaaaagaatcctcccccgccgcttaaacttcaacccgtacaaccgcccgttcaatatgcgcaacaacggcaccaaacgccggcgagcagtacaacaacaacggcaccaccatttggtgaagcgatggaatttgcaataaatgctcgcacagatactcttgaaacatgcccaggtaattgatattaattaattatccctccgaatgctttcgtctccttcagatgcctttcatcgtcgtgcaaccgatggcaatgactctgctcaatttgcctctcatcagcgtcatccaccgactcgcaaaaaagtttatctgaaatcttcgcgcctgccttttctcaaccaccgacaacaattggccaccgatgctccgcctttacaaaatggcctttcgtcaattgctgccgcggttccgtcgtccattgaatctgtggcgaatgaacgcgactttatgtgcgaatggctgatgcagtcggagggggacgacgattggtcggacgaggagggcacagcagcggggccaattgagccgtgcgcgaggtgtgccgggaattgcatttgtagttcttatacaaaaattccagactttcccggcggccgaaccccattgatttttgaaaattttatctcaaaacagcaaaaaattgaattgttcaatttttatgcgcaaaaccgctgaattactacttttttggcctgaagagcaaaaaaaaaaaactctccggtgccctccccaaaatggttttatgtggatactggcctagtctacggtctcactggccatttctcagggcattggttttgttttttccttttttgttccccacttaattctttcgtctggaatttcacaggttttttgcttccgcctcacaaatgcttttccacgtgtacaacgaacattgggntgccgcttgtccaacagcacagcgacgggaaccggcgaggatcgctctgtcgttggcccatttgcgacaacactcgcgcactctgtggtcatcacaactcatttgcagtaaacaatggatgagtagtgcattatgaaaatgg

SEQ ID NO: 15358 - DNA, 3018 bp, Heterodera glycines
ccaaaaaactggcggacggggggcattttcggaattccgacgcagccaaacttgccttttgggtcggctcccttttcgttttgaatggcattatgcgcccggcatcagtttttcggtaaagctacacgaattttattgtttctacaatttatccattttcagcgtgttttttgccatcgctttctgtggccaatccgtcggtcaaattaggcattattttgggctttgtctttcttccctttccctttgcttattttaccgttttcagctcatccccgatgttgtgaaggcgcgtttggccgggtctctgctcttccatctgatcgaatatccctctctgatcgattccctttctgaccgtgggaatgatcaggcaaaacggaattggccattccaattggacttaaatattcagaaattcgctggctagccgtaacatccgcaaatttggaatttccgagctctagtttgcaatgcgataaattttggcaaaaatttcaaaaaatcgtaaatttaaattattaaacaatcgttgggatttggatgccaaaggcgtccttgaaaaccgatttcatccattctgtgagggttaacaaggttgttaaaaacaaaattttcgtcggactttgatccaaaaagttaatttttttttttggcactttacctatataaaaaaagcgtcgccttaggtgaggaattttcatattattctttaaaagaattttggcaggtattaacaggaaaatggaaatctccaaaacattgttttaaaagtaaaaatttttaaaattttaaattttttttcctggaaaaagccccaaaataacaataaaaaatttggtaatcatgggtaaataattgtcataaatttaagtgccctcagtttttggcacagacgaaatgtcaatggcaaaagtaaaattttgacagcagcgctcaattggtaacggaccttgcttccgctccaataggcctacaacaatttccccacttttccgcgtctccgaattgtgccattgtttaacaatcgcctaattaccgtgtcgttagtaattagtcagtctattataataaagtgcccgcggcaaaaccaaaaacaggaaatttttcgaaagaaaataaattcagcaaaaaaatgaattaaatttcagcgaaagtactgcaaaaaaatgactctaattaacggaaaatggcctaattacatttaaactgccgttggaccaaaaaatataattaactttccaaagacaaaatttatcgattataaatgtttaaagtgaaaagcctttattattaaattaacaataccaaaagccttacacataattaatcagattgcctcaggcgcccacaaatgaataaaatttaattgccatggccacaattcacaattattcaattaaatggctgcttggccgaaggaaaagcgcgaaaatgaatgaatgattgaattgaattgcattgggccaaaaaagaaaaatatttgaaccgtcccggacaaatttaggagcaataacaaatgtcgtaaatgaatgatttgattgaattgcctcgggcaagaaattttttttttaattatttgaactgtatgcgggacggacaaatgtgctgttgacaaatcattccgccccccccccccccgcttgggtaatgtcttgggcccagaaaaaaatgatatttgcctaatgagattggtttagttttggcaaaagttaattgatttgtggctcgttggcattagcttgtcaggcacctttcaatggttccccagctttattaaatagcggttggcaacaaatataagtccagggcctttattggtcagtgccatttgtctcaaaatgccaaatttggcgaaaatggctaaaaatttcacatttttcccacgaagccaaaatttaggataattcagcaaattttaaggaccagccaaacaagaccacaaaaaagtcattttgctcatcttgacaataattagcattgcccatttgtctggaaacaaattggcattaattagtttgttctgaacgaagtaatttgtcggcatattttgcactcggcacggacggcacagcacacacagttcttttttttgtagcgtctgtgtgaagtgccgccgccgtcgccaagtgattttgtacaatatttgcacacattagggaggcaaaatttgttggcactgtgttggttgtgagtttttgaaatgccaatggttgagtgataagaaattggagggaaattggcattttggtattaaaaaaattttccaaaaaaaaaaaactaaatgcttttatgttaaatcaattaaatttttaagagaataaatgaaatttatgataaaattaaaattcatctgccgcttagctttaattaacattttttaaccaaatcttcgattataacaaaaaatagtaattctaaaaaaccctgaaatcattttcaaattagcataaaaattgcaaaaagaattaaaatttcaaatttcaaaaattcaataaattaattagggaatttactgttaattgaatgaaaatgcttgatggaaacagcatttttgggtcctggcctttgtataaataaaatttgtggaatgagaaagggcaacatttttattgcgctcacgaaaatggcacggtttttttgttccaaaatttgttagccgtgccaaaatcattggtccaacatttgttgctcgcgtgccgaacgcatataaaaacagaaaagttttttccgggcattacctggggtggtgtaaatttttgccgccccgggggctgtcacgcaattttttttcactattggtggcacaaatggtgcatttcggcacaacacatcatcgctcatcaaccaccacattctatgcgcgcgatgtgccaatgctccaatattttaataattcataaccattgcgccaatttcttgccgagaatttctcgacccatttcccctcgggggcgctaaacttacttcttttcttttttttcttttccatttaaatttttcttttcacctccgccg

SEQ ID NO: 15359 - DNA, 2641 bp, Heterodera glycines
caaattatttggaggcaaaaaatttacccattcaatacattgcacttttattattcattgtatttttatatattttataatttaagcatattacactattatactcggatcagttaaatttgaatttaaaaaatttctttgagataaatataaagagtgaagtgataaaaatatggagttagtcgtttttgtgggaaagttgacatagctgcaaatgtcgggacacaatgaatgatccagacctttttctccaacaattcataaatatcaaaattcgtgctgtttgagacccaaaaaaccaaagtttttatcgagtcgtcaggctcgagaccgactctcgggcataattaattaaaataatacaattgttgcaattgaatgggattgaatgtacgaccgactgaaatcgatcattaattaaggatcaaattacatgtaagaaaaatcggaaaatatctgtaaaaacccatattgagagaaatgttcaattttaaattttatcattgaaattaaaatatgctctgccacaaaatttaagcacctgaataccaccataatctaaacatcctccaaggtggtcggggagtgggtgacaaaaatttggcatcccccaggtattggatccgctttagcaattgtccatcatagtaataaaagcaaaaccgcagtcagcaaaaaaaattccaatttaaatggtttcagtattgaaaaaatatgcttcttacaaaattataagtcagcttagtttttggtgaatttgatcactttaccaagcatatctttcccctaattcttaagaagcatacaaaaattggaaaattaaaaaaaaaattatgaattctttttcgaaaattggccaaaattttctgcttcacctccggcgggtgaatgaagcaatgagaaaatcagagaaatctgtgaaaaagttttgaaatttttgacattttaaaatttaaaagcctattagcataaaatagacaattaactaaattataacgttaagatttgtttattcatttgtcaacccaaacgaagtccatttttggtgaaaatgatctgtcgagtggctgaattgacaccaattcctacggtatcgccaacaccgtatgaatattcgacatttattccctttccggttaatccaaatcgcgccatcagtataatatgcataagtgccctagcgacttagaattgctacatccaattttgtgcgcagtttaacggaaaatccaagtctaatccatttgaaaaattaataataaagggatacccaattaataataattcaattttaattaatataaaacttttctgaatcactagttttgttatcattggtggggcctcggtttggagaagattagccaatatttttttggaaattcaccaatgccactgccattttagcatttaaaaatgaagccaagccaaataatgtcaataaataaaatcaattttgggtaaaagatcttttttggctgatcgttgatcagtaagtaatcaccagaaattaatgtttgcctgaaaaagttgcataaaagttttatgaaaataatataaaaaattcttcaaaaatataataaatagggaaatcgttaaatttatagattgatcccattaacaatttgtcggctaatctatctccaaccctctgaccattaaaaatcttgatcaacccattaaccccttttcacgtataccgccagcctctaaaaaatttcttttttaaaatggccaggtatatttagttttttggagattttcaaaatttaattctaaatttttttaaaatttccaaaatcccgtaatcccgcgtgggattgcgggattttggaaaattcgaaaaaatttcaattaaattcaaaaaatttccaaaaatcaaaaaatgctgaaaaataaatttttaggggctggcgggatgcattaaaaggggctgatgggtcgactaagatttttcgattggatccgacggtaaaaagttgatcggaaatcaaattattaacggttcataaatttaactatttttttcttttcaaacccacttttttgcggtgcaatttttcaaaaaactaggaacagggggtccggcggtccttatcagggatggcattccgaggccccaaaaattttgggaagtcggaattccgaccccaaaaatgtcggaaatcggaagtctttccgtgccatacctgatgcctatcgacatctgcgagaaatttttgaaatttaatgcgatttgttaacagattttgtctaaaattgaccaaatgacgcagtttttaactcaatttctacaggatttattaagtaaaagccaatccgggggtgccgataggcgccgccgggaaaatttcacaaattttgaatgaaatttgcgatgaaaaatgagttaactttaattaaatttattatttaatttatttaaaaatatttggcattctgtcttagaaaaattttcaaaaaaatcaataaaatcccgcataatcccgcacaaaaatcaatattttgcggatcccgctgcgggattggacctcaaaattctttgcgggacgggattccgcgggattaatcccgaaatcggagtgcggactgggatcccgcaaaattccgcgcgggatcccgtcccgcgccggtctctaat

SEQ ID NO: 15360 - DNA, 924 bp, Heterodera glycines
  unsure (1)..(924): unsure at all n locations
tgagttagagcctttttcttgtctaaattttcctcattttatttctatgcgaatattcatttttataccgttcgtcaatgtttcctattctgttgatcatttgtctgtcagagtgaaacacccaataatttatatccccaacagttttgtattcaacgcttttcatcaaaaacatttattctgttgattaaatagacaaatcattcattcatcaccagaccacaaattgcttaagaagctgaaacagaaagaagcacagtattttaacattagaccaaaatgagtaagggtcaaaatgtcaaataaaaagaaatcgcagagagaggggagttctcagatattcgtagtcggacttacaattaggaatttaatattgtgcaatgagagcacataaaaacggaataattaaaaatagccagaaatcgcggcctaagaattgcatttttcttcaacaccacaattttcaagccaaataaaatgtttctcacacgtggggaatcctgacaacttcctaaacggaatggaacattagcttggattggtgtccactcataacctgcgcctgaatctttgctgtgattgcagcggctgccatcgcagcagcggccggcaaagcgctggcgtttgggttcggcgtggtgctcaaatagttcaaagcgtcgggaggacttatacaacgtccgatgaccaaacactgaccaccgaaattgaaactaaacgaaccaagcaaatgatgtgaggattagcaaaagtcgtcaaataacgaacccattcattccttcgactgattccttcgccgcttgggccgttttgaattcgatgtagccgaaactcctaaacaataaaattgttaagtgccaaccagtggaagtttgtttgngaaaccaacgaacgaaagcgacggatgaaagatatcatttttta

SEQ ID NO: 15361 - DNA, 2172 bp, Heterodera glycines
aaatgcactagcacctgtctccggcaattccactcttcattaatcacttttttccatttctttaatccctgtccaattttctgcgtttcttaacactatttctttccacattgatcagaagttaatcttctgtcagataatctgttgagatgatgttatgacattactcaaaaaaccatcaaaattaatcgtgccttcgtatttcttttcatatattcggcggtctcataaaattgggagtccctctgttaaaccccaagttcatttccgttttgcactctttgaatgattgactcaccggtgacacttttatcgtccgaccgcccatcattttgccgttcatgtgttcctgtgcgagttgagccgcttcaggcacctcatactcgacaaatgcaaagcccttgtgattctgaaaaaacgaaacaaacaatccaagtgttcctccccgagggtcggcccgtcaccccggtggacggatcccggcacatgttgatcagtttgatgggcccgtacggtgcaaacacttggcgcaggtgctcttcgcctatgtcgaagttgattgacccgatgtacaccctggacatgatggacagcgcctgtgtgtagagggagacttttgttgctgaaattgggggacagcattaataacgcacaatcgtcggacaaagagcacaaaatttctgctgattttctgtgtttgtttgtttgtgtgaattgtcccatcacactcccttttagtaatttccttcttaatgggagaaaaggtgaaaaatgaatggttaagcaaatgaaagaatggttcgtctgcagcgggtcagtcttaccatttgcggagtccattctgaagggaggggcaacaaataatgactttgggaaacaaagcattcatttcccatttggacaacggtcggagggataatgccaggtcacaacggtcgaccgactcaattcccaaaacacaatgccaacgaatgcccattcattgtcagttttggtcgggctcatcgtccgatcacacatcacctgctgttggtgtgcctcgcgctgtttcagcatcacatatttcacggattggtccatcgcgtaacgcttcgcccgttccaagtcctccttttcataagtgcgcaatttcctaagcccaagtccgatcagttgtgcttctttctgctgcccaggcccaacaaaaaccttaaattatttgtatgcaaaagaaaattatttatgccactgactcgggcggtttgttgaagcaaaggcatagcgacaaatttggtggttggggctgcggacggagaatcgacggatggcggagtgctcgtcgcataatgggctaaaaatatgtgacaattattggctatttattttaatttgctggtaccattttgttgcggttgctgcttcatcccattctgttgagtcacataactcgcgtaaacatccattttaacaaaatgccgacagacacttattaaaacaaaagttgcttgctgaaattgttgcaaatagcattgcgataatctgtgtcctgcttgtatcccatccgtttttagtaatacatttgggacatgtacatttttttgtcttcaatactttctatgcctcagaaaaaaggaatcgattttcctctccaactgcacaccatttatatgcatgtctatgtttatttgggactggtcaactgagtcacaagatattgaacagagtagggttagacgggaacgggtatttgggcaaaaatcgggtccgggtattgaaaagccgggttcggtacaacattctacaccgggtacccggtaaaaccgggtatagaaaattttcttaatttttcaaaaaaaataaaatttcacgaaaaatttgtactttgtaaatacaagtatttaaataaaagtatacataattttaattcgacagcaaatcaaataatattttttaaacttcatttgacaaagaaatttcagtaattaatagagaccggaaatttcaaatttgcggatcccgctgcgggattggtactgaaaatttttgcgggacgggatcccgcaggtataaattccgcatttaaaatttgcgggatcccgcgcgggattgcgggattttagaaatttcgaaaaaatttagaattaaattttgaaaatctaaaaaactaaatatacctggtcatttaaaaaagaa

SEQ ID NO: 15362 - DNA, 3898 bp, Heterodera glycines
  unsure (1)..(3898): unsure at all n locations
cccaaaagttttttgaaaaagcgctccgaaaaaaggtgatgtgaaaatcaaatctgaatttctattaatattcgatgatntagtccaaaaatgattaattgtttgaaataattgaagaaaatttgtttgaaaattttcattaatttaatttattaaataaaaaaccaaataattttgtattattttacttgatataaattaaaatttgaatttttttttaatttttaaaatttttttgaatttttaaaatttcccggttggtcccggttcccggtttttcttgcggtcccggtcccggtcccgaaaaaaaatcgaggtcccggtcccggtcccgaaaaaaaatcgaggtcccggtcccggtcccggcttctcaggtcccggcaagtcccggtcccggttttggcaaaaattcccggtcccgtggcactctaatattaatcaatcataaataataatattcacatgaaattgtattcccggacttcctttgccatgtcatcataattacatagtccaaatgattggagccggaaattatggcaaaacattaagtctacaatttggcatataaaagtgccaaaaaatcagggaaaaaacacaaattattaatttaattaatttaaatattcatattttatattttgaagtatataaaaaatgaacttctacaattggtacatcaccgtttttctggtgatatttgctttgactggcatttgcaaatttggtaattattaaatataaattttaaatccacgaaaaataaaaaataattttattcacaggcactatcgcttcacctgttcacaatgaagaagatgaaataaaaaatgctcagccacgctttgaaattggtttgagaacaaaaaagaaattaataaaaataacaaaaaaaaaaatccaattttttatttatttaaatttaaaaaaattaagaaaattctcttttctgaaaatttaaattaattttccatttttaattaagtaataaattgcataatcaaaaaaaaaaaatattaggtgaatcatcaagcaaaatgagtggtgaatcgaaagaaaaacaaccggcacagaaaaacccaaaagctgagactggtaaaaaattcactaaaaaaattcattaaatttaaataaattttagaaaacattacactccataaaaataataaaaacttttcaaaacttttctgaaaatacaaagcaaattttttctttttgaacattagattcataaaaataacaaaatttactaaaatttcggatctatgagccctgccgttctgtctgttatcaaacagcagcactcaaattacccttactcgtccggcggagtcgaacccacggcactttcaattccttggtgggctctaaccgactgagctacgggcccaaggagattattattccattcctatatcttggatgctctcattttcaatcattttttggcaatggcaaatacattttgccaaccaaaaaaataacgacacatttttcataaaataaattgaaaattttcagcatcgaccaaattgccactggattatgacttgcatcgtgtggctgcaaaagcggctggcaatgtgtacgcgtggcttccggccgacaaacagcccaaaaagcttgcggacatcaaaccggcggcaccggcggcaccattgccgccagccgattatgacgtggagcgggtggcagcaaaagcggcggaaagcgtttacagttggttgccaaaggagctacagcccgaaatgatgactggtaatgcagcaaatttagaatgcatttctccaattttttggtattaatcgatttccagggggccaaacaattttaatgtccaaattaggagacaaatcctccaatatatttccagaattaaatttttgatcaaattaagagtgaaatgaaccaatcgatttctaggccaaacaatttttgtgccaaattaggagacaaacctctaaaataatttttggggccattcaattttcgtgccaaattatgagacaaatcctccaatctctttataggctaatcagttttttcatcaaactacgagactaatcctccaatctatttcgagacgcatcagttttcctaggcactaagccatttttgcgctcaaaaccaatttttgggcgctagctaacccacttgcctgaaataatttggaaaattccatctaaacaaacggaaatattctaatttaaataaaattttaaaacaatttattatttcagaggatgaacgtgttgaatttacagctgaagttttccaggacatttgaatgtcatcgaatcattttttggtcttcaaatgattcagtttagcgaaggatgacattttattttttattcatttttgtaattgttcaacaattttataagatataaaaaaaggtattttgtttgatattcttttgtgggtcaaattgtacaaaatattttttttgtgctagaaactctctctgattgataagaaaataagtaaaaatgttatttttggacttttgaatgcgagaatatagtcgcaaaaaaagtaaagacctaaaaatccgttccatgaaatatggactaaaaagctcaaaaatagccaaatatggaccaaaataatgactaaaaaataaattttatacctcaaaaacccataaatattcaatatttgcttaagcaaacttagaaaatacactanattaccaaaaattgatttaaatctgaaaattccaaattttttttttatcaaattctagcttcacaatttctaaccaaatacatctcaaaatttttgtaataatctcattctattgtcagcgacaattttaggtaccgataaaatacctaaaaaatctgccaaaattttgaaaaaattctcttttttggggggtgtattttttaaacatttctaaaaagtcgatctttagtcgtgtatttttcgtttttttttttgtatttttcttgtaaaaatttccaaaaaagtgaccaaaatatggattaaaagagcaaaaatggctaaatatggatttattcgcaaaaacccttaaactcaaggctaccctttgtccttatttgtaagatttgtccttattttgagggtccaaatcttacaaattttaaatgtccttatttgtaagatttgtccttatttaagctctttgtccttattttagtcttattttttggattcagagagaaatttagattttaaatgataatttttgaaagaaatgttttttgaaccgaaataatatgcaaaatcttaacaagattcagttaaatattcaaatttttctcttggcgatacacttccatctagagctcggccaggtccaggccatttttcggcaacctggattttcgccgcctcctaaaaattcttattctcttaaaaaattggctcaaaatcataaaattttgtcattttttgaacaaaatcgttaagaaatcgcattaaaaattacaaaaatttttccggcggcgcctattagaggtgcgccgttgaactatattaacctaattgtgataatctttctgattttataacatccataaatatgtaattaattgcatttcttaagttattagcatgaatttttaggtatttcgctgacaaaatttcagccccattctgaaaaattaaaaagtcatttaaaaaataattttaaaaaattgatttactataattcttacactattaatatttgaaaataaacatttaaaatcaactaaatttcagtggtaaaatttgccttaaaatcaagtaaatattattaaaaataaaattcagaataagtggtctcaaatttcaggaccatctttaatcatttaaaatttggcgaattattacaaaaatattatataagtaaagttaattgttaagtgtgtgttttttaatttgtagg

SEQ ID NO: 15363 - DNA, 1431 bp, Heterodera glycines
tttccccatattttaggcatttgccaatgcttcttcccctgctaatttcattgttgtcttttggtttgcttcgtcttctgcttcctccgttgtgccatttgatctgaccaatgaatttactcgggaacaattggcattgaaaaggactgactacagcagccgatgttttctgtttgtccgttgtccaattgcgcgagacaaaagcaaatggacaaaatgggaagaagaagcgattggctggcaattttatgagcaatggaacagaatcgacattgaaattaataagaatgacatcggagatggataaggcgaatgctttttcaaaaatccgattttatttggttttatttttaggcttcttggcgcaatgcccggcccaactgatcagccgcagaagtgaatgaatgatttgctgagaagtgatcggtcaatttgatatggaattggaagttgacaaatgctcatagaaattgttttgttttttgttttgtttgaatgatcagacttggatttgtgactgttgtatatttaggaataaatttttgtgatttcctgaaaccgaaatccatcggtaaaaatcaaagcaaaattgaaaaatggcaggcagattcgtgatcagcaataatagcacaatttaattttaaatattattttgtggtgatcattttcactatttccagatcattgaaaaaatttatttatgaaatcgttgccgaaattgaaaaaaaatattttaaattaaaagcactggataatttgttatttttgacaaaaaaaaatgaaaatttttgttggaattttaaaacttggggttgaaaattcagaattgctacgtacagttaaaatttcagatcgatcggtccatggtaagtggtcaaacttccaaaaaatagggtgtccctattctaatggaacggcgcgcggtcaaaatcccgctgcgtcgaaatcccgccgcgtcgaaatcccgccgcgtcataatcccgccgcgtcgaaatcccgccgcgtcataatcccgccgcgtcgaaatcccgccaaagccaaaatgagtcggaatcccgccaaataaaaattagcgaaaaagtcttaaaattacattcctaaggctccaaaataaattcattaatactttaccagaatcgcataaataaataacaattttcacgaaaaataatgatatttttaaatattgaatgaatcgaaaaaagagaattgtatgatcgaatcttcaaaattttcatagtgcacgaaattccgagctcaattcgctgcgtccacttgtcggtcgatgtttctgctgacttcaaaaattaagtcggaaaagggtcgggcgatcagaaacttataaaattgttaagtttttgagggtttacaagtaaaaaatacaaaaaagatgggttaccttccgagaccaatgttggttggttgaggggg

SEQ ID NO: 15364 - DNA, 1692 bp, Heterodera glycines
aaaaatttaaattaaaaggatcaaccaagaatttttaagggggtccgagggtcggagaaattgtgatcaaaattgtaaatggtatgaatccattgacgatttattgggtgctatgtcgaagcgacaaaaatatgggtgtttgtaataattaaatttaattattattttaattttattttctaagtaattaatcataacttagcttaagcttagtcaaattaataaaattaagtatttagcgacagctcgaagcatcctctactacttatgaaattttcaaaaaattagtaaaaatttacaaaaagttgtgaccaaaaaagtacgaaaaattttgactcaacaattttgaccctagctttcttgaaattcaataaaattttttgaaatttagcagaacagtagagtaatctttaggctatctaattatataaacaaaattaaaattgattgttttagaaaaaagttatgaaagaattaatagggtcatatttttatggtcatccaaaaaatgtaaggacatttaaatgcataaaaattgttcaaacttaaattaattcactccgtgcttgatacgaaaagatagcccaaagattactctattgttctgctaaagaaaattccttaataaaaatgcaataaacccaaaaaatacacccctaagaatcgacctaaaaaaatttcaaaaaatatacccctaataatcgatctaaaaaattttttgaaaaattttctcaaaaattcatccccaaaaattttttttcttgacaaaatttttgatttaaaaagttaaatatttgctaagaaaatattctcatttgcaactgcattcagtaaatatcaaaatttttttcctcaatttttggctgaaaattatatcactatgcccgaaccccgaccccgaacgattttgtcaaccccgaccccgaacttgctgaccacgacaaccccgaaccccgacttttccaaccccgacggtcgggggcccaaccctacttttacataatattttttctgcgcatataggaaaaatgggctcaagaacagcatttcttctacgttaaatgcacatatataaccagggttcgcagatctgaggctttagcctcattttgtggttttttgataggtcaatgaggctaaattttcaaaatgaggctttgaggctttttgtggttttttgagaaattttgagtctttttgaggcttttggggaaaatcctcagaatcttttaaattttgataaattggcataatgtttggcaatttaaagaattttttaaatgaaaatatgctaaaaatatggtcaaaattcttaatttttcccccggcggcgcctatcggcaccgccggaccgtaaaaatccttaatttacaagcaaaaatttgctcaaaatcgcaaaatttggtcatttttcggacaaaatctgttaacaaatcgcattgaaaattacaaaatttttcccggcggcgcctatcggcaccgccggccccccgtgcgctccaaaagttttttgggaaaagcgccgcaaaaaaatcaacttcggtttttcatgcttagaatttcaaaaaatgtttatttcgaaccaaaaattgctcaaattgatcatggacaatcaaaaatataacatttgaacattttaaacgtggttttgaataaatttgtgaaaaagaaggtttttgacccaaaatgagg

SEQ ID NO: 15365 - DNA, 1577 bp, Heterodera glycines
atccatcccattccaactttattcattcgttcatccttccggcccatcacagccaaacgatggcaatgatcaaaattaaattcagcggatgaactccaaacgaagcgaaatcaaaccaagcaaaagcaaaactcactttgcttcaggagaaaatggatgtgctgatatggatgaaagtgatggtggagggagcataaaatgaggagacggagaagagaacgggcgaatggattttggaaggatcggtggcggataattgggtggacgacggacggagaaaggggggggggtgacgaaaggttgtggtgttctttctatctttgtccgtccgtcgccacacttttccctaatggacgacggcgaattttattgggtggaaatcgatggatgggcgataaaaaaagaaaaacggagcaaattatgcaaaaattgtcacattaaaagcatcggttggtccgtttccatcaaaaattgtcgtaattcgcgcaaaataataaaaataatcgacaatgaaacaaatgtttcttttttgttatgccaaaatgaaactgaccatttgatcactctctctcttctcaaagctttccctttcgcttttttccccattttttgcactttcgaatgtctcccatttgctaccgaattgcccattcactccgtcctcttcccctggggctattcccaagggattctatcgctttacgaagccttcggcaccgtaaattttttttttgtctgagtgccctttcgtcaaattttgtgcggtataatgtctaattgcttcgcaaaggaaagagaattgaaaataaaaggaaaggaaagaatttttcaatccccggggcattttttgtttgtccaattggaggagagaaagaaaagagaaactccgaaaaagtgacggccctttctttgcttgctaaatgtcaaataattggttaaaattcaatgctaagccaattttgaaagggaaattggcattaattccgctccaaaattcttccccatttcccatttttgccatttctttcggcattttttgtggaaataggcaattaatctctgcaataattctcagacagcaaagctttacacttccaaagccattgatgagaaaaagaaaagaaaaaaagaacgcaaagggcgaagaaagggtcaaaaaggggtgggggggggagcggaggaaaagcggccttggggaaatgaaaggaaagggaagggaaagggcggaggcgttttttgggagttgtgcaaatgggtaaaatatggcgaggctttggtgggaaattggggaagttaagcattcatcgaatcacacattcttttgagtaattagcagctaaagtgaaaaaatggttgagagaaaatggcacggccaaaaacaacgcaaaaaaaaaaatcacgaaaatgcaaaaataaaaaataaacatttctgcgcatcggcattttgttttgtctaccgttttgacgaaaaaggcaaatagcgtaacaaagacaaagaggttgggaggagagggaaaatcaatttgtgcccggaagggaaaaggagagaatttgtgacggcggcggcggaaggattt

SEQ ID NO: 15366 - DNA, 1883 bp, Heterodera glycines
atttcattggatattctccacttctctcaatttgtcgatgaatttgattaggtaaatgaaagaaactccaaagcaaaaagtgtgtttcgatcaaaacagtgataattaacaacaaataagcaacgattgaatcgattgccatttaaagcggagaaactccaaagctattggagaaaagacgagcaaatcattaattacgtacaaaaaaaaatccatgaaaatatgaaaccggcggaaattttataaaagaaaaaatacgatcctcagccaattttttatgattttctgatgaattaattccctgctaattgatgcaccgcaagctattgttttttaaaatacctattttattaataaatttatttgatatgtattgtaagttgaacgattccttaaaatcacttcaaataaatgtttaattttttgttaggatacaaaaaccgaaaaaaaagattgaattatttataatttaaaatcaaagtataccatggtcaatgataaagtactgtgtaattagcttaattaagaaaacttttataagaacagaaaaaacatgtcccgacatttgcgcctatgccctccctaatcggtttcaaaatttaagttttacaattttaaagtttgaaaaaaacttcaaaataaaaggcaacggtaacacaaattcaagcacaaaggaagtgagggaatgttataaaagtgaacgcctcgcctcggccatttccatccgtcggttttctttgggactttgctggacaaacgcttcacatcagtggacggacggacgacaagcggggggagggggactaatatttgttgtgttgacgagtccatcaaaaagaggaggggagagggaaccacccacccaccttttccgtccgattggctgactcggacggatttgtcgtttcgggggactcaacggaaaggtttaaaaattgagccatcggcggcggatgactgcttctggacaagacaaatgaaaaagaatggacaaatgaatgggagccaaagaaattcaataaaatggcgggacaaagcgcggaaggaaaggcaaacgatcaattttttggcaaatgaaatacagaaaaattagaaatcattgtttgttgggtaagtgattgttaagtgccaatgacgagggccagggatggcattccgaagcccaaaaatttttcggaattccgtgccatccctggcgtgggcaattgctggcaaagcaatgtctctgctgctcaattttctcgcagatccaatctccgcagaacaaccaaagcacaacaaattcagaacgaagtacccatttggaagaccgagcggaaaaagttcccagaggacaaatggagcataaacggacgaatcgaggggggaagggaaaggatgaccttttaatagacgaatgaatggacaaacgaaagactgagtagaggggggggggggggggaaggtccaagagatacaacccaagtgcacaagcagacaaaggagtagagagcatggatattctaaacggaaacaacagctaacaaataagtcgaaccgattgatgaaggcgtaaacactctgtacccagtcaatcaaatccggttctcgacgagtcgagatattttaagggaggaaaaagaaagagcatcaatgacaaaccattgaaaaacgggggaaaagcatttaaaaccacttagagagagagagtggcgtatgtttaaaattgtattttgaacaatacgataaataaataaacgccattatttggcaaataacttcacaaaaaatcatccaatgtggcaaaagtcgatctcaaaatcagttctccttagcacaaagcgcaatcgcactgcacgaaatttccccgcaagtgatccatcagttcctggcaaattttccag

SEQ ID NO: 15367 - DNA, 998 bp, Heterodera glycines
aaggagaagactcaaccccaaacacctcgtttgacaggtgctaggtctggatcaatcaatagaagtttctactcaggctcaaaaaacgaccggtcgagtggcagaaggacgcacgaacacaaaaataattacagaagtggttacggtagtcggagtcgaacgaatgagggatactacgaatcgcctttgaagggaccgagaaacgaggcaaagaagcagaaaatagaagaaaaaccagacaatgttatgtattttcgtcgttagttaatttatatggaaaattttacattttttatatttaaagaaaagtcttgaaacagccgattctttttcatttattggattagatacgatttttgaatttaacagtaatttaaatgggtaataagcggaaccatttaatgaaatgactttcaatcaaacaaaaaaatttcccgacgggtgcagacgaatgtctttccttatttaaaatttgaataaaaatttagtttcattgcatatgtatgacaaactttttaagtttccttgaatttatggcattttaccatttagtcctcgtaaaaagcgagttttttcaatgggagacaaatgagggtaataatccttcggaattggtgcccgacggaaaaaagagataaaaaactgataaaataagctaaataacaaaaagcaaataattgttcatatttttgtttgttttgcagacaaaaatctgccttttaggcagagttgtattgaattttccaagtttttcagaagaaatcaaggcctatgagacaaatcaactcaaacatgtgacccattgaattaaactggaagcaattaacactaaaataacttatagacatcccttaagcattttctattcactttatgtaaaaaaaaaaaattcattaaacacaaaatttttgtgggcgaaaaaatgtgaaaatctgggtaaattcgtaaaaaaatttctagggggttggtgaaaattttctgtggaggatgaatatgat

SEQ ID NO: 15368 - DNA, 2537 bp, Heterodera glycines
  unsure (1)..(2537): unsure at all n locations
tgacagcacatcacaaagtggtgtccagtttgccaaagttgaaatatttggacatttctgacacaaatcttacgacttggccttccgaaaatgatcgtccatttggcgggtaaaatataacaatacgtttaagctgtaacccgaaaagctggaatccatgactttttttactctttcctaaaaaaattcttggtttaattttcaaaattttataagcactgggcgaaaataagttttttttattttgcgctttatttagtgccggaacgattgacagtgacattccgggactgagttatctgaagaaaccgctcaaatatttgggcattttcaactgtgaatcgagctcgcaatacaaaaacatcccggcggaaaaggtgccaatgggaaagggtttttgctatttcctggactttttcaagataagtggcgaccatggggaggaccaagtgctgacagcgatggaaatgtacttggaaagacccaaaacaatgcaagcggtgctcaacgaaagttaccatttgtaccgttttggcaccaatttggtcattatatacctccatctttgacattctttcagttatgtttttacagagtcgacaagttgaagcgcttcatctcgtgctaaagtcgatgtccttgcacctcaacaacagcaacctccaaattgccggcagtgcttcgatgttttacataattcgttcgtttgcttttttcatccttttaaattctgccaacctcttgtttaggctctgtcaaaatgaattggtccacacgacggagagtgatttttgcgctaattgatggtccgatttattcttttgtattccaaaccaattttcagtttttaggcatggagaatcacctggacgagcaggtgatggtgcgaaactgttgcctctgtttgtgtcaggtattttgctgcctcgatttcatttcttatattccttaaaataccctcccgttcagttcgacatccctcaagacattatgttcggttatggacatgtcgccaaccttctcgtcaaagtgctcgaaactcacagttcggatccactcacccaaaggattgtcgtatttttactgaattcaatggcttgtcatgtggaaggcgtgcaaaagatcgaagtgggcgagttcggagcaattgaggtgcgaatcccccccccccccccgcctcctgatttagcgttttgcagataattctacaacaaattgcacgcaaacttcagtccaaccaatgcgacgatgttatggacacggcttggagttttctttggaatattacaggtcaacttttagtgtactatacaaattttggtagcagctcgtttccgcaccgtatcagctcccccccccctggcttaaagctttttcgaaaatttattttctttgaatttccttgtaagaagactttgtaagattttttcttgaaaattttttaagttagtaaaaaaaattctattttctctggggtggggaaacgatgcggggtaggaacctagtgcaccccacaaattttcacaaattttgttaaaagcttcagtttagatgagacccccgcaaattgctcccgatttctgaaagccgaggggctcactctgttctacagatgttatgtcaaatttcccagtcaaatggaattggtacggaatatgatgggacttatcggaaacattgcggaagtgttcgatttgcgtgatcagttgatgattgacgactatttgaatatattttggtaattgactatctgtgcctaatgaaaaactcactgaaccccttttcagcacactgcttgacaatttgagtgacggaatcgaaatttcgtataatagcgccggcgttttggcacatttggttagtgatggcgatgagagatggaagacaacgaaggtgaaaaactcgcgacgccacgtcagcgatttgattgtgcgggtgcgtgttggccggcagcgaaccattcattaatttatagtttagtattttttctttaattcttttgatttaaggctaccgagctgtgggatttgaatgctcgtcgcttcatcaactaccgctcctttaaaccaattctcggtcttttgtcccaatggctcgcgattggctctcaacaatgggccatttgggcattggcaaatttgactaccactgaccgtgccaaatattgccgttttgtggtggaggagggtggcgtagaattggtggaacaattggtcaacagttcgaactctacaaatgcaatccgaaatttggcacagactgtgctcaacaacatcgaagaatggtgagtttggatcattaaacaaatgataactaagaggaaccgagcattttttattatttttacgtcaatggaaatattttttggtcctaattaaggaaaagaagcgacatcgaggacaatttagacaagcaagaaacgacagctgaaaatacgaacgacccttcttgacttagctgctgatttcccttaaccaaacaactaatatatttgtcatattcttttcttaccaccganaatttggtccttcatggat

SEQ ID NO: 15369 - DNA, 4463 bp, Heterodera glycines
  unsure (1)..(4463): unsure at all n locations
gggtccactgcgtttgggcgctcacatttgggcgctcacgtttgggcgccagcatgtttttccactataacttttttcattggcatccaaatctaacattgttgatatgttcgaaattttaatttatttagaagctttttctaagatattgcttcgcgattcgacaattgctaaaaaaattatacataaaaattgcgaaaagtcgagctttttgaagttttttcttaataaaattttttcttggcttgaaaatctattcgctttttgtaaggctaatagagcatgtgaagggctaatagagcatgtgaagggctttcgaatgataccaagattgttggatttggattccaaagaaaaaaagctatagtggaaaaacatgctggcgcccaaacgtgagcgcccaaacgagtgggtcccggcggtgccgataagcgtcgccggtgaaagccatacaattggagtgcagttgattaatagattttgtgaaaatggaaacatccatgaaagtggataatggacattgccctttaaaatggttaccaacattgttgtacaatctgtattttactctaatcctgaagatacatgaatattccgattattaatcgcttacttggaaattttgcgaaaaaatctaaatatattactctattaaattctgctggttcacaaaacgacagtagtactgccggtagcgcctattgccgcaaccgtgaactctttgaaaagttgagttcaatttgttaacagattatgctgagaatggtcaatttttatgggtgtttttgtctattaatcagaaaaaataaattcaaaagaaaacgtcaaccggtatcgaacctataacaaaaaatgatgttgtgttgaaacactaaccattaatccacaaatatatttaaaaaataaaacaaatttctttattcataaaaattttcaaagatggttaaaaaatttttccttttatcaacgaatatgccattcttaagggtatatttggggcgggggcgggggtaaggccaaaaaacctgtcccgtccccggggacgggggcggggtccgaaccctattttaaatatttgcaaatgttgttattgcatttttataatttatttacttatttattcaatgaattttgtgaggagaagaggaaatgaatgggtgaatcaattgggcactgttgctgccattctctcttctgcctcttcttcggttgaccacgggcagaaaaaccaaatgaatcaattgggtgggcgtctcatcgggtcggcgtcagtttggcgcggccactggcgccggtttttggtgccgcttttttggagcggccgttttagcgcccgtaatggttttttggcgccagtgtttaaaaatcaccaaaattttaatttgcctttcattttggataattatatgtcattttctttacaataactcaaactcgaatatttagaaattttttttgaaaatttttagggatgggaaaatatttaaaaaaattttttgcttatatatatggttgtgaattatatggactaaaaaacactaaatgtggacataaaatttggactaaaaactcaaaatatggtacaaaacatggacaaaaactgccaaaatatacgttataaaccctcaaaattcacaaaaatgtttaaaattcttgtcaagaaaataaataaataattttggagatgaatttttcatttgttaggaatgtattatgaaaatcttgtgaaaacttcataaaattaaaagtaaaaaattaaaagacattaaatctttttgcataaagacaaatttttataatttttaaaaaaatttcatataatttaaattcttccttttaagttcaatttaataagcaccacttctttcaattcaacatccattacttggagtttttgctccaccttcattccatgactacgcgcgaaaagcatttcgtgaaaaaatattaaaaatttcgaaaccaataaaattcaatggtaaagtaaattttttagaacctaaagaaatgtgtctaaaatgcttcatctattaaattaaattataactcaatttatctttcaaatgaaaaagattacgatgtattttgttaaaaataattaagagttgtaactaagaaaaacctaaaatattttaaaataaatgaagaaataattcgctagatggctaattattatttataattttgtttattaaatttaatttaaaacaattaatgtcattgataatttctagacaatattaattgttttcgtccgaattaataaagattttttgtgttttatcagttggtattattccacggcaagttttaccgtgagctttttggttttgttccgctggtggccaaaatagattaagttttccataaaagaaataaggaaaaaatttggattaataattaatgtagaaataaatagcaaaaaatttaagcgctgatattaaaaaaaaattatagcaaattaaataaaagaaaataaattcaaaaaattaacaanagaaaaaaaagtttaaaaacaaacgaagaattaataaactagagatttggattttgtagctaccgggcttaatttattttaaaagtgaataaaataaactctctggaaaattttaaacaataaattgttgcttgcttattcctttaaaatataacttttgaatcggaagaaaaaacaatctaaaagtcaggagttgtaattattgaatgttattgttattatctttgatttttagtggggaattgaactgtttatgaattttttaaaaatcagttgaacaaataattctatattttcatataccatttggaagagaaattttgattttttaataagccatgtttcagattttttattttgtgcttattaaattgttgctttttaaatgaacttccaaaaatgcaaatttcggaataaattctgaaaacgctattttctcatgaacctttctgggatcaattcaaaaacattgtccaataaaaattgagaggtttgctaaaattaatttaccctaaattattcttttatcttagcagagtggaagattattgtcaaaagcaaatcaaagatattaaattagactatttctaaaagaatagagaaatataaataaaacaaaacactgataagaaaacatatcaaaaattttaatttttctaaacctaaaaatccaaaaattcgatattaaataataaatgaattgtgattatgatttaatagtatattcaaatgaataaataaatgaaaagaataaaatttcctagaaatatttccatttaataagaaataaaataaatcaaataatattgcattttcttctcaaaaaaaaaaacatttagtcgggtcagggtgggaaacagtaaacatcaaattaatgaagattgatacttgaaagattataacaattcgtgtttaaaaaataatttagttactaattaataaacagaaaatgaattttaaatattttaagatatataaaaaggacaaattaaaaatataatacaagaagaacaaacacttaataattgtagtttactgaaatattagagtatgattttttaagggaaatagaaaatcaaatcattgaaaaacggacctgaatccctaacattattttttgacgggattacctaccgattcaagattttttttcaaaaaattaataatttatgtaaatgagaaggtatagattatccaaaaatattttttatgtgaaaaagttatatttatttgtaaaagataataaagaagagtaaaataaaaattaagataaaacgaattcgaaattctaacaaaagcaatattaattcgctgatgtggaaactaaaataaataagaaaggaataatcaattctatgctaatcaagtggaatttaaagaataggtaagcaagataaatactagtgctgtccgggaccaaaaatttcccggccgataggcgccgccggggaaatttttgaaaataattaatgtataatatctaacttttatgacatgaatagagaagctattctattggtatttttggtaaaagctgaattattatatttgtcaaatctaaaaaatattttgaatttaaaaataaatgttagcaaaataaaaattctaagatattctgaattactaattgcacattttcatagatccagtaaaacaaatataattaattgcaaaaataaatgattatttgaaaatgaaattaatgaaaaagtaaagttttacatttttaatttaacataatttggtgttgcttgaagaataacgcacaaacaacgggattgagggcaaataaaaaggttaaaaattaaataattctaaatctcagttgacatagctttaaccttaaatagataggttcatctaagaaatgaaaatgaagaagaataccaacaaaacagactaagatcatttgaaattggacctacgcgcggactttttgactgtccaaaataaaaaaaattggaga

SEQ ID NO: 15370 - DNA, 2733 bp, Heterodera glycines
acttggccaataatagaccaaacaaaaccattttgtgctcattttgaagggaaaattctgaagaatatttcttaattagtcaaaagtttaaaaaattgtttattggcaaaaaaatgaaccatgtgttattttatatgttagagacatggaaatagtgcgtcaaaatgagagaaaaagaaaaaactttgccctgggaaaaaattttttcctgtgggtaacttttcttgaaattttgcctaggcccatattttggccccctctagcgattcaaagtttattttgtgaaagttaagtttttaactcgagatcggctcttctatttttacaagggaaaatccccaataaattttaagttttgcaaagttttggcgttctgattactaaataaataataaacttatttgtacttggagcccaaaattgaatcgccgtgtatagaaaaatgagataatttagcagtatcaatatcaaaaatgcaatttgacaaccattccatctttcaattgtcatttccctggtctcttttccccttcatcagcgtccgtcccccacataattcgggtgcaccaacagaattgggtccgctgctgtcgtcgtactgctcgcccccgtcccttgtccgtcttccccactctgtccctcgtccccttcctccgcttctctgtcgcctcgctcggtcatcggcggccgttcaatgcgcaccaacactttgtcacgaatcaatcgcgggatcagtcgggcgaacattgttttctgtctcgttaggtcctgctccgagttgatctccggctccatcatctccaaataccttttgttggacacaatttaattaggagattgtccgacgatccttcgccttaccattcggccaattgcgactgtcgtgtgcccggccattccggctcgtccccgttgcgctcctcctcctcccgcatatgtaccaccagcatattcgcaatgcgcatgtactggtcatgtgacaattttagtccctcgctgccgccgtcaacggaaagggcacagacagagggagcgccggctgattttgctgtgtcgctcgcagtccgtcgttgtcgtccaagctgttcagtttcagtgtctttttcgcccataaattgggtggtgtctatgtccatttggtgttgttcttcgtcctgctgcgtttggttggtaatgtccgccatcggttggggcgcaacattaaaatcagcctgaattttggggtttatgcgcttgcacaaccaattttaaaatggcacatcgtcctcctcgtccaagctgatctgcggcgcactgatcggcacaatcgttttggagagcaattcgtacgcctttttcacgtgctcttcggtcacctcaaataaatgtttatttttaattgcttaaatgctcttttgccccactctccgcacctccgcttcgcattttagacgagcgtacgcctcggaaagacggaccagcgactcgagttgtcgcactgtcacgcgcgtgccgttgccgtcgtcgttgatgcgcaagcgcaaatacgcacttttcaatgctcgttcagcttcagcggaaagctgaaagacgcgacaaaaataacaaaatcaaagcactgttccggaataagccaaatttatcattgtcctattcccacgtgtggtctgaagcatcttgcgaacattatgtatttgcgaatttcgtccgttgtgtacaccgctttcttcgaccgttcatggtgcagtgcccgacgatggttttccaaaatacgacaagcaatgttataatcgaccacctaaagccatcggccaaaaattacttgaaaatttcaaaatgaccgaccggattatcgttggtgtccagcaggacaaagaacaggtcgaagcgggacatgatcggtgcggacagagcaatgttgttgcgcaacggctgcgaccggtcatatttgccaccgatgggattggccgccgcgaggatggagcaacgcgcattcagagtcgccttaatgcccgccttggtgatggagatggtctgctgctccatcgcctcgtgaatggccacttggtcttttgtctccattttgtcgaattcgtcgatgcaacaaacgccctgacaaattggcaattatgaaattaaataatggcttttctaaacaaatttgtcacattgtccgccagcatcaaagcgccagcctcaataacaaagtcgaaagactcctcgtcttttaccacagccgcggtgagtccggcggcactcgacgcttttccgcttgtgtaaatcacattcggagagaaactctcgattgttctgaaaagtgaaaaatgtaaattacgacgggaacggaaatggaatgccgttagaataaataattggtggaaacccaacttcaaaaattggctctttccgcaggacgggtcgcccaccaagcacacgttaatatccccgcgaagtgtcgtccccgccgtttttttggccacgcctccgaacagcatcagtaaaatgcccaatttcacttgctcactgccgaaaatgttcgggaaaaggccgtccaggatgtgctgctcaatgcgcatatcttcgctcatatccttcaatttctcttggacgtcaggcgacagcgaattccaaaggtcggtggggctgacttcctcgtgggtaaaatcgatgccggtgaacttggcaaagcaaggaaaagcataaaattaaaaatagaatttaattactgccggattcgacggctgaatgctgcag

SEQ ID NO: 15371 - DNA, 1082 bp, Heterodera glycines
agaagggttacgacgggtgcagtaagtaaacggacgacgggggaggggagaatgagaagcgggacaatgttttctatgtatgaattgtgcggaagattggccatcccattcattcattcccaattcgggatttggtgggagcggagtggcaggaaggaaaagaggaaaagggtggaggacggagaggggggggggggggtcccaaaggatggaatggtggaagggaaggcaccgcataataaatcatccccgccccctcccgtggcatggccaatcgaattcacaaaactatgccaaaaaaggagtcatccctttttcagtacaatgcgaacaatagaaaaagcacacttacacagccctatcggtctgcagcatccgacccaacgttcttcaaacatccaacaacaaaaggcgtggagaaataataatgacgtattaataattattatggcaaattggaggggaagggaccaaagggcgcctcagtgccgagccaaaaatggaataaaacaaaacaataccttcaacagtggacaagcagcgaacaataaaataattattatgttaattgagttgtgaaatgaatgaataaatgggcgttaatgatatgtgaaaaggtgcatttgatggacgacatgcgaaatgttcgggatttgaaggagagacaaatggccaatttaaaggagaaagacgaacaaacgaacgagccaacatgctctttaacagatcaatcagcttcagcccaggactctctctttttttttactttcctttgcaaatataaaagtgaaataaaaattaaggcgctaaataattttatttatttttgttgaaaaaacaaaatatttgtcctaaaataatgcaaaaatatatttgttgcttgagttggtttgttttttctttcgcccttcccttttcttctcccgcgtttttctcccagcgtttctaatatccaaacactcatttttctacacatttatttttgacacccaacaaaagtagaaaattggggggggggggaattgacagactgtgcccaaagggatggatggacagaggaatttgagggggggggggggggg

SEQ ID NO: 15372 - DNA, 2827 bp, Heterodera glycines
tctgaaaaaatttgtgcattttttgacggccaaaacaaacgaataaacgacgatttgtcagttacatataattcataattattcactattttaactttttagaaccgaataacttttactcattttcactttcatattccctttttcgttattttccaatggaaaactgctcgaaattgttttccaaaattagccaattccattttccactcacattctcatccgtttgttttgccattgccattagtttctcatgtggcccccctggcagtataatagtcgtaaatcataaatgatgaatgagacataacaaaataagagggtttggagggacaaaagataatataatggaagtaaagttggcaaagcaaagggaaaaggagagataataaataattatgaaaatgggaggaaaagatgaaaagagagagagaaaaggggaaaatatagaggaaaaagggagggacacgagtgaaagaaagggaatgagagagttgaaggagaaaagtgaaaagggaggaaagacgaaggaaaggggaatgggttgaggaaggaaaagtgaaaagcaacgactaacctccttcaccaccaccacctcgccccctccccaactcccaattcattttttagtgatattgatccgtaaacaaatgcacccaccgccaggtgtgaggacggaatccgtagcaattgcagatggccatccgtgaacaaggctggcccacctgaacggaacattcattccactcattgtgctgctgggtttgtcactccttttgtggtgtttccttccccttttcttcttccacctcaatgtcaatgacatgtgccatttgtctgccacgtgcaatgtcaccggcgcttgacaacaaggaacgttccgcgatgccagccccggtgctgctgtttgaacgccagcgattcttttccgtagaattgccaccaaaaacgatctgaaaaggaaagggaaatgaattgggggacatgggaaaaaaggaagaaaagcgaatggaaacccaacaaacattcattaagattagttgaatctctgtaaaacctgttgaaatctgcgacgccaaatcataaaatttgttagtgaaggtcagaaaaattcattcaaatccaaaatcgcatttaaaactaagggccattttagtcaatttatgtattaatgttgggcccgaaaatgaatttttttttatgtgtgaatggccattgaagccgcaattttcgctaaattagtctcctctgttgcgccaaattggcagtcaacagcacattttatgcttattggaattttaaattggatggaaaagagcggaattttctacttaaaatagacactttcaattttggaaaattaatatttgagagtccatttgaactatgagaaaaaatgaagaactattatattatgaattgagattaaaggaagaaatgtggacttatggagtgaaaaaggaagaacagcggcagaagagagagagagaaagggagggggagaaaaagagggagagagagaaagagagaaagagagagagagagagaaagagagagagagagaaagggagggggagaaaaagagggagagagagaaagggagtggggagagagagaaagggagagagagagagagaaagggagtgggggggggagggggaaaagccgagaagcaaaggaaaagccgaaggggcaaagagccaatttcacccccattccaccttctgcatccgctccaaatcccaaacatttcttctaacacacacacattttggcattgccattcatttcggcgaagggaaagctaaggaaacagtgaaaaaaagaacggacaaagagaaacggaatgaatgatgagatgaagaagaagccgatgatggaaaagacagccatgccaatttgggagtttaaaaattggaacactcaccaaacaatgccaagggtgagaagaaacgaggcttaagcccccccccaaacaaaatgacaaaaattgacagaaactaaccaaaagcccattcctcaaaaagcagaggaagaacgaactgacaaagaaatgagtcccaaggactgaataaatgagaggactaacagacggaaggaaccgtcccttcccttcccccgccgtcccctggcaattccatgcttcgcaccgccactgccctcccttcctcaacggcctctgccccaaattcaattcgctcatttcttatgtccatatgacttttccattgaattggctctgttccaccaatgaatggctttgatgtttggaaaagcgtaaggcttaaaatgcgcttcaaaattatcggcaaaagtcagtcgattcgacccgacaaaataaaataaacatcgattgaaagtgtgtggtaatggcaaatgaatggtccccccactcgtcggttggcttttgcccaccttcgctggctgttgcccttcttcaattgccgtgttccttcgagcgttctgttgtcgtttttgcttctcatcgataaaccatccgtttcgaagttcgccctcaaatgtttttcttccaaattggtcgttgtttctgctgctgtttgttttctctttcgaattcggcttttctgtaattataaaaatagtttcatttctaaacgctttttaaccgttttgaaacaaattttgtgttcctttgaccgcggaagaaggacgccgaacaaccaatggcggttgtttgagcacggctgacggtcgaacaacttttgatcggcaatactcaacgagggcaccctcctcaaattcggcatcgtcttcgtccgcattgtaatgacatgggagaaagtgacggatcaggaacatcatcaca

SEQ ID NO: 15373 - DNA, 2260 bp, Heterodera glycines
  unsure (1)..(2260): unsure at all n locations
aattttgcagactaatagagggcacttaaggctatcgaaagataccaagattgttgaattttgttgataatgaaaaaaattatagttcaaaaactcggcccacgcgaaaatgaccccaaattgagcacacagaataataactatattaatatttaaaagaataatgggtaatgaacattttccattagtgaatgattggaattaggccctaataaggcaaaaattaaaaagttcatttagtgtacttttgtgaaactgccagttgtacaaccataacataccgtctttacgttcatttggtcagcaaaatcgtatttagctgcacaaatgttgcttgctccttggcgcttcttttcatgctgcgtgccattgacagcgcggcaaaattagttgaattttttaaaactttaatttaaaaaataggtctgtattttttttttttagaaaaatcgtgtcatcattttcactgtaattgtcgaactgatttttggagtgtttccatgcttcgtttcaattttgtacaatcaggtaaatcacattttttattaaaagttaaatcaaaatggacaattaacagaaaaattcttaaaaattttattttaataaatattaattttttaaatgtttttttacaaattattcaaagtgaacgtcgtcagttgctttaggtattaaatttgccaattggagccccaaactctggtctgaaaggtgaaattgcgatcacctgttgtgcattcgatggcgcaatgtgtggcatactgtatatgtccgttttactcaagcgtagccatggttcatctaccgttgctaatgccgttactactgtaccaggagcatccaaaaacttgcagaaagcccatgagaatttgccaaaaatctcatgaaaaatttcatatgccagccacacgaacaaatgaaatactctttggttttgttttttttaatatttttataaaatctgacacagctggcaaaaaaatttacgaaaaaccccaaaaaactcaactattaagcatcttantatcttgttcttattctcgcaaacaactatatttcgtgaggcctaataattcaaatttntaaagacattttcccataaaaacgatgaaaaagtaatacccaggaaatcagggttttgatgccttgacctggaaactaggatttcctggacaaaaacccacgaaaatccaggtcccggaaaaactgaactctacccgtgacaaaagaggcggctttcgttcaactttgcagtagtgacggcatgagaaaattatccaaattttaatttcctaattttgcaaaagtcaaatttggacaatcatctttattgaaataagcaactcaaaatgaagatctttggcttttttaaaatattgtgctgtttttgcatggcatttttattccaataacaaaacaaaatgccaaaacccaatgaaaaatacatatttcaaaataataaattctcatcactctacaaaaatcataaaaaaattttcatcaatgagacaatgaagaactctgctgatcgggactgatcattcgatgtccgtgcttctgctgctttgagctccgcccccttctcgtcccgccccctcctctgttggcattggcattattcgttgttggtcatcgtcgtcgttgttgtccatcccaccattttggctactttcttcgtcattagttttgctatgcccaccgtccctctccggtatggctgtacggtaccgcgccagcacattcatatggtacttttcaggtggctcctcagcgcgttggtcggtttccctggcgcatcggcccatcgccggtaggcacagtgccgacattcgatcacatccgggccgaactgataaaactgcttgtagtcaattctctaaacggacaaatatttaagtcgaacggtttttaaaaaaatcaaaattataaagaccttaacggtgcaaaaacaaatatcacttttcaataatttcagccactaattaagccgtatttggttcgaaataaataaattctttctttttaaagataacgcaatttttccccgttcttcgtacgcgtacgatctcattcagagtggtcatttctttcgttcatttttcgttcctgaatttggcattcttggcagcccagacaaaaaatgtgataaacgcttttcgaccggtaacgtttttgcatactggtagagaaaacaaaaaaaaagcatttttctattttttgaattataaattgcaacaataatttttctaaatttttgcat

SEQ ID NO: 15374 - DNA, 1517 bp, Heterodera glycines
tcgtcgtcacccattccccccattttggtcactttctttgtcctccgttttgctgtgcccaccgtctctctccaggatggctatacggtatcgcttcagcaccttcatatggtactggtacttcttcaaatgacttcctcagcgcgttggtcggtttccccggcgaattggtccatcgccggtaggcacaatgccgacattcgatcacatccgggccgagccgataaaactgcgcgtagtcaattctctgaacatcccaaactttattacggtattggaaataagtgccaattttgctaaaaatagccacaattattttaaatacagtattttgacattataatttaattttttttttctttcgattttggccctctctgcataaattttgccaaaaaacaaaataaatacccgtgttttgtgcgcatatgacttcaccagagtggccatccgtcgttcgttttttgtccctgttttgcattcttggcagcccgacagaaaagtgataatgctttcgaccgtaatgttggcgtactgtaaggaaaaaaaaattttttttgaatttatttaagaaatcatttccctattttgcatttatttatttgtttgttcatttttcacttcttttttcactgcattgaacattgagatgcttcgtctgtggcctgtgagcaaatggtatttgtgcaggacattgaacaaatgagcgacgctgagaatgagtcgtccggtgccattttcggcaagataattcccggccatttcttaaaaaatgctcgggttaggctcaaatcgttcttaatttgtggtttttagtaaattccgccaattggacattttcaaatcaaaaattcgttatcactttttttcctaaaaatagtaaaatttaaatattcttggaggatttatgatggatacatcggcaccgtctaaatttatcggggaccaggggatggaactacgtctggacaatccgtcatggaaagacaatcagtcagtgaatttgtgggttttttcaacactttttctgaccattgtccgtaaaaataaaataatttataaaaggcacaaaactaatataattcaaaatcgatgaaaataaaatttaaaaaagcgtaaaaattgttaataaattatgaatgtttagttggccgaagatactcacagaatgaatggccaagagccgaagcatttaaacagtgtattgaaaaagtaccgtatttcccgagtgaatggacccagcggaggtgagtatttagatggcaaactttatcaaattataaaaaatgttttgggactttaccaatggtataggtagttgactttgttcaaaaaagtttcaggaataggggagggggccggcggtgccgatagacgccgccggggaaatttttcaattttgctctgtttcttagcaaattttgcccaaaaaatgaccaaatttctctatgaaaacaatatttatttcataaatattcaattttacccagtgaaaagagtcacggaaaaaccgtgaa

SEQ ID NO: 15375 - DNA, 3858 bp, Heterodera glycines
ttaaatttaattaatgggaataaatatttaaaaattaattcttaaattatttttttgtgtttcatagaaaattttttaattattatataatttaacaattttgaatataatattgcttactggatctgcaataaaaaataatgcaacaaattgcaatgtgccaaagatggtggccaacaaaaggaacatttttggcactctctccagcaattctggttgtgtaaaataactgcaaaaataaatttatttaaaatttcattttaatttaaataaccctgtagaatcaatgtttaggttgtcagggttaatgtatttggtctgaattggtgacattatgaaggcaccactgccaaaaccagcagtaataaggccgctgacgaggccaacacgatgaggtagccacttaaaaaacaaaatgaataaatcaaattaatgttttataaaattatttttttcattaattttttattaaataaattgcacaaaatttaaattaaattaaattatgtacggtcttattactcaaaaaattaataactattcatctaattatgcagccaatattaaaaaagatatttcaataatattccattttttcaaatttttacattttgaataaataaaaaattttgatattattaaataacaccttaattatacatttaaaaattagaattaagtgcctcaatttattacaaaaaattgttatgtaaccaaaacattattacaaaaataatgacttaatttaagttgaacgtataaaaatgaaaaaataaattcaaaatgaaatccactttctggcattgtgtcaacacacaattgtatgcaacgccatggccaaaagcagcaaaaaatcccagtgtaatgaactgaatgaatgataaagcattagctattagaaatataaattaggaattaattaccaatgaaaaatatgatttttgtatggccaagtaagaaagtgccactcccaaagtgtacagaaatgagccaaatgctgctccccatcgtgcgccaatcactttctcaagataaccaccgacaagaaaagcgaaaggaaatccagctaaatatttaacatttatttaattttaagtttataaaagttttttaataaaatttgtcataaatattaaagaaaattttatgaaattttctagcggcgcttataattttatttccgattgcatttggatttctcaaattttgtacattcttagaaattaatgcctgtcaattcaaaccatattaagaccaaaaaacttgaaggcaaaattaccggtaagtaaaatttttaaataaaattattttccgatataatatttaaatcaaattttttgtaaaattttaccgagcaaactttgaaaccatattaatgtgccatcatttaactcaggatcgactttccagcgtaaatatgatgccaaatatgggagcaaattccctataaatcaatttaaaaatttatttaatttcaaattatataatttaaatgaattaccgaatgtgtacacgagtccgtaagtgaattgcagaataattcctgcaattataacaacatatgcacgtgaatttggtgaaatatgtttcagaataggatcatcggtgtccatttcaattatttaaaaacataaaaaattatattatttaaatttgggataaaagggtgctaggtcgatccacaaaaaagctcagtgtgggcgttccacaaaaagctcagtgtgggcgttccacaaaaaaagctcagtgtgggcgttccacaaaaagctcagtgtgggcgttccacaaaaaatgctcagtgtgggcgttccacaaaaagctcagtgattgataaaataaaataataaatttaaaataataaatttaattattgtattggtaacatccacgttgaaatcaataaccatcaatacatataattttgggctaccactgaaaatgtaaaattaatacaataaatttttatatgtttaataaaattataatttagaaaatgaataagacttttatttttatttttttgttatttcgatttgagtattcgacctctaccaattccggttttgaagaatttataaaaaatcacaaagctatagaacttgtcaaaagctatcgaaattaaaacattaaaaaaactccatgaacaaatgcaactaaaaggtattgacttaagtttttgtaccttaagacgctacgtgtcaagactaactattgtttctgcgcatacaaataaaaatgatgcttcaaactcgaatgcttcaagccatgaaatgccaaaacatgaacttagatttgaaaagtgcttttcaaaaactttaagaaaaaatgtttttataattggaaatgaatctgcttggagaaaatatgttcaaacaaatgagaataatgaagacatatatatttcttgttcaaaatgtcgttattttcgcgaacaagaaaaaaatgttaatgtcaaatcgatcgtcgcatcagctgttctgcgacagggaacacaacttgttatgttgcagtcaaaccataatgctaactgtaagcccgaaaaattagagaaactggaagcagaacaggttgatagagaacaaagaagagaaaattataaatgtgagtcagaaggcaagattatttggcgcaaaggtttgggaaaagcacgagaatccgacttaaaaacagatattgatccgttagatgaaaattcgatttcgagtaattatccctcttgggtatcagttcgacgtgcttacaatcgtaggagacaacaattacaaggcacagattcgaataatccgtttgatgttcctgaacggttacaattaacaaaattaggatcactcaaacttctgatgggaaaaacaattactgaaacagaatggatgatctatagaaatcgagaaattggaactttgctttttgcatctaaaattcaactagaggctgctagatattgtaaaataatggtagcagacgctacatttgagttagcacctagaggatttagacaaatatggcttaaacatctcaatttgggctgagcgggcgtggcgttgtcggtttccttcatggtctaaaaattttatttagataaatagtcattttttctaaccggtaaaacaaatctcctctaaatttggagtgcgccaaatttgttcgattttggaaaataaaaactcattattaaaagtctcaacatccatcgtgattgtgtgttcgtcaattctcattttaaggggaaaaaaaactttcagtcgttggacatctgtttaacaggggaatttaaattcttatgatataagccttttgagtaggtaggtaaactgactaacattttccattaacgccatgtatgctataggatatcaaatatccaaccaccgccgatccgaccacaattggtaccaaaacaagagcgacaatacctccaattgctaagacagagaggatagcacgacggtgtaccggtttttgttcgattttcacactttggtaaagtataagatacaaaaatataaattttttgattggatgcattgcagcgattgggagagtgaatatttgtttaaatttgtgatttatagattaataaaaattagcttaaatactcaaaattttactatccattcttatgttatcaattaattcactgtttcgggaatgaaattataaaatctttacatgaaatgcaaagaaaattagcaccttatcaattgtcttcaattaatttgcgaattttccttttttagctttgtataaatattataaatcttttttatacacatctaatagaatttaatcagaattacacttgccgttccataattaatattttaaaatttattttattttatcatcactgagcttttt

SEQ ID NO: 15376 - DNA, 2547 bp, Heterodera glycines
atgaattattaaaatagtttcacattttatatcaaatatcaatttcgacttcaagtacgaaacttgaatgaaatttattctacatatttgcagttgctaaaatttaaaatattcttgttgcgttaaatttatcgagttttttaaatattaaaaataatttgctttaaatgattttgagaaagtaggcaaataaattttgaattattgtaaatatttattttactttttttctaaattttaatttaattaattttctaaatatgtgattattttagttttccttcattatggctctgcttaatttatgcattttaagtttatcttgttcatgttcggtgtgtattaattgtttatccaatttatccaatagtaacacttcactgctatatctaatataataataattttattttttacatgcgtaccagatccttttcgaaatggtttatcatgacaaaaggctgctcaagtttatgcttttctattcggcataaaaaattaaaatctttaaattccctcatttttatcgaaatatagcaaatttaattaaaatgaattattaaaatagtttcacattttatatcaaatatcaatttcgacttcaagtacgaaacttgaatgaaattatatatatgttatattgacaaggcaactcatccttaaaaccaatttctcgggaacggctgggcaaaccgggctgaaattttgcaccgaggggtagctcgagacggggcatccgggaaaaatacgaattttccgatccggtggccaactgagtaccggggaccgatttcctgttttttcgtgcagttcggggcccataacttttcttccgaaacataaatcaaaaagtttccgctggtaggaacctaagttgaagtgttgtctaattttcaaaaaaaattccaggcctctacctataataggaagggctgcagaaattggcaacttttcagtaccaactttgtccacttcagtaccgggcgaataactcattagcgtttgaactgagcggggggtggccagcggacttattgtagagttttgtaagcccgattttttcaaatttaaaaaattcgaaaattttcaaaatttctcgagctaggccccctaagaggtttttgggtttttgaattttatgattttttgccgatttttccggggaaaacggagaccactttcaagcaaccgtttttcgagctctatcgattggtaagtttttgaaaaaaattcggtttttttccggaaatagaaaaaatttttggcctgagcgggacatttgagtcccgggcctataactcgtcagggatcggttttagccaaaaattgccttagaacatttttgtagagcattttaaatgctatcgaatggtgtactataagtctggaaaatttcaaaatttttcgagctaggccccctagaaattttcaaatttttttttgtgggccaaaatgggggtgaaaattttttttctggggtattttgaggtgctgaatacgaatataatgtttattttaagttttggaaattttagaattttttaaaaattcgaaaatatttttcaattttttgacccttgggattttgggctaatatttgaaaattcataacaatgtgttgtattggccaattttaatgaaataaagctttaaaaataaagaaaaataaggagaattttatgagatttatttggttttataatgttcaaaagaaaaaaagttattccagaatttctggaaaaattcggattttcagataaaattttataactcggttcagaaaagtcattctgtaaaagtaaaatactacaaaaatccgcaattttttgctctattatataaattttatttggtatttttatctcttctttaaaaaaagatataaaaataaaagtgattttgtgcttcgggtccaaaggggggtgaccaggatttttgagtggaaaattttttttcacaaaaatcttccaaaaacatgtcattaggggttatttgggccgctgatcatgaatatgtgatcagattttactttatacatcgttaagacctcagaatccctgtgtgattggggattctgaggcatcatttttggggggggggcaaagttcgagtccggacggtgtaacataatttttctgtgcatttttacgttattttcaatgattttaattaatttaaaatattttgttgagttaataaataaaaaattatatttaaattaattttttttttgatgaatacattttataagtttaaattaattatttttttaattgatagaatttcatgtattttttttaattaaatttgttaaaaaatattttcattttaatttaatgaatttactaattaatcactgttgtaccccttctaatcaaatttgtactacttctaatcactgttgtacctcttctaattactgttgtacctcttctatttactgttgtgcctctctaataactgctgtacctcttctaatctctgaagtgcctcttctcatccctgttgtaccccttctaatcaaaatggtactacttctaatcactg

SEQ ID NO: 15377 - DNA, 1108 bp, Heterodera glycines
  unsure (1)..(1108): unsure at all n locations
acaaaaatccgccnaattttttcctctataatataaattttattttaccatttttatcacttttttaagaattttttataaaaataaaagtgattttgggattcgggaccaaagggggtggacaggattttgagtgaaaaatttttttcaacaaaaatcttccaaaaacatgtctttaggggttatttgggccgctgatcacgaatacgtgatcagattttacttttgacatagtcaagacctcagaatccccgtgtgattggggattctgagtcatcatttttggggggggggggtgcaaagttcgaatccggacggtgtaacattatttttctgtgcatttttgggttattttgactgtttttaattaatttgaagatttttttttaaattatttaaatttattttttttaacttaaagaatttcattatttttttttgaatttgtaaaaaaaaaaatttaatttcaaattaaataaatattcaattaataatttccaacgttgtttttaattaataactaccatttttttcgtgttttcattgttttattcatttaaaatattttttattttattaataataaattacatttttttatttgaattaaatttttataaaattcgagaaattagttcctttcaatttcaataaatattctatattataaatttctaactttatttttaataagtaaaaggatttttttaatttgataagtttataatacatccaataatacaattttcttatttatttcattttaatccatgattgtacctcttctaatcacttttgttcaaattttaatcactgttgtacctcttctaatcactgttgtacttcttttaatcactttttacctcttttaatcgctgttgtacctcttctaatctctgttgtaccttttttaattcacttttgtacctctttaatcaccgttgtacctctcaaaatcactgttgtatctcttctaatcactgttgtacgtcttttaatccctgttgtncttcttttnntctctttttaactcttttaatcgctgttgtacctcttctaatccccagggagatcttttaatcaccgttgtacctcacctaatcactgt

SEQ ID NO: 15378 - DNA, 924 bp, Heterodera glycines
tgctattgacccgcgttttttggtattggatgaaaatgcattcgcttcctgaaagatggttgaaatagaaaacaatgcttattgtcttttcttccaagccaatacccagtaatcatcgcccgaatcccaatcctcttcaaagtcatcttcactttccgaaaccttctttttgcctttcttagccgctatctggaaattattaataaaaacttagattttcatgtttcacctttgacgttgttttattggttttggtttttggaggagctctcactttcttaataaatttgtttaaaagttaaaataaaaataactaatgcctttggtttaggttcatcctccttctctacaggatcatcatcagaaccctctaggtcatcttcgtcatcgtcttcactttccaaaaccttctttttgcctttcttggccgctatctggaaattaattaataaaatttagagttttcatgtttcacctttgaagttgttttattggttttggtttttggaggagctctcgctttcttaataaattggtataaaagttaaagtgcaagcaactaatacatttggttttggttcatcctctttctctgcaggatcatcatcagaaccctctaggtcatcttcgtcataatctagccctaaaccttcgtcttctccatcctttccctcttccatctccaattctctaattattgcatccatatctatgcctaaatcatcgtcatcgttatcatccatattgccgtcattatcatctatgttgtcgtcgtcatcgcccatagaatcgtcatcttttacaaattgtcgtcatcttcctcaatttccaattgtaatttctgttcttcgctatacttaattgtatggtcaccgcccttttttatcttctctccaatttttttcatttttggacgaattgatg

SEQ ID NO: 15379 - DNA, 1241 bp, Heterodera glycines
  unsure (1)..(1241): unsure at all n locations
catcgttctcacagcaaaaacaaatgccgagacnnggaaggaaaagagaangaggtagcataatgggaataatagttcctaaaaaaatttaaatgataattttgttgtaaatctttccttttatgttgcattgctttttcctcttcaattgcgacgcaaaacgcagaaaaaattatgtcagagggttggatttattgcgtggctattgacttttacaattggtagggcatatagaatatgcgaatacgtaagaattggcagagagtgggatttatttcgtggctattgacttttattattgccatggcatatagaatatgcgaatacgtaagaattggcagagagtgggatttatttcgtggctattgacttttattaatggttattgccaaggcaaaaaaatattttacaaacgtaaaattgagtcaaattggattatataatataatgtttgaaaatataaatcatagtcctcaaagtcaaaaccgctcaaaaaggttggaatcggttttagaagggcccaaaacattgagaaaaacgcaaatttggagcgcttgccatttttcaggaaaaaatcgggtgctgaattgtccactaggtggggcgtgcgttaaggtacttgcggcccggacatttgcgcctcagacatttgcggcacgacaaatgcggtcgggcatttgcgcatcagacaaatgcggcccatttcttaagggccattttcgggcacggaacgccaaattatcagcagttgactaattaattcatttaaccaataaattcttgaacaattcaataataatcgaattttaataatttcaacaaatttttcaattcttctttttaatttcgccaaaattttattgttttagttcaataatgtcgcaataatatttctccatttcttttaggttaggttattaactggtactcccggtgttcagttaggcatgttttcggcctcggttttcggttttggccaaaaaagtctgtttttgatttcggttaaacgacagtgcactacttactatcttaatctttttcttcaagattatcatatcgttgaatcaagcctgttacagctctgtcattctcaacatattcttcaatcggtcttgactcaattctcttgtaagataaattcatagacgtgatcagaagcgccgcgctatgacagaaattgaaagaattttttaatttgcttaacaaacaaaagttatgctgcttcttgcaaagaagactta

SEQ ID NO: 15380 - DNA, 3173 bp, Heterodera glycines
  unsure (1)..(3173): unsure at all n locations
cgtcggttttcctcacactttctctggcccattcttgctctcttctcatcatgcttttacatctcatccccaaaccggaatgacccctggttgcttttcttcgatttcccatgccatccatctgagatgaaggtggaccgctgttcattattgtaatgcgcagcttggccgtggaagttcggattggagagacgaagggcgaagccgagagtttggtccattcattcactttcacttcattttttatttaaggatcggggacgatcctaaggaaaggggggagttgtaaggattattagacgcatttccctcatttaattatttcccattggccattatcaattcaattacatttatccttttctcacgtttttccttttctcattgtaatgtttctccgcccattctcttcgcattttctccttccccagtgatcagtcagtcagtagtggtgatggaacagacttcaattatttattccgatttctcgcttcgtataaatccaacaacgaatgaataaagacatctttaacagtcaatgagtcgtttgggggttcggggcttggtcaaagggcccttggcttttccccattccctcccaaactccatccgggataaacggtgcatagttggtctgggggcacagtgcgcatccctcactttatgacgtgccaaagtttttagttttttataattaaagaaaaggaacaactatttcctttcttcaaagaaattgttagtgtagaggtaattcgttagtcaaaattttttttgggtcaaaagttcgaatcccctatgtgtaaattcattttgtaatttttatttttgctttttgtgagcaattcaattatcaaattttatttctttatcaaaatatttattttaattttattccattaaaaatcaaaaattgcattaaacattccaatgcgaaattatacacattaaattactttttaaaaaaccaattcaaattataaatatatatcgtccaccgaattgtaccgttcagaatactaaaaagctattcaaatttatttcggatcaaagcgattccgaaaatatcatatactgtggggattttaacatcccaaacattttatgggatgaaaataaggtaaaacatataaatgatcctatgtcaaatatgctgattgagtttatgaaccaaaaacaattgaaacagcatgttaaagaaccgaccagagaaaatacgattttagacttagtaatgactagcgaatcagaattaattaatgaattaattgtattggaacatttttcaacttccgatcataaaatggtcggatttcaaaaaagaaaaattccggcgtaataatcccagtgtttatagaagagattttaaaaatattaatttttcgaaattaagtcgggcgattcttgaaaatcgtattgatttatcaataaactcagtgtacaccgttgatcaaaaatataaagaattcttaaataaagtactgaaattatatgatacttttataccaaatagacctcatcgataataaaacaatcgtatcctcaaaaaataagagatttattttcagagaaattactgttacataagcttgtaagaaaatttcctgaaaaaagtgaaatcattttaaattacaaaattatttctagggaaatgaaaaaacaattgcacaaattaagaaatgaacaagagtcaaaaattatttcccaggggcaaaattcagttaacaaatgtattagaaataaattatcaaaagttaatgaaattcctacgttaattgatagtgctggaaatatgttttccagtaatgagcaaaaatgcgaaatattagcagaaatatttcaaaaatcttttttagaaaattcagttgttaatggttcactgactcaatcaacacagaataagattaaactttctgacattgaattgaatgctggcataatttggaatatattaagaaagctccccaggcgaaattccacttcaccggataacattccttacattttattaaaaaattgtgctgagccaattacaaaaatattagctgacatatttcgacttgctttggattccggtcaaattccggaaatatggcgaacatcattagtggtaccaattttcaaaaaaggcgaaaaaactgatccattaaattacaggccggtgtcattaaccagcactgtctgtagagtttttgaacgaattttaagtagcaaaattttagaatttctgaacggtataagattttttgataaagaacaatttgggtttttaaaaaataggtcgactacaacccaaatattaaaaacaatggacgatatatataattctctacaaaaggatcaacaaattgacattatctatattgattttgtcaaggcgtttgattctgttctaattgatttattacttcaaaaaatcaaaaagattggaattgaaggaaaatttcataattttttaactatctttttaaaaaatcggagttttaaggttaaattggcgaagaattgtcagacagtttcagaatattttcaggagtgccccagggaagtgtcttagggccattactctttttaatttttataaatgatctggcgtcctttattactagggctgggatttttatgttttaacatattttttttgcggcttagttatggcgagagaagcccaaaaataacattttctccgaacaattttcgaattagagcgacttataaaaacataaaaacacatattttggcgttttcgcacataaaaacatatcgcacatatttcggggtttggcacatattttgcacatattttggcatttttgaaaaaaatatctaagaaaaacacaaaaaattcaaaaatgcacccctaaaaatcaactttcttgccatttttataggctctttcaaaaattttctttatttatttcgtgtaccgaaaatcggattctccattaattcgttactggatatcgaagtttcttgctggcacttactcaactgatggaaaaataatctttaaaacaatttatcaaaaaaggactaattttacccccaaacacctccaaatgttttttatttgcatttgtgcgggcaaaaatgaaaagaatgagtttttttggaatttttatgcaaaaaatacccattggtttttccnaatttttagcacatatttttgcattttt

SEQ ID NO: 15381 - DNA, 3368 bp, Heterodera glycines
ttttagcttttgtcgtattttcgctttaatctcttcgattgttttccttcaaattgcctaattatccgccattaattaatgacttctccccccctcgccaaatgcgctcctcattttggaggcccaagctgattttgcgttgaatttgttgtgtggcgtgtctagcgtcgaccgttcgtgcattgtttcgccgttttctgtcgccgtcactttgtccatggtttacgcgggcgccaaggaaaagacgggcgaagaaatcggtcaactgcttggaaatggtgagaattctcgaacattcacaaacggaaagattttttaaaccatttttagaggaaaaattcttaagatttgaaatgctcgaggccgggttcgacattcatatttggcggaaaaatgccaaattcgttatcagcaacccagacaaccacagaaacatttttctactgctttgaaacaaaaagttctgttcttttcaaggccactgaaaaatgcctccaaataattgccttctcccaccccagttcttagtcccccaccctattaattacccctttaattaattgttctctttccgctttctttttaattgccccccttttctgttaattaaggtgcgcccgagtcggaagtgcacaaatatttcggcactttgctcaaatcgatcgcaagtggacagaacagcaacactttggagatggccaacaaagtgtacgtgaagaaaggcatcagagtgaagaacgcgttcaaaaagaaaattgaggaaaactacggtggacggatggaaacggtggactttgaggacatcgaagggacggcggaggtgggaaattgttttattggcatagtgccaaatcagtcccgaaaaatttttcatatgaaaatttcgagctaaaaaattttactttcataattttacgtgaatcatgtaaagcgctacttaaaatcgttcattttttgaaatttattataaacacagggcgggctttttgtttgtaaaaaacaattttgatagtgtcaagtcgggaaaagcgttcccgggcgttttctgggtctctctctgatcacgaatctgacaccattcatttcgatcaattcaaatctctggccgaattcgaatagaaaagcaaaatttttatcgcttttttgcctcagaaaatcaacaatttcgtggaggaagcgacccatgagaaaatcagcgatttgatcgcgcccgacgctcttgacaaggagagttggtaaaagttttaatttttgtttctttaactctatgacttttcaaaagtgttaatctaatacatagaaatacttttggttggcacacgcaaaaaagtcgccggacaaaacatcgtcgcaaaataactatcaaaaaaacaaaacaaaaccgtggtttactgagaaataaaatttcccttaaatttttttgtttccttgaaattctaaaaaaaaagaatttgtttacttacaattatgcttatcctggtaactcttcggcggcaattttcaaaaattacgaacatttttttattctttgccggcgattttgatggaagaagtaaaaaacaaattgtaattgtctgaaaatgctttctttctttcagcttggtgctgatcaacgcgctctacttcaaaggcgcatgggcgaacaaattcaacaaaaaattcaccaaaaaggcgacattttatgtggacgcgaacaccaaaaaagaggtggcggaaacaaacacattttaataattaggaaaaattaaaatgccaattatcagttttcaagggccaatgcccacgaattcggcaccaatttcgacaattttcgaaccgatgaccaaatttctaacaaaattcgattttttgaacaaattaaaagcattaaatttgcgatgaatgagaaggataacagctgattgattatgtgactcgttcactatcagtcgaaatggttttcgggatttcgtggtcagtggccatgagaaaagattattggcattttaattttgaaatgaattaaaatatgggcaaaaatttgtgggggctaaacccacaaaagagtcattttgtccataaacgaccaaatctgattttttagctggaaacaatgcatttgacgtccaatttcatttatgccgagaatgctcaggtcattcacttcacacattttcatgcttttttcttatgaatttgacaattttctgattgcttgtacagctccaactcctcggcatgccctacaaaggcgaaaaggagttcatgttcgttttgttgcccaagaaacgctttggactgatcgaattgttggctcaattggacggcaaaaggctggtgaaactgatcaaaaagcgggacaaatgcaaagtgaaggtagataaaccccaggaggaggacaatttctccgaaaaaatcacaaaaaaaacagagctgggctgaaaaggcagaattttgtagcgatttgtgccaaaaggcactaatttttccatttttgggccaatttttcaaaatataatgcttcaatggagtccagcggtgccgatggcgccgctggggaaattttttttaaaagatttaatggagcatgataagaatttttcaaaaaatttgccaaaattttaaaaaattgcccatttttgcttgaagaatttttctttttcatttcggggggatccccccccccccctggatacgggcctggcctaaatgaactgtcctaaaacacaatgccatcccattcttttcacaggtgcagttgcccaagttcacgttgaaagccacgcatgaactgaacgaaccgttgaccaacatgggcatggccaccgcgttcaccgacagcgccaattttgagggcatttccaacaataaacagttgctgatcagcaaagtggtgcagaaggcgatcattgaggtgcggttattgcccatgatacacacacaggacaggcttttcagaagggtataccaaattttttacaaatttcacagtggcgtctatcggcaaagtcaggccccctattttaccatttttaaaaatttgactctctaaatggcaaacccatggccattttggcgaacaacggctgtaaatgcctgcttttttccacggcaaagaaattttgataaatttcggcaaaaaaatgattaaaaaatgtttttttttgaaacggggatttaacatcttcggtttttgtgccactaaattcgacgattaaggtcaatgaggagggcactgccgccgcggcagtcactaaatgccatattaggtattcagaaggcatcgaatatcgttttgtcgctgaccatccgttctgtgcctttctgattcgcgatgacactgtgcttttcagtgagattttccgcaaatgattccattccatttatat

SEQ ID NO: 15382 - DNA, 3241 bp, Heterodera glycines
ctcacatcaacggacattcccaccaaaaaataaaataatgcaagaattgaattaatacaacacaacgtaagaaaaaggaaaagcaattgggaaaataaatataattttgggtgcttttggtaagtgatttgattggacggttttgctgtgttcggattattcgtttgttatccattcattcgcttctcatgcgctcgcaccgccgtccgatcgcttaagcattctttcgcggtacacgtccacaagtttaagcttaacaaaaacggacacaatgaaaaataaaattaaaatagaaaattcatttaaccccaaccccaaaaacgaaccgtcgctgcgtttaggtgtggctttaacacattcaacccaatcgaatgactgatggaaaccaaacaaatgatggccgaacgtcggaccatcgactgggaattgtcgtagcactgagagagcatttggaggaaaatcaacgaattattcacataaaaatcaaatgggaagtgtaaatgagttttccgtttccaaaataaattaaaatgaagaaaaaattgtagaaaatgggaaaaacatttgccactggttggttatatgctcttctggcaattccacccattcggcctcccccctttttttgctggtacttttttgtcagagccggtcgtttccacccctcccgatccaaaaaacttaaaaatatacacttaaaaatttttcaaaaaaagaaaaaattaaggaaaattccgtgactgaaaatttcataactttttagaatctttttgaaaataaaaataaaaatttcgtggggtaaatgaagtgcttgctccttttgtgtccaatttgcttcttttttacctgagtcatccgaggcacaacggtggggagcagtccctccacctgaaatatgtgttaaaatgaaacgaataaacaattctttgtttccctctctcacttcttccggcggcagtttggagagcatacttccaagcattttgatcgctcccgacagttggtggtatttgctgtgtttgtcgtcgatgacggtcagcaaaaggtgcatgcacgtgttggtcggcaaatggttggcaaccgcagcaccacaatcctcggctcgaagaacggagatggggaacaaatgtaatcaacgcatgcaatcataatacgaaattgaccaatctacgaatgggtgcattacgtttcggtacttttacgttttggtggcacaccccgttttttatcaaacgtttgacgcattcatatttatgcaaaatttctctggcgagagaattataagcgacacaaagtcaatcaatgcatttgaggataatgggggtacggcatcaaaacggaaaagcaaatacgtttcgcctaatttatttgattttttaattttcggggggggggggaacggagttcggatatggccgagccgttgtaccaaaaaagtggacaaatcactgtgagaattacccgctctgaccacggtggcatcctcacattcgtgcgcattcagaatgatcatcaccaaaagttcagttttggcaaccaaacgtttcggctggaccaagctgaaaaaaaggattgaaaaggaaatgccgcctgccgcctctcttaatttaattgagtgcctaatgaaatgattcataattggtttgccaaatggtccctaattaatcaccccccccccctccctcaacaaatgccaactcaccacaactctttgagtgttttaagtgccgagattttgatgatgttaaagtgacgctccaaatcttgagaaatgatctgttggatggcgaagaaaattgtgttaaaataatcgttccacagcgtaatccctccttcgcggatcttaaaaaacagagaggtgattgtgaatgcttacaaatgttgcttttccttaccattcgcgacaacacttgaagcgcctcctcaatttccttttcattgctaaattttgacaaattaaaaaaacgaaacaaaatgtgaatattacgtcactgcattggccccaattgtgtcacatatttcctggatgaatgcaatttgctgctcgtggtcattggctaactgttcggagctcaggaaggaccaaatcaaaaaagtcaaagtaaataggctaagaaatgaaaaacagaataaaatggacttgtgttcaacagctgggaatcggagggggtacgcccaagagaagggggggccctcaaattcagcagaacactcaaaacaaataagcgcaaaaaaggtttccgtttcccgaggcagtgagtgctaaccaggggaaagggataggaaaagggcgaccgaagggaaaagccaagcggtcggccgacgtaaaggcgagaaaaagcaggcaaatgccgagggcgaaagtgccaaagggttggacgaagcaaaggcgagaaagcaaagggatgcccaaatgggctgaacgccaaaattggtcaacgcaaagggaaaagcgaagaatggccaaatggcaaatgccaaaattggtcaaagcaaggcgagaaaggagaaaagcaagggggccaaatggcggagcgccaaaattggtcaaattgtaagcaagggaaaacaagggaaaatgtgaacaaatgagagaaaagtttttttttgtttttgttttattttaaatgaattcggcaaaatttgggtgagaaaattcgtcgttggtgatcagcggaaaatactcccgcttacgcgtacagcagtggttcttccgcttctgaatcggacgacgtccattcgcaacacttctgccaccgagcttcccctcgctgttccacaaatactccgcgcgcgaactttgggccaaatttccatgttggttgtttattatttgtcttatttcttcgttttgttacaagttttggtaatactatcgatggtgcccctcccctttttggaagttaattttgtggtacttaaattttttgtttctaatgataaaaacgtgtttctaggggttttcggggctgctgatcacgaatatgaactctattggacgaatttccgaacccctaacccgaaattcgaactttttttcgaaaaaatttttttttttaatccgtttaaaatgtgtcaaaatgcgtgctccatgattctccggtgagctgctcgttcaacacatactcaaaaaataaataaaatttaacaaatttctaaaattcaacaaaatgccaaaatatgaagtgtaaaattggcgcgacaatcagttttcgcatggatacaaagctgccacttggga

SEQ ID NO: 15383 - DNA, 1123 bp, Heterodera glycines
caaagatgggtaacaatgccagtggatatatggatatatcatttatgtttgcgcgtgtggagcactgaaaatccgttctgtcatttgttgtacgcgcacggagagcattgaaattaatcttttgttggaaccaaagatgggtaacaatgccagtggataaatggatatgccatttatgtttgcgcgtgtggagcactgaaaatccgttctggcatttgttgtacgcgcacggagaacattgaaattaatcttttgttggaaccaaagatgggtaacaatgccagtggataaatggatatgccatttatgtttgcgcgtgtggagcactgaaaatccgttctggcatttgttgtacgcgcacggagaacattgaaattaatcttttgttggaaccaaagatgggtaacaatgccagtggataaatggatatgccatttatgtttgcgcgtgtggagcactgaaaatccgttatggcatttgttgtacgcgcacggagaacattgaaattaatcttttgttggaaccaaagatgggtaacaatgccagtggataaatggatatgccatttatgtttgcgcgtgtggagcactgaaaatccgttctggcatttgttgtacgcgcacggagaacattgaaattaatcttttgttggaaccaaagatgggtaacaatgccagtggataaatggatatgccatttatgtttgcgcgtgtggagcactgaaaatccgttctggcatttgttgtacgcgcacggagaacattgaaattaatcttttgttggaaccaaagatgggtaacaatgccagtggataaatggatatgccatttatgtttgcgcgtgtggagcactgaaaatccgttctggcatttgttgtacgcgcacggagaacattgaaattaatcttttgttggaaccaaagatgggtaacaatgccagtggataaatggatatgccatttatgtttgcgcgtgtggagcactgaaaatccgttctggcatttgttgtacgcgcacggagaacattgaaattaatcttttgttggaaccaaaagatggggtaacaatgccagtggataaatggatatgccatttatgtttgcgcgtgtggagcactgaaaatc

SEQ ID NO: 15384 - DNA, 1759 bp, Heterodera glycines
ttttcagtacagtttcctccattcgtggcgatttcccccaccccgcggtgatcgattcgaggccgaagcctgaccagcccccttcgggcagttcacttaagtgaacgccaagctgacggacgtccccggtgaccatcattttcttgagattcggtgccccacatgccaaatacactacggcggtaaaacttgtctgcgttgcttcatccaaaagaagatgggttgctcgacttatcgttccttggacgcgaccagccatgtgagtcgtgaggaaaataactttccttttgtcgtatttcagataactttcagccacttttgcttctcggacccgcagaggtgtgttaaaatctaaactaaacaaattaatgttccgcatggctacggccgcttaaattacgacacaacggctacggccacctaaaaatctcaaaattgtggaaggcgtggcgatttctgatgaatttaagttcagatctaaaacaaataaaattctgatggactccgtcgccgtgccttttcttttggacaacgtcccgtctttcaagtttttctccaggagatttgtcctttccaatcacttcgtccacactttcaacatgaattttgatgaacacgggcaaatcaacgtaatgagcagcgagcacgcctactttatgctgaaggcggcgcatttcggcgacatggcctcgttccatcacatccgccatgcgccaacgccggcggcggcaaaacggcttggccgtcacatcatgccgtttgtcgagcaacaatggcacgtcgtccgcttcgaattgatgtgccgtgcgctgcgtgccaagttcgccgttgagcacttgcgcagtgcccttcgaacgacgggctacggccaattggtggaggcgtccagagatgagtattgggccgctggacgcgagatgcacgacgtcggtttaacggctacggccaattggctcgggcagaacgctcttggtggagccctcatgataatccgggaggaagtgcgcacacacccaccgacaccgaacaacctggtgcggcattatgtcgtcgcgcaagcttcggctgaggactacgtcattgtggcggcagcctttgatcatgagcccttctttgttcgcgttggaaacgacatgctgcagggcctgggtttgcagcgcaatctcgccgttggagacacgctagttctggttggctactactggagagcagctttcgaacaagtagcgcagattggtcatccaacgttgccgggctggctccatcagggccaaattgtgcgtcaagcggaggcgcagtcggtacagaatgtcgtcttggtgccatctttcgtcatgccaggagtgatcagggccatcaacaacggcagacatcagggccatcgcattgtttgctcggtgaatgtcctggtacacggtcgcatccatactctaacgaagcgaaacatgaacgaaggcgtaattgagcttttggaagagggccaaaatgtgcaactgcatgtgatggaggtgccggcaggctggtggtgtgctcgaaattacatcctccctccaaatgcgcttcttggcactgggatggaatggcagtcgaacggaggggaagtctttcccctgtggttggagctttgaggagggaaaaaagggggcggtggtgatggaaagagggcgaatggggaaaagaagaggaagatgaggagaggaagagaagggaattgacggagaagaggcgagagtgaatggagactgaagggcagtagcaa

SEQ ID NO: 15385 - DNA, 2173 bp, Heterodera glycines
aaaataaaattcataaatattataactccttttctctattgcctttatcgaccaaaaattattaaattaataatagctaaaaatattatttctattacatgttttcgttgtctgcacaattaatggaatggtccgtaacaagaaattaattagaaatttacaaatatccgacacaaattaatttttaattatttttttatttattagaacaattggcaaagaaatcgacggcagctggtggaaaaagaattttcagatcaatcgctatttcaaggtcaccaaacggaattgaatcagtctgttccgttcatttttaggtgaaaatttaaaaattaataaattatttattttattttttgttttttaagggctcgtctttacccatatggtacaaaaaatggagatgccaatatggttggcgccatttctgagttcaaattatcaaaccctttaatttttctcgatcaaacatttgacacaatttgggtaattgaaaattaatattaaaaaacaattttttactgatgagaatcaattgaaattataaattttttattgataacaatcagtgattgttaagcatatttgcaaaagaaggttatctttttaatccctcaattaatattttgttttttaaattttctaattagataaaattaaaaagagaaatttgaaaattattaaaatttcccgaaaatgtcaaatctatggacctttcattacccgtagaaaaaatttgattgcttagattcaccggaatggcattgtgtcaatggcacccgattttgacccgtccacaatacccaaatcattgccaattaccaataatgggccacctttaattgctgtattatggaccaatgattgggatgctcaacgccgtcgggttctcattagggaaacaaatggtatactatacaaaatttattttaaaaaatggaataatttaaattttgcactttacagaggagacaattttggcaatggcacaaaatgaagtgaatattcaatttcgatatggcaaagagtttgagccaaagtcaatggtgattattacatggatggattcttctgttactgatgaagacgatgaaaatgaggtgatcaatttaaactagagctcggcataaaatcgtggatctcgacctggatttaatggttaagctctagacgtggatttcctggccaaaaaccgaagaaaaccaagatccaggaaaatccagacttgtcatggcctggatccaggtcgattcaatgttttttgacaacatgaaataaaaaaaagtaacacaaaataataaattcgaaaataatacctggaatttttagtttttcatgatttcggcagttttaggaaacgatccatcaccggtttttttcatatttgagttggacctagacccaggaaaatccaggcatggatccaccaggttcaggccgagctctaatttaaatacaattgattaagtcatggagaaaatacaatttattaaagtgttaaaatattttcaaaaaaatttctatttattaaaaataaaaaaaatttgtaagcgttttttatcgcttggaatctggtgacaacggccgtaaattcccccttattttgtttcaaaattttttgaaaaacaccatatttccgatgtttacagctttccgatgcagatgtgttattccaacttgccttaattgttgggaacaatgcatgttttgcgcacaatattttcagcaaattgccgaagagcgtaatggcaatggtaattaattgatgtgatgtaataaaaatccaaattcgaaacccaaaacaacccaaaataacagaatttatttctatgaaaaaagaattcaaaaaattttaattttttataaaattacgaataaacatccaattactacatatcaagagtggcttcaatgggccggcatttgcttcatcaagtgctgaaactgtagcagaaatgccaaaatttttgatgctgcccgggtcaggcacatctgattcatcacagctgactgaaaaaagcaatatgggcattccaggtggaaaatatccaaattaaaatttagtttttttccttttccattaaggtcctaaaaaattggaatttcaattttttcttaattaaaaaaatttaaaaattctaaattttttgttgcgtatttcctgtaaaaaaat

SEQ ID NO: 15386 - DNA, 1132 bp, Heterodera glycines
aattttggggtagcgacgaaaattattttgatttcttaaatatacttataattttgaaattttatggcataatgtcactagtttatcaagaaattttaaggtctgacacaaaatttttttgatctttgatcccgaatgtactgaaatttacaattttgcattttcccgaaattgttaaaattgataatgggagactaaaaatataaaatttgatacatttttgatcgaataaattgtaaaaataacttgatttgaaaaaatgttcttatttttgaccctaaaatcttatttttcggccttggtgttcatattttgaaaaattttcgatggaagccctggtttaaaaatgcatggaaactgggagggagtttaaccgaaatttttgcgaacgcgtctcaatatcgaatttgaccaccattttttgcggcgctctttttcaaaaaaagtttgggcaacagcagaagggggatgggcggcgatgctattaggagccgcgaggaaaattttttttgaaaatttgcaatttgttaacagatttttcctaaaaatacctattttagcaattttgggacaattttttgcaaaaaaaattggagttttggtgggccatttcttggcctattggaaaattacaaacatataaaaatggccaaagtcaaaaaatttttgccgtctcaataatgatttttttttcatattaattaagacaaaatttcgcttttctgcattagttaatattcttctttttttgtgaatattttgtagtttttaatttgtcggggaatttcctctccgatcacgaaatttcgctcatctgtaagaagttaggtcagatgtttggcaagtaaaaatttcatgattttaccagaattttcactacctaaaaaacaaaaatggaaaattaactattgcttagttaacaattaaattaaaacatttataaattttatattattttttaaggatggaaaggtgcaccaatctgtgacgaggacatcgatgaatgccaagatgaatcagtgtcatgcccaaatgaacagcccgattgtatggtaaaactcgaagatttttttcatcacacattttccaatttttaaagattttttgcatttgataatttcaaaaaaattta

SEQ ID NO: 15387 - DNA, 4318 bp, Heterodera glycines
tcaggtcgtctgcatgcccaacaattcgcgaatttcctccgccgttttcgtctgcaacaaatcggccaccgattgggccgcgtaaagacgctgagaaaatggtggaggacaaaattgatgtctttagcaggaaattgtgaacctccgtcactcctctcattacgaaaatttgaaaaaactcaaaatttttttattcatttcaaaaaaaaaacagaaaatatttaaaaatgaaaatcattctgtttcttaagtgaaatgaaaattttttagcttgatctgttcaaaacatttttttaaattataattttcccagatttggtctcaaaatgcccaaaagttcccgatttttctatggccccgaaatttaagtcaattacactagcaaaaaaaaaaaaaaacaatttttgacccgaacagaaaaaaactcttcagttgccctcccgaattgttttttctggttagggcctgcagagcggagcaggagtttacccccgccccccgaaaaaatttttacaaaaaatttatttctgaaaaattttccgggcgtctttttaaaaagagtacccttttgaaattttttttcacttttttttggtcaatttttttttttgtttattttttatgcagaatttgtttttttaacatggaacgtattgcatactatttaataaactgaaaaaaacattttaaaagaaaatttagcgctagttaaaaattgacaaaaaaatcgtgaatatattttttattcgccataattatgctgttaatacttaatattagcattatgtgtcaaaaaaacaaaaaaaaaaaaattgaccaaaaaaaagtgaaaaaaaatttcaaaagggtactctttttaaatagcgccaaattttcttacgaaaaaatttccaaaatttttttttcttttgtaaaatttgtttgagggacacgacgagtggggatttattatttaccagggaattgaggtccaggaaatgactcgcattcaaaagcattttcaactcagcgaactcaatctgaatttggaaattagggcgaaaagtggcattttttaatgcaaaatcgacgaccttgaaaaaggatttgtcaaactcgtcgaacacttgccatttttgggtgccggtgagagggtcctgcaaaaaataaacggggaaataaatactttttaatttaattcgaatttaaacaaaatttcatggtaataccagtctattgtggactcttttcaggacaaatttttttaaagacatgaaaagtaaagctccccggggtgttttggtgataatgagtcaatttcggctaattcagtacccataagaccgaattcgaacgaaaaatttaaaagttgatttttcgaaattcacattttcgaattgagatttgcttagtgcttattcattgctatagagaattttcagtaataatttccatgttttaattaaatttgagatttctgctggaattcgaattcgaggttcggaattgttacgattttcttaagttatttttggctaaaaattcgaaaagcaaaaacaaaagtttttttttcttaaattttcaaatgtatttttgcatattccacaaaccctttcaacgattggctctggctttcctgaaaaaaacaaaatgttaaaaaaataagaatggtggtaaaaatggcatgaaaaattaacgttaatgcaaaaaagttcgttttttcggttgccaccctttgacacaaattttccttcaagtcgtcccgtgggctacccattctttttttgtataaatttaaaaaaatgcccattttctttaaaaaatttcgggaattttaatcttattttcccctccaggggtgggtacccaccatcgcgatgctccatccattggaccatcttttcaaaggtgtgcaccgaaatgcttctcactgggaacacaaattcgtccggcaatgcctcgggcaaaaggcccaaaatctgaagaaaacaaagcaattgtaattcgaaaaggaaacaaacggaagaatttgttgcattataaagaattgggccctaaatccaggtcatttttatttgcccccctccgaaaatttaaaaaaacgaattttttttttgaaaaacatgatttagattttcatataaattgtaaaaaaaatagaataggtttttagactggattttcttttcctggatttttgtgcataaaatcaaggtcaaacgccggaacccaagtccaagtgggaaaatagtcaaatattttgcatttgttgacacaatttggtagtccaaaaggttgtctattagtcaaaaattaaagaaaaaaacattgccaagtattagaaaagctgagacttaaagtaatttgaaaacccaggcttttttagtccttgatgcaaccgcaataaataaggcaatcgatgatttttggttataaaaaaaaattaaaatgttcgaattcgggtccggtgttataaataggtctaaatggaggcaggattcgtgctcagcgcctcaaaacacccctagataagtgttataagaattttcagaaaaaaatttaaagaaaaaatttcaggaccaatgatctaggcgattgtcataaatagagcaactttttcatttttaccccatttataaactgctaaaaaaagaaattcttaatccaatccaaccaaactttttgctaattagttgttcattcattggcactaactttcactgtctttcggaaagcattgcattggagcagtaattggacacgaacagtgacgcattggccaccttcgcactcgcatttgacctgagaaaagttgcaaaaattgcaatttcaggaaaaaaaattggagaaaaaatggaaaaaaaacattaataaatgcacggacaaagacgcgttttcagcattaaatgtggccaacagatttcgaaatctttcccggcaaggattttttggcgccattggcattaaattttcaaaattttacgccaaaaaggcatattttcggcaaatttctggccaaagatagatgtgtagttgaatggacaggaaaaacatcctttggataattttttgtcagagtttgaaaagttttcaaccggtttcggaggggtacagaaaacgcaaaaaaatttcttccccctcccctccatttaattatttttggcacctctttcccaagcaattcgttgttggcattcttctgctgggaactgttttcttgttcgttgttattaggcggaaagtctgacaatgatgaagaggacgatgaagaagaggaggacaacattttaggaggcagcaaatttttaaaataaacaggagaataataatgaaaaatggtagaggtaaataaacggaagggacttgtacaaaagtgaaattttataagattttgatgaaccaacagcactatgggtacgccccactgtgcagagaaaagcctagtactatctcgtcgtttctctttttctttgtaatttctctcactttggcgtactatctcttctttttaattatgtaaaaaacaacatttacttctctccatataactttttttctatgcatacaagttgcaccaaattttgcataccgatagagaaaaaaattttgcatcgaatgttctataaggttttaataattttctatcttgtttttttgtaatacatatttaaagatttcgttgacttttttaattgtttaatggctaaaagaaatttgccacacaagctcaattgcaaaagagcaaggcaaaaaagggagaacaagcgagaggagcgacgaactaaaatggccaaggcgaaacacgcccgatgggccaagaaaagtgagtttttccattggtttatcgtaaaatctctaattttccaatttttagccgctccccagcccgacaccgatgccgaaatgccacaaagggccgtcgacatcagaggcaacggcgcaggacaacgacggacaaccatcatcaactccaacaccggtgacaccgctggaaatggacgtgccgtcggtggagatgatgggaatcggtgtgtcattcccttcaacgcctgccgacgaagaccaacaaattcaaccaatgccgtcaacatccacggcacgctgtgacctggtggcgacaccatctacttcaaagggcgccggtgcctttggtctcgacgatggtgagtgagaaatttcaccaaaaatttagttttttaagtcgtttcattttcattatttttaagtccatatgttcgacgagctgcggcggcgccacgtttggactgaggaggaactgcagcgacagcgccggtcaaacgccttcctccgaaacagctcaggcacagcgcgatcgttc

SEQ ID NO: 15388 - DNA, 2478 bp, Heterodera glycines
  unsure (1)..(2478): unsure at all n locations
atacccactattttttaagcaattatacgcgaataatttcactttttaatnaatttttattaattcacaccggataatttgttttttaatggaatgcaatttgtataaatttattttttcttgtttgaaacagttacatctaagaatttaaattatnatttaaaatttnggaaannnanattaattnatttntnnaaatnnnaatnagnaaattggaaaatttttgtntatttnagannttnnnaataatttnttggtagattttcatcatcgccttcaaaatttcttggttcatcagtgtgatgtttttaacggtggcatcgtcggcattctctcgcttcttacggcccataaactcaactaaataattatctgatacaaaaattaatgcttaatcaataggagctttatgtaattacgataaatttccatctgagaaaatgcgtaattggaatccttaattgctttctaaaaaacggaaattaccgtaattagatttataggcttaattaattttggagtgtttaactctcttcttcgtcctcctcctcatcctcctcctcatcgtcttgcccaagctcttcaagctgatcttccagcgaagagccctttttcatcactttcggcagttcatccccaatggtgtcagactcgcgtttttcggcactgtgctgtccaagtccagccgctcgtgcaaattcagtctcgttgacgccactaattgaggagccaatctctgcaagttaaaaaatttcttaatttaaattttcataatttaaattaaatttaattaaagatgacaaattttaaagagctttttaaccaaattgaaaatgacgttttttataaattaaattatcaatttcgaaatttatttttatttcacataccggcaataaactgctcaatcattgttttttgcacaggagcggtgtcggcaatcacaatgaatgcatgagtcaaaaggctaattaatgaaatgcgtattttaatttttattttaaaataaaatatcactcttaaaatttcaaaataaattataatttataaaaaacgtaattaattttccattatttttagaattataaataaatttacttacacggatgccatcatgttgcgcattgtctgtcacttgttgtattaaattttggtctaaaatcgaatagtttttgaaacaaaaaataaattaaataaaaataggagtgattgaggaattcctagagttttaggatcacagagtgattatattaattgaaaattaattaacggagaggagcatcttacaggagaagcagatccatttttctcatttttcaaatactaattttagtggaatgtactcaaaattctgtccagaaaagtttgtacgttaatcctttaaaatagccatcagaaatttaattttacagtttgtctctaatcccaatcaactctaaaaatcgaaaaaatttcaattttataatgactgtcatgttcagaaaatagtttttattttattttttctattgccccattgaatagagtgtttggtggtgtgtttacaatttaatgcctattagctcattatcataatcatcatcatcatcattagcagcaccatcagcagtttgcctgctgctgttcagtggtcacagaagtgggtaaattttttcactgctctgctgcttattcatcattatttttaaattttcgatcggacggaccgttgtgaaaagagaaaaaaatgaataaattaccattttttacattagccatccattaataaaattagaaaaaaataaaaaaaaatgaaaattaatttgtaataaacaaaaattcttaaaaatattaagaaataggtgaatgaaattttttttttaataaattgatgcattgaacggtttaaattggcatcagagaatcggtttttcgatattctgtaaaaaaattttgagaaaatctggatttgtataaaatgtatttatgaaaatttggtcgtattctttcgtatggctatattttgataagcctttattagcatacgctaatttactaaactactcgagatttatttggtgaaattattaaattatttattataatataaattaaaggtaaaattaaatttacaattttttagccatgcattgttttgaaggcaaaaagtaaatcttttttataaattaccatacattccagtggattattccgcctggacatctttcctattcattttcgggttttaataaataaaatattatgaattgtagcaaatttaaatgaaattccacaactctttcaaattaaataaattttgaaaataaattgaaaaatcttttaagtgaaaaaatagataagcaaattatttatcaaagcagtgtcaagctgagatttttttatgtccatctctaactattaaaaaaaatcaccgaaattctccaaaataaaagtaaaaagagggtaaaaagtttttgcgaccaacaaaannagtaagca

SEQ ID NO: 15389 - DNA, 1033 bp, Heterodera glycines
  unsure (1)..(1033): unsure at all n locations
aataaaaaaaatgaactcttttaattattgtttgatgaattttttttgtctataataattttaaatttatttaataaaaaatattatgcnaatatccttacaaattagcgtcacaaattgatatgttgtttaattacttatgtttgttgtttgagttgctattagatacacataatttaaattttaagttagaaattataaaaaacttttatgaaaataaatgagaatttcataacataatgaaatttcattttgtatagttttagaatttcttaatccaagtagcattaatccgatataaatctgtattgtatgcttgaaattaacattttaagttttaaatgatattttaaaataagatcgttcgatcatttataaattacatttttccaattaaatagggaaaaaaaaacaattattttcgttatgcatcatgatttcaatttttaataattcgtcttttttaatattaataaattttattatttattatgtatcaatgcctgccatcataaatattctttgatgtggaaaaaaaatatataattcaagatagatagttacatttggaaaaaagtttttgctcttttcataattgcatgactaattccttactaatcatttttcattaagcaattttatatttaattcattattgatcaattataaagattcaattttgattcttggctacctgtgtacaaagtggaacaaatttctatgcagcattaattttttacgtacgtatatacagggtataacaaactttcgtgcatataaaatttgaattcctttattgggtgtttttatttttggtataatgatttttttgttcaattttctaatttgaaatttcaaaggaaacgaatgccaattttttcggaatgacatataataaattttgattcaataattagtataatttgcttataaaaattaaatattaaattttgcgacgtaaaatatttaacaaataattgagcatttctaaacaaggaataatagttaatttaatagaattaaatcaattaag

SEQ ID NO: 15390 - DNA, 2504 bp, Heterodera glycines
ggggatctctagagctgtcatcggcccactccgttctgcgattggtttgccctcctaagttgccgtcgtttctttgtcccctccttcgatggctatgttttctccgtgtgaaaccgaatctagcagctgtcccataaaatcactggaaaagctaacatttttacgtacaattaaccattttatctgtaattttccccaattattccccgtttacgttgttctcgcgtccacttgctgctctctccggcatttttccgctttccacaaatcgtagcgctccgatttcttccaactgtagtaaaatgtgaccaattcgcccactgtccgacacggcagctaaaaaagaaccgattaaaatgtaaaaaacactcattgccgttttcaaaaatggacaatttgagtaaaattaaattaatataaatagtaaactaaatgctaatttatgcctaatttaaaaaagcaccaaagtaattagggttggagcaaaatcaaatagagcccgccctatgcttgaaattttcttagatttaaaacaaaatttgtagaattatttctcccaagcccaccatctttttatttttcatgttcgactgtttaaaatcaaaaccatacaaaatcacgttggattttccaaaagcacttgtagtgtttgttcatccccctctcgaactgctcgcactcctcgtccgtccacaccaatggccgcgtcggctgcgttcgtttcggcgcattggcactctcgaaagcctgtgaagttttgtcggaacacataaaactgtcttttgctgcctttggatcataattgtgcttaaatataaaaaataggttttcttacaattagccatttttgtctgactttcattaatgccaaaagtgcgtcttcgtcatccggcacatttgctggccgaacatcagcgagcggagtcgtcggtggcgcagaaggattccggcacggcttcttcacggcctttatttgcgcgaagttagtcagataagcgtctataaatgcatttggacaacgatcagtcgacgggcaccaaagtttctcggacaactcgtccaatggttgggtttccatcgattgattcggaagttcagtgacctataaaagaaaatggaagaaaaaaaagaaatcatataattccagatttagggggtaacttatttgttagctgtacaactttattccacagcaacaaaacattaacttttaaaaaagataggactaaaactaataaaaaaaccttgtttctcgaacatttttggacataactttattgaaagtaaacaaattttctttggaattttgcaggctagtagagaaatatcaagggttaaaaaaagtctggttgctttagagcaaagttataagaattttttagctcaaacaataagccttctctattagcctataaaattcaaagaatttcgttatatttcaaaaaagttatgaccagtaaacttcaaaaaacttttttttttcttaacatttttgaccatctttttggcaaagaacgaaaattatcagattagtagatgacttgaggctatagaatggtaccaaaaatgttaaatttggatgcttctaaaaaatggtgcgcattaaagttgccaaatcatttatggttatgtgaatgcaatagagccgatttctgtccaaataataccccctcctctccaccacaccaccaacttggaattggggtccgacgcggaccggctgcttcagcagaaccggcggttcgtagtcctccgtgtcatcgtcctcctccaaatcgtcctcttggaaataagctcctattgtttgcgaccactgtccataagtttcggaaatggcggaaaaaactctgtcgcgcaacgaagcgactgtttgagcagccgacgacaacccatcgacggcatcggaggaggacggaaagacctcgtcggagtcggcattttctaaaacggagcattgaaaacccccatacgaagtggcaaaactgaagaccatcttcccgctcctctcctcccccgtaatatttccgttgcaattcttccagcgaaagttccccgtcctcctgcaattggcggagttcgttgtcgcagtcgtctcccgagctgaggttcgcttcctcctcgtccaaagttgctaaagaaagcgttgagatataaattggttgaatcaaaaatttttgtgcccaattaagctctgaaaatattatgatttgggagggagggaattctcggtacttatgcagtttacgccacataaaaaaattgttttttttaattattaaaacgtgtttccaggggtattcgggccgctgatcacgaaaatgacattcatttcgactagtttcgaactccggacccaaattcgaaccaaagccgaaaattaatttttcactaaaatccacctttattgtccaaaaacgattcaagtagacttaaatgaatagaaattagggggttcatccaggaaagacgcgatgcatttgaatcgtttttggacaataaaggtg

SEQ ID NO: 15391 - DNA, 1398 bp, Heterodera glycines
  unsure (1)..(1398): unsure at all n locations
taagtaccgaattcttcttttcctaccaaccacttttttagggctttttaaaagtgatttttgtaccttcgtcgtcatcttcttcttcctcctcatagtcactttgagcatcggcatcagccattcttaaaaaatgacaatttttgggtaaagtgttaaaaaaaattgtagagacaaaatttccaatacttccccgggcaagatcaaatcttggtaatcgtacgcttttactagtcccacaaaaaagaatttcgatggaccgggactaataacgggaactaaatttgtaaaactacccaaatttgaaaaaaaaaattattttggcgaaatgcctttatttcaaagtttgaagatacactggtggaaaaaagtctttactcaagccgatcaaattagaaaaaattaagatttcgactagaaaatttaattgattattttttgtgtttttatttacccctatttatgtgctttttatgcaccacattattttgatccactcattcattctgagcatgagtcgtttgatcactctttactcaaaaaaagggcggaaaaaagtctttactcagaacatgaaaaaccaccttaaaattaatctaaaaacctgaaataattcatgcttgcttatcttttgatactgatcaaaaaagtctcttacatcaacttgatcagatcactctttcatggtgaccaggaatgtcaaaaatggcttgaaattggggaaattttagaaaaaaattcctagggggttaggaaaatttttttggaaattttgaataggctcattggatagagcacaaaattcactacagaattgccttttggatggttaggctacgatttatactcgctgagataggttggggtcaaaattggacacctcaaaaatgattgatttctaccgtatttcaagggaaaatgattaaaaacagatattttttaagatgatcaagcgaagagtacttgcaagtataagtgtgctaggtcagctgcgtttaatcgttcatgccgaagcactcgcataggtaaaagatcgttttggcgtggattcaataaaatgatcgacaatttattggtgaaaaccatcanattcatancccncaacttcatctttnaaannattatanaaataaanaanaaaaanccanccacaaaaaacttttacacttntccntatncacntanctnattttctttctcantcnaaanctttcctaacctttntnacacnattnttaaattttaccccctaattanantcattccattcatctcaccatnctntatatattttttatcacttttnttattntcattttatnatactcttttagaatataattattttcatanatannttcaaaaataanattncctnnctattttcataattntttt

SEQ ID NO: 15392 - DNA, 1104 bp, Heterodera glycines
aacgcccattgtgtgcggtttttttgactaacgcccattgtgtggcggttttttgactaacgcccattgtgtggcggtttttttgactaacgcccattgtgtggcggttttttgactaacgcccattgtgtggcggttttttgactaacgcccattgtgtggcggttttttgactaacgcccattgtgtggcggttttttgactaacgcccattgtgtggcggttttttgactaacgcccattgtgtggcggttttttgactaacgcccattgtgtggcggttttttgactaacgcccattgtgtggcggttttttgactaacgcccattgtgtggcggttttttgactaacgcccattgtgtggcggttttttgactaacgcccattgtgtggcggttttttgactaacgcccattgtgtggcggttttttgactaacgcccattgtgtggcggttttttgactaacgcccattgtgtggcggttttttgactaacgcccattgtgtggcggttttttgactaacgcccattgtgtggcggttttttgactaacgcccattgtgtggcggttttttgactaacgcccattgtgtggcggttttttgactaacgcccattgtgtggcggttttttgactaacgcccattgtgtggcggttttttgactaacgcccattgtgtggcggttttttgactaacgcccattgtgtggcggttttttgactaacgcccattgtgtggcggttttttgactaacgcccattgtgtggcggttttttgactaacgcccattgtgtggcggttttttgactaacgcccattgtgtggcggttttttgactaacgcccattgtgtggcggttttttgactaacgcccattgtgtggcggttttttgactaacgcccattgtgtggcggttttttgactaacgcccattgtgtggcggttttttgactaacgcccattgtgtggcggttttttgactaacgcccattgtgtggcggctttttgactaacgcccattgtgtggcggttttttgactaacgcccattgtgtggcggatttttgactaacgcccattgtgtggcggttttttgacta

SEQ ID NO: 15393 - DNA, 2318 bp, Heterodera glycines
cggagcggcggcggaacgatgagagaaaaaagggcgctcacccggacacatttgcagtgactaattaattaatcattacttatgaagggataaataaccgagaaataaaatataatcaataaatctgagtatttcttcacaaaatggactattgaaaaagaaactctaaattaatcacattctgagaaacgagtgtcggacacaccttctaaaattggccataaaatattatgccatttatatcagaccccgtagctcatcagatcaagtttaggttcaattgagaaatttcaatttttaatttggtaaaataagaatttagtaaaactaatcaaaacactaaaatcgtcaaaaaaaatttaaaaataaaccaatgaatgggacaattcagctgatgagaaatctgagaaaacaaataatattttatatcaaaaatttaggttttaaaaagggcaactaaaggtaggcaaagagaatggttcatgacagctcattaattaatttcaaatatatccaattattttttgattaattaattattttttaaataatctctttttgtgatggctttcgctcattttctgcccgccaaagaagcatttatttaataaatatttttaaaacatccgaaatgccttttccatttgttaattgattcatcatttacgagtatcgcattgcgttcgtatcatttgccacataaattcgcgacttttccgtgcaaaattcgctgtccccggtggaattgttggaagaatatgcataaggataatttctgcgccttttgaccattaacagaagcaactgacaaatgaagaagaaaataaattaacaaaaaaaaaacaaagaaaaataaaaactgaaaaagttacgccatttttagcaattttcaattaattaaaagaaataagtgttaattgatgagtcattaccgcaactgcaagcagaacaatggcggacaatgcgagccaaaaggcggtccaaactctgcgcaattcgccaccaccagatagcaatttgccattgtcacttgtgcccttttcctcatccgctccttccgtgccatcgtcgtccattggcatgccgaccatttggtcgggcaacggtttcgccatgaatgtgccatgggccatcagggcggacatggcaagtcgagagtggttcatgctctcgttccaccgctccgttcttttcccgtcctcctgccatcttctcggcacaaacacactttgccaagtctgctcctcctcctccttttcctcctccgtctctcgcgttgcgttctgttccacaaggggcagttcgtgaagccaaaagtcaagcccagccacgtcctgaagcacagagttattaagcatttactgaaaatgggacgtcaaagtcgggtcaattcccttttcatccgatggatccgcgggacgaaaagggaacggtcaattggcacctccgacggaatgaaatattaagttttgaaaattcgttggtgccaatttcatattgcgttttcgtgctccttaattgcctggtatccgtccactccgtgtggccaatccgtcagagtgccgttgtcgctgacattgaaagtgatgcgaaagtaattgcgtccgttccaattttggggtttccaccctattaaaatgaaattttatcctcttttttttctctttacttgccaatgtcgggcgcttttcctttcacgaagtttttgatcatttgcgggtaataccaatccatcaatcgcaggtcgagtcggtccatcggaatttggtgcaacccaatgaaaaaatacctaaaaagcgttccgtcgccctttccccctgttttctgctcacatatcattggcatgattggagtaattggcaacttcgaactctcccacataacttcgtccggtctgccgcgtgtttaccaatgccgtcaaaaatgcctcggcatgcatcgattcgtaactcacacgcatactttctgtaacaacgaaaaacagttcaatttggcattaatgcctacttttttgcataaatgtgtccttcttatatctatctctctatgaatgcactgaatgccaccgtttctaagagtccaaatgctaagaatggccaccagacactttacgaaaggtcattaaaatgggcaagggacagagctggaaaagtttgccgaaatacgaaaaggccaattctaatctatttgttttttccaatgtggtgacatcaaaaaattcccattttactagcattcagtgcataggtagataaatgctaaaatggcattacgagtagaatcaataataattatgcctaattgattaattaagccac

SEQ ID NO: 15394 - DNA, 1934 bp, Heterodera glycines
aaaaagcgaaaaattttaaatttttgtaagaacttttgtaaaaaaattatttatattaaaatgtaattttgttttagcatataataaaaatttataaatttggaaattcaatatttttacatttgtctaaaaaatgctccttagcttgttatggtgctttaaaagtcaattcttaatttatacacaatttttggcattttttgaaggttaaaagccatttttggcagttttttaaggcatattttagtgcatatttgggcatttttcgggtttttagggcatatttggggaattttcagtgcatattttatgcgcattttggcattttttagtgcatacaacgtataaccctaatttattacataatataattattttgcttttcattttttaagtatttgtttgcttttagtttgatcatttgcacttttcgtacttcgtcaatagcaccgttttgagtcacgtgcaagacactgttttgttgttattcttttaattggttgttaattcatttaatgccttgtaaatttcaattgccacgcacaaaacaaaaaacatttggccacaaaatgacaaattaattaaatgcgcacaggcaaaagtacaaaccataatactaccgtatttattgtaatagagcccccgggggctctattttcaacccccctcaaattgtgtgcgagtaagagtaacggcaagacaaagcgcttatattcaacaaatgcgcaaccatcatttacgaaatgccaaacccaaactaatttgcaacgaaataatgttttagacgcattggcacttttttattttcctttttcttgatatggcacaatccgcccccctcagtgacagcattttcttatctttttgtgcattttactgtcggattgtccaccactgtcggattgtccgggagcctttcagaggagggctctaattcagggtgggtaatttaataaatacggtaattaactcttgaattgttaagcagcatacattgagcaaaaaacaactttgctcgtaaatttacagtaaaaagttatttaaaaatttgcctttatttctttatttttctttgatttacacaaatttttacaaataattttacttcaattacgtatatatattatcattttttgcttcatcaatggtcatttcgctgctttgtctgtgcttttcgtccctttgtgcttttctgtcggcttttcgtcctccaccggtcgccattctccgtcacattccctcttcgcacttggcaccggcaatttagcaagacattcggcaaaacttctaaagaaatattttaaattttgggtaattgacttttatctaagcaaataaaagcgctgaaaatccaacaattaatgtaatttgagtaacgcatcaaaaacatcgcttttctcggccaaataattcttaatctcgtgcattattaatgtcattttaaaaatgtttatttatttactcattttcctgtaatgttttttgaaagaaatttttaatcaatgggttaatttcattttttgtcggtcgattaaaaccccaataaatgctcgtaattgtgacccgtggtgagccgaatgacaaaaatatcaatgttcgtaatagttaaattaattattattttaattttatttgctaaataataagtcatatcttaattatgcttagtctaatttatgaagcttggaattgtgaccctaacttttttgagactcaatagaattttttgaaattttaactgaataatagagaaatctttgggtatgacactattaattccttcataactttttcagaaacaagcaattttaattttgtttatataattagatagcccacagatttctattattcagcccaattttcagaaattttttattgaatttcaataaaatagggacaaaattgttgagtctaaaatttttgggaaggtt

SEQ ID NO: 15395 - DNA, 1295 bp, Heterodera glycines
tcatcctcatcaattttgccaatgttcctttattcccggaattaacttactaagtgaccggaatttataccccaattggcaaatgtcggcaacagaattcgagaatcatctgacaccaaatctgagcggtctttatgccaaaattgacgctttatctgcccaagttcaacgactgggtctggcaatggctacgcttccgaatggaaggtctgtcatcacttttggtcgactgtctgtggaggccgtgcccgggcattttagagcttactatgtttaaattcgaatagcaattccattgaaaacgccaattaatcgaaaatcattttctgtctgtaaataaaattaaaatcataattaaatttaaatattacgaacattgatacttttgtcacttcgtcctagcatcattgtgaccacctgtcacagctgcacaattgcatcgcgcaaatgtcaaattcttcatcccaaacacattgcggcacgcctttgacagtttcctccgattggtccttcttctttctgtgcttttccgaggaatgcttcttcaaagttactaaacatttaaaaaccaattagtccgttaattgataggcaattataatcattattaaacagaataatgactttggtgtcgggatttgtcgaggcatttgaatttgtaagttggcccaaaatatttttggaaccatgaacatgtcgaactcgcccagcatttgtcgtgcgtttcacagcatctgatttgggagtggaaatggacgtcaattggacgatacagagttatttttttcaaaaaaaaatattttgaaaaatttaaactgatttaaaaattccaaaacttgtcaatttcgtcaacggtttcacccgacccgccgacaccgcacctaaaaaacattagaaagatgatgatgatattataattaatagttgaaattaaaataattttaactttttttaaggtttaagaaggtcacaattattaattgatattacaattaaggctctattgcactctttatgagtccaaccaattaaccaaacctggtttttaatcattcgaaagcacaaagtctaaagaactaaaatatataaaatctctgcgtttaggcaattaccaaaatttgattaattaattaattaattgttgattattttcgtctgtaactttctttaaatgttagcattcccttactttctctcgtattattaccttatttcagactttgtgctttctaatgattccaaaaacatagggtttttgttcgaatatgaacaaaattattgtataaaaacccagt

SEQ ID NO: 15396 - DNA, 1252 bp, Heterodera glycines
tgagtcaaagactcgagactctcgacaagcgctaatgtgatttttaattaagaaaagcaaccacgtcattgtgacaatatgttctgcaatatgtcttgaccttttccccgcattgatcagcttcgctttctacattgtaagccaattatttacaatatatccaaataccaaaattggaatttaaaatattttaaaatattatattaaattatgaagatgcaaaaattatgtttaagctgggcttcggcttaatctcaaatttggcatccacctgcacagtgttggactcgctttgctgtgccatttatttcacgctggcgtttgtgccgcccggctggcttaaaaggaatgcaaatgccactgccattggtggcaccacaaatgctcaacttagagaaccaaatcaacagcagcagaatcggactcatcgaatcccttctttcaacaacacagtagggccgggaacaaatcagccgaaccgatactgtaacggaatggtaccagttgttacggtaggagcaagaatttgaagaagagagtctcagcagatgagtaattgatcattcttcgaaaaaaattaattattttcttttgcaatttttcggaaaaagaacaaaaacttaccttttcaaaaaaattaaacaattcatttatgtttattaattaaaaattctattgttttccttttagaatcattttacactataaaaactattaattaaaattttattagttaaatccaaatgaacacttaaattatttcaacttgttgggtaagcaatttttaaaacataccgaataatttcattgtaacacgccaatggggtaaaaaaataaataaaattaaaaaaaaaagattgcttaacgaaaacaatttaattatgtatctatttatatcctttagtcactactattcgcttaatgagttttttcgttatgaaaattgaaaatggaattgtccaattgaatattccgaattgccattttgccgtatttagtgtattcaaaaaaagagaacgaattaattgaggaaaaagcgttaaaaatgataaatattttttgaaatttggtcaataataattattattttttggtataaaaacttttttgatacattcatacgatggatttttaacattttaacgccaagaaatttttagaatttaaaattttgaagaaaaaaaaaattattatttaatgaaattcaaaattttatttttcttcgggatacaattccaaaagatccttttgg

SEQ ID NO: 15397 - DNA, 1179 bp, Heterodera glycines
tggggatcaggaaataactagaaaaactgtgctgggtgtcgggagtctcaaaaggcagttgagatgaatggcgccgcaataagaccggaagtttttggagggggccaatgccctcatgtagatacatggcttcgatgacctaaataaattattatttcactgaagtgaaataatgaaaaattatcagatttaaggcctaagcctaaatattaacaccagacggggatatgcaatgtggataattaattttaaatgttataagtagagaagggaaaaaagggcagcaaaaacaggaaaaaaggcactataataggcaccaaaaattgcaaaaaaatgcgtgaaaataggcattcaaaaatgtttattaatgacctttagggagcaaaacaagtaaaactcaataaaaaaaaacttattttggtcatttgaatgattattaaataaaaattttataatttattcgaataaggaaatttttaaaaatagaatttttatcgagaaaaagaataaaaaaggtattaaaggcacgaaaacccaataagccaaaataaggcataaaaaactaaaccaagaaacttcaaacaaagtggaaatgtattatttatgctaaatatgtcgaaaccaatgcgaaaatcagaatcaaataacataattagcagaaaatacatcttattaaatagaaaatcaatttaaaaaatcaaataatataaaaataaactactgaatttaaataaataatttatcatttaccaaaactgagtacggctttcgtcaatattctaaattcttcctgccgacaattaaacggtaaaaaattacacttgtcctcaacaagcgccttacgccccaaatgtatcaaataaggaaaatttttaaactataaatttttatcgagaaaaggaattaaaaaggcatcaaaaccgaaaaatggcagaaaaagcacgaaaacctaaaaaggcaaaataaagcataataaaactcaacctagaagcttcaaaaaagtggaaaatgtgttatttatgctaaatatatcggaactagtgcccaaaaaaacagaatcaaatagcataattaggataaaaatcgtcttattaaagataaaaactatttttttttaaatcaaataatataaaaataaaatctgaatttaatcgacaatttatcatttaccaaaactga

SEQ ID NO: 15398 - DNA, 2538 bp, Heterodera glycines
  unsure (1)..(2538): unsure at all n locations
agagttaatgtgaagaggacaggataaagagagagacagagagaaagaggaggaaagcggatggccaacccgctcgttcatatctatcggttataatagatttaaatgggccgccaaaacacagccgtcgaaacacagatgaccgaagcacagccggcagaaacacagccgctatatatttataccgaataaaaatagttccctaatacagtacacattgagatacagtaagccacttttaatataaaattattgtatctgtctgagctcttcattttcgtttgaatttgtttttattgttctttatctaattgattccacagtttagttgcccttcccgcaaagggaatatatttttgcctaatttatattttgtgttacctctttatgaggtggagttaaagcgattagaaggcttaaaactttaaataaatcgaagtctgttgtcgaagattttgagtaaatttttttcaaaattgcacaaactaacgaatggatgcaaagaatcatcagcaaaacgtggagcaacaaaaagtcattaaatgaatctatgtggaaataaaagggattttcgaaaattgaaacataaaaatcccttaaataaaataggcaattaataaattacattttaaaattcatttaattgtttatttgtttatttaccaacccaaacgaagttcattttttgtgaaatgatctgcgagtggcgaattgacgccaattcctacggtatcaccaacaccgttagaatgttcggcatttattccctttctttgtttattaatccaaatttcgccatcattttcatatgcataagtgccaatattttcaattatccaatccaattttatatgctgtttgaaggcgaatccgaagaagacccaactgaaaaattaataataaaggattaagtattaataattataataataatttaattttctgataatttggtctcaaaaataaagtttcttacccttttttattttttaccgaaatttcatagtaaaaaatgttggacgaattattatccagcaaaatcggatgttttgcaaagacggaagaccaatcttttgaggaaaaaaaatgattaataacaaatttcgaaaataccataatcctttcccttgtgatggacagtccaacttttgtcgtcaatgatttcgagattcttatgacaaacattggcatcccaataattttgtcggaaaaaaaatcctttaatcattttgcacttttcagaattgttccgaagttgctgaaattaatttttaaaattaaaaatggaaaatttaattaaattaaaatattcttaactcatgtaattaatttcttctacaaaaataatttaaaagaaataatttattcttcgcttaaaacttcctcgcctttgggcatgttttcgtgttgcttctccaattcagtgattttttccataatttttgaaaattgatccgcagaagcttaaaaattanatcaattattanatttacaaattttatttttgttttaatttctcgccgccttttgactgttcttctcgctgcttctccaattctctggtttttccaaaatttttgacaattgatccgcagtggcttaaaaattaaatcaataaattaacatattttattttcgtttaaatttctcctcgcctttgatcgtattttcgtgctgctgcttttccaattcactgattttttccaaaattttcttctgatcattgtgcaattgtgagaaacattcagctgaaaatatacccaattatttatttgcttaatattgacaacaaaaaaatgccgtaaatgctccgttgtattttaaatagagatcgatattttgaaaaaggaatggacatggattctgtgttagaactgggcctggattttcttaattaaagacccaggaaaatccaggtccatgaaaaatccaggccctatatccaggtccatgccgttctctaatctattgttcagcccccctcaaaaaggggccttgattttaggagggctctaactcagagggtgaataaaatgtaaagtttgaaaatgtgtaaaaatatgaaataagaaattattttaaaaaaattcaaaatccgtaaaggcatatttcttcgaccaaaaagtcctcgcaaaaacgcgatgacatggcgaacaaatccaatgcggcgagttagacctaaaaacgaaaacaatatgggataaaaatttgaaacactataaacccgaatcaacggatgggaccgcttcttcagtgtcttcgtcgccgtcgtcggacgctgcgtcgtcaaaatttaatcaaaaaataatcatcttcaaaacgtcactcaattcacaaacacacattgcgatgcttaattgtcatttaataaaatgctgttaaactgaccctcaatgttcagtgtcggctccaattcgcctctccaccgtcatttttgatgttgcacgtgtacgccccgctgtccttagcctaaattttaaagtcattttatgtcaaaaatggcgtttttgaaccgctttagtcgacattggcggctta

SEQ ID NO: 15399 - DNA, 1758 bp, Heterodera glycines
  unsure (1)..(1758): unsure at all n locations
aaaatgcccgaaatatgnatntaaagttccaaaatggccaaatatgggctaaaaatgctcgaaatatggattaaaagttcaaatatggcctaagattgcccgaaatatggattaaaagttcaaaaaatatggatttttagggactaaaaatcttcagcaaattaaaaatttgtaaagtagatatgctatttttaagaactgttttactgttccttaaagtagtttaaactaactttttcgaatttaaatggacatttaatgaattaaattattttcaactcataaataatttctttaataattaatttattattcgcttaaaacttcctcgcccttggtcgtagtttcgtgttgctgtttctccaattcagttttttcctcaaattccttctgctcgcccatcagttcctgctgctgttttaacttttgttctttttccaaattttatggcaaaactcctcacattttcgagttccaatttggccattttcaattccatttccattttggcaatcttttcacgaaattcctgaatttaaattacaacaaaagtacttttgttccattaaattcaaatatttctccaaattgtttcaacttttccttcccctcaccttaagctgttgtcgatcagtgatcaatttgctgtttttcccatcgaattgaccatcgttgtccaaactaattgcatcgccattcacttctgaaaatataaaccgaatttactgaattagagcccccccccccctgaattatagccaccctctgagttagtgtcctcctaaaatcaaggcccctttttgaggggggctgaacaatagcgcccctgggggctctaattcaataaatacagtaattaaatgttgaattttatttatttaatttcacattctaaatttcaatttttctacaattttcccttttctaaacatttaccctcattttctgctggcgtcaaatcatctccatcatttattgaattgttcgaaattgacattttggagttttagtaactcttaaataaacttaatcgggaaaatttttctggggttattttcggatgctgagcacgaatccggccttattttggacctactttttccaaaaaataaaattttttattgttctaataataagcgtgaattaatgtgatttgctacaagcaatcattttatcacgcattcacggggtaattaaatatagctaataaataaataaacataaataattcaaaaagtaaataatattttattcattattattttttttgcaattggataaataagtaatttttttttgtgaaaagcactttttgtgatgcatttgttgatggatcagagacatcaatttaacaaatgacttggaactatttccatttaatccattcgtttgtctttgattattcattttgctcactaataaatttattttcagaaaattcgtacattttttgccatcctattttataataaaagaaatttccgaaaaatttaaaaagttgtgaccaaaggtgttgaaaaaaattaccactctttttgaacaataaaattatctgaaaattttcattttaataaaatatacaaaaattaccgtgtgataccaagcttatttattttattgcgtttttgaacagtccaggaagagttttttatgaaaaaactgtaaaattggcagtttggcgaacgcccagcaccaatttgaaacatttaaaatttcccagtgacgtctattgcagggctgcacgcaattacggattac

SEQ ID NO: 15400 - DNA, 1641 bp, Heterodera glycines
gacgaatggactttctgcaggtcgccctgcgtcactccccaagccgccctctctgtaaacgaacacttccgatttaacctacgacacttcaaattccctccgccaccttcaccggcatttatccaccagcagcaacaaaagaaagagccaaaaacgccaaagggacaaatgcttttcggagagactcatttgtatataaagctgtacggaaagccaaattatagcgaggtgaaattgaacacatttcggggtatgcaaatgacaatttgatgtcaggattctttttgcggttttgtgcatattccacttgaaacagagacaatgaagccgagagagacgccccacggacccaattggtctgttgtatcgtttgttcaaatattaataaaacataaaacaaaataaggttctttcacaatgagaaataattggaggaagggaaaagggacaacagcagagggaagaaaggggagaagaggaggaaactctttccacccatttccgccggaaatttgccttcagcggggattggaaggaaaaaaggaggaggagaaaaggggcggaggagagttagagggggaggggcagcagcagaagggggaagtgggaggggggggggaaggagggaagggaaaaggtagggaatgcgatggtaaaggaggcctagagggccatgaagatgaatttctgggaaaatttttaatttcttaggagtgtattttttttaatttttgggacgatttttaggagggtaatttttctgaaattttttaagtagattcttaggggtgtattttttggttttattgcatttttgttgagaaattttccaaaaaatgtcgaaatagtgaaaaaaatagtgacaaaacgcacgccaaaataatgaattttcactattttagtgacgaagctccaatggtgacatgaagtttgggcaccagagtaagggatttcaaaaaaataatacaaaataaatatgtaaaatgctaaataaatcgttaaaatctagtaaattttaagaacccttgtgcttaaaaatttatattttcttgctcactgtcatccctacgcatagagtgctcatttaaagcctaataaatttgtaaaaatttcccatttagcaaaatcactttttataattgcaccgcccgtcacaaaaaagaaaaagttttcctccgacaatcgccgactcatttcttctaccgcttggacatcatcatgaacaacaattgatgggttcacttatgacatcgtttggaaaacgtggaagtgttcgcttggccacgaaaatgaataaacgaattgaggccgaattttgtgttaaaaattttaagacaaacgctaatttttcccccggattttagctgggtctgctttgatgtttggatggacattttgccctgttttgatcgtcctcaactcgtccttaaattggcactgatttcgccgcgtttcaatgcgttggtggacaaacatttcgatggcaaaaacaaattgacactttggagttgtgtctgtattcgcaagggcgttggactaaaaccaaatgtatttgtggctattgatggcaaatgtgtgccgtttccattggccgaccatccgctgcgcaagaacattcgctttaaacgctttattatttct

SEQ ID NO: 15401 - DNA, 1699 bp, Heterodera glycines
  unsure (1)..(1699): unsure at all n locations
atattctgatgagtggtttttgatgtcaaatcgaaacgctggtgaattacgtcgaattagggaatgctaattgggtaattagttaatagcgcacatttccatggtcaaaccagcgcatttacaatcatgtgaatgagtttaaatatgaagacattcacaatgagaaatgcactagtccaaacaaaggagaagcagaagctaattaaattttaattatattttagaataaaaaagggtaaataattaaaataaataggggagcaaaatagaatttagtgctaataaatgtgattttcgtgtttctttcatcaagtactatccgtaaaaaataggaaaaatcaaaaaaaatcagggctctctctattcatatacaaaaaatattcaccaattcccttttcatgactataaaaatcttttgttttccgctttgactctcattaaaaaaataaagtttccaacgaattattattctgctcttttgtgtgacatcattcgaaactcggccaaattgtgctaattgctgccaaaaatgaaccgacggtaagcgggtattttttacaattgttttagaattttctaccagaatgagtggtagaaggatattttttacctttttttttgcaaaaacatttactttttttgttcattgtttaatttatttctaagcaaaagttttttatttattgaaataatgatcttaattaaaaaataattggaaaaaaatattaataataatatgaattatatacataatattattataatatataaattttttaataaataaaaatgttcataaaaaatgtaatataactcttatactttttatttacaaattatattttaaaaataattaactactcatattctggcgacttaatttagttaaaaaaaaatttttaaattaaaaattttttaattcataaacactacaaagacttttagataaacaaaaaaataataataataatttcgaatagtaataaaattaagattatatatttatttattttttctcaaatcattaatgttcaggacagttacagtaattataaatggtgatccataaagattaatattttttgttgataaactttgttccactttaataaattggttaaagactgcttctgcaatatttgaattaattggtcttattggtacaatgatatcaccttgctctaacatttctgatgaaattataactccagctttgtctgctccacccaatttccttttagcgtcagcaatggcttcatcaattgatgtctttatacaattttctaattctattgttgggtttgggcatttctctatattttccactacaaactttgattttgaccgcaataatcgaaacttcttactattagttgtatattcttcgatttttttaatgcatggtttaattccttcatggtgatcaaagtttttagaaattcggggttttttcgtttttgtatttgacgaatttctttttgagcgcttcattttaaattagttcagttttttgaccagaaaaaagcttctttaaatactttttttctgctcccaatttaaaaccaacaatttatcagtcatatttacaatttataaattcatttagaaataaaaaataaggacatttcaaaataattgaaaatataatgaatgctcatgggggacgngtaaccatattcacgaacatgataagaactat

SEQ ID NO: 15402 - DNA, 974 bp, Heterodera glycines
  unsure (1)..(974): unsure at all n locations
aattttcacttatttattttgtacaacttttcttctctttcttcccaatttcctctcccatcctaaccaaactttactgtaaacccaagccaagccaatttgtgtccatcccagctcactctcgactccaccccttttctcttttgctatttaaactgaattcattccttgcattattaccctttttttctactcactttgactcattcccattttacttacctttctcacttttgctaaataaactttcattaacaaacttaaagtcttgcttttgattgggaaataagtcgggaacacaacatcttttggtgccacgacccgggaccaaaaaaaagttcccttttcccaaatttctgagcaaggccgagtgccgaattgctgtcgagggttggtcgaagctgtgtgctcccaaccgaagagactaattgcggagggctagtcgaagctgtgtgctcctagctgatcaaacggataattatttgagttagtcgatctgtgtgatcctaaccgggctgtgtgccaatttcaaaaaaaaaagtggaaaaacagtaaaatgtcaggcgagggatctgacttcaacccagcttttttcacggtggaggaaaatgctcaataccaaaccattctcgagcgtttgcgttcttttgaagctgcagtttgcagccaatttcgaaagcttgaaagttctctgaatggaagtgaacgagccacaaaggaccaattgagccgtctcgagtcatcgctacaaaatttggacgagaatgaagagatggatgaattcgagactaaggagaaaattttcaaattggaagagaaactggaggagacacataacaaattcgaagttcttanagctaatgtgtctgaaaacttaaaggaatgttttgagaaattgatactcaggtaaaggaattgaaatgttttagtgacttgataaatgagaaaattgagtcggtggagaaggaaatgaa

SEQ ID NO: 15403 - DNA, 2629 bp, Heterodera glycines
tggcgacgcccgtgcagacttttgactgtgggcttattgatctgattgtggaggaagaggtttgacagcaaccgagttttgctgtgtcatcgctgaagactgcctgcatttgctattatctaggcgataataacaactttttgttggacctgctaacagtttaacactgttagtagtgagaaattttgcgccgctgatattgtgttttggcaacataatttcagttcgtccacgcgcacccactctgataatatcttggcgctattatcaatagagtggtgaacgacaaaaataaaaatggcaaatccgacggttcagcaattgatggacatggttaagcaactgcttgaagcacaacaaaatgcgccgcaagcaggccagcaaccctccaatgtgccgtctctaccgaatgtggaaaacttcgaattcggagagcaaagcaccgacatcgaggactggctgcagcaattcgactttgctcttgactgtgccgcaccaaatttgcaggatgtgctgaaggtgaagcttctcatgacgaagctcagcaaggaagcgtttgccgaatacaaaaagtcctgcatgccgaaaaatgtgacagacttcgacttcgcgaagactgtggagcagctgaagagtttgtttgccaggcctcagtccatttggattgacagatatgactgcctgcgtgcatccaaactggaagacaaggaattcagagcatttgtgaaccgacacaaaaggctgttaagggatttcaactcaagaagctgaaagaggagcagtttaactgcctgatgcttttgattgcaatgaaatcgccgaaggacgcggatcttcgaaagcgaattttagcaaagttggcagcagatggtgacctcgttcggtacgacaacatggtggaagacctgcaagtgtacctgtcgaccattgccgaggctaaagcgcttgagcagccgatgtcttcgaaaaatgtttttgctttgaaaaagaagcataaaacgcgaaagaattccgaatcgtcgaaagggagcagcgaatcgtcagcaagccagaagagccaccgatcgcaaccgaagtgttggcgttgcggaaaatggcactctcccaagcgttgttcgcatggcaagtccacctgcagaaagtgcaatgtgtcgggaccaaacagaggcaaattcggcccggcaaaaattttggcaaaatagaaattgggacaaacagtagacaagcaggggaatgatgttttattccgactgaaccgatttcaataacaattccacgacttaaatagggtgtcattcgctgattaatacatttttgtgtgagaaatgaataagaattgaatgtaaacaaacaaatattttttgaatagaacgacgaagagggggaacatttctaattaaattaaggtttttcccatttttaatgaaattgcatcatgcttataaaatttatcatttccattttatttctcgtgacgtgagtcgcgacactccccacagcaaagttgtcggggggttcagttgctgcaagtctgcctgtatgttgttgttttatttattatgcctcattccgggttgtctgtgctgagaaaggcgggcggttgattttggttaatcgtaaaatctgtgaggtgatcagttgaccaggctgatcccttgttgcttgtgaagatccgctccgcggcggtggacagcgatcagttgaccagactgacttctccgtcctgtcgcccttgtaccagcgtctgccacccgctgatcacaagcattcatcagtgcagaggttcccggccgttgcaccacttgtcgggaccaaacagaggcaaattcggcccggcaaaaaattttggcaaaatagaaattgggacaaacagtagacaagcaggggaatgatgttttattccgactgaaccgatttcaataacaattccacgacttaaatagcgaagagggggaacatttccaattaaattaaggttttcccatttttaatgaaattgcatcatgctttaaaatttatcttttccattttatttctcgtgacgtgagtcgcgacaaccatctccttctttctctttaacccactaccccccccctctctcaatctcctgttctctctctcctcaaacattctctctctcttctctcacctcctctctttctctccttttctctttattcctctctctctctccctactcatctcttctctctctcactatctctctcctcactcccttctctctcactttttattcctttctttctaacttctccgctatctcttcctctctctctctctctccttctcactttcctctctctcactcctcactctctctctctcctcagttccgtctatctctctctctcctctctcctctctaccctctcccatttttctatctttctctctctctctcttcctcccgatatctatttctctctcttctctctctctttgttccttttcctctctctctctctccccctctctctttcttcacatctctctctctcttctcaaattcgctctttcttcctttctctttctctttctctctttctctcctccccctctctttctctcctctctcccttctctctctctctctctctttctctctccc

SEQ ID NO: 15404 - DNA, 4314 bp, Heterodera glycines
  unsure (1)..(4314): unsure at all n locations
aacaaaaaatggcagaaaggttaaaaatttatatcatcctttataatttttaaattttctataaaaaaatattttgttcatttggttagatgaaaaaaaaaatttttttttgtccaaatttttttttcgcacttcttatttaactaactaattctgattttcataaattctcgaaaaatgttaatgaaatttctcgttaatattagtaaattaaattttcatgtgtttaatttggggtaaaatatgctaaataatggtaaattcgttttttcttttcatatttttctctaaaattaataatttcatattttattataaattttttttcccgccttcccacccccctcttgcaaaaaatgaaaatttctgggtttttaattaggtgtccataatttaagccgttttaacattgttcacaggaaaaccgggctctgccaccattgaagcaatgctaattgacttcaaattgacggaaacgagtttgaccacgccgctgcccggtgttcagctgcattggatccatttcaaccatgccgtgatgctgggcaaatacaatttggccatgtccttcgtcacttgcattattatgctgttcaccattgtcagcttcctttattggtggtacgcactgatgttgtccgtccgcatggccagcaattacggcgaattcctcggatgggccacagtttcaatggcactcgttttttacatccttttctttatggcattcgtattattgtagggcctcgcgctttcgggacgagaaaatgtcggagccatgcttttttcggggtcagctattatcagggttgggctagattaaaccagcaagggtgggggttcgagtttggcctaggagggccgggggggggggttactcagggctggttttttttttgatttcacaccgctttttgggatgagccttaaatattttatatgaaattttctaaaagatttcgcactaaaaatgatcaattttagaatttttggctaagataatggaaatccagcacttgaacaacattttttctcttttcctcataaaaatgcacattctttggcgtgtatgtcggtgtcgggagccctaccctaattgatcgtgtattaaattagactaagcactttgatggactaattggcaatgctgtccttgttaccacacctttttgaatgttttttaatttttcagtcaaaaataagagtttttctagagttgagcacgaatctagcacctcattttggccttccggattttggcccctgattcgaaccaaaagccgaaaacccaatttttactaattcgtttttatggaacctgaaccggttaaactgagtgaaataaacaaaaagtcatccaatctgcaaaaagtgcgaaattctaaattttttatttagttttttggttaggttccaattctgggttcggaatcaggtggaataagtgtcaattcatgctaaataaccatgaaaaccctaaacacattttttatattaagaaattaaatcgaaaaaaatcaacaggcttatctatattaattcagcttttttccctgtgattaggtatttgggagcgaattctgaggcataaaatttctttttggaaaggttaaactaaagttttcagaattcgatctatatttaagatcatttgttaccaatttgttctttttcctaaacttttttttcccatttataaacattttttaatcattttattttggcatttctttttccttttttaattactgttttctcattcgataaatgagcttttatggaagaaaatgttttgtctaccaacatttggggttaggtccctaaaaatagcaaaatatttaaatgcgtgtttcgtcttgattgatttaatcagtggtcacacttggcgaagataaaaaattcgattcaaattttacaaattattaggagaaccgaggccgaacgggaattcttttcaagaaaaatcaaaaaatatgtgcatttttcgagtgaaatattcaatttttacaaattattaggagaactgaggccgaacgggaattcttttcaagaaaaatcaaaaaatatgtgcatttttcgagtgaaatattcaattaatcttttgtcattaaataaatcgtttactccggtgttgacatttaagcatgaaaaattaaaaaatatttattaactcctatgcaaccaactgtaagaactccagcaggttatgtgtaaatgtcagaccctgaagattaattgataatcaccatgcaatttgcatttggcgaaattttttttttataaaatcagctgtttttatgttatttgcaaatcttgcttgtcactttttatgtattgaataagcttacctactatttttctacgaattaactaaagaatgcttaaaagacaatattcaaaaattagctgacaaattttcgggttgaaatttacttttcttttaattttgtatttgaaattttacaaccatgatcgattttatttttgaaatgttgatgagaaaaggtgaaaatgatgagaattggatatgtaacaaatcccaaaatcggaatagttttttatgaataagaaacggtccaatcgaatcatttcaatgccattgttcgccatggcattcagcgaatgaaacagtaccaaatggcatggatgacggcagggatccacaacaaaatgctgaattaaataaaaacaaattaaaaaataataatatattttaaaaaattttttatttgtgtaccaaagaacgaccgaaatcagcacttgttggttgcactcgcccgacttcagcagaatggcaatgggctgaattaatggattaatatgctagtaaatggaaagcaacaaggcacttttacagacaaaaatatgttattgtgggcagaggcccgtacaaaactttcgggaaagggcacccgaagacccaaaaatattttccagcgtactttttcctatattttgctgcgtgggaaaaacatgggaaatttttttagccattttcgtcaaattttggccacttcgagacaaaattttggaaaaaaaaaaaggaagaaaattgatacccgtggaaaatttataaaatttggtcacatttgttaagaaaattagacaaattttaaaaaatttacctattttttctttaaaaattttaattttcatttcgtggcgggggcaactgccgcccccctccgattactggcctgattgtggctaatttgctaattaatttttcggaaaaaatatttggcataactttgctcaaagcaaccgttttaattgttgatacaatttaaaaaaacgaagaccgttacaaaaaaaaaacaaatagcaagggcaaaatattgaaaacacaaagctaccaaaagataaagcgtaatttttcaaatattttacagatgctaatggaattgaatccggacccctaaaaaaatatctcagatttaaccaacggagacgcaatttattcacgcggtttaatgttaatatttcgtcccttaatcgtaaaattgccaaataattatatagttcaattggaataccggcacgaagaagcaacagatcaactccaaaattgccaaaaccatatcaccaagctccatcgtttatgtgtgtatattgaacaaattaatttgtaataaaaatgttaatttaaaatttataataatttaaaatgaaaataaaataaacatggaaaaatgagaaagaaaagcgcgaagagaatcgatgaaaagaaattaagtgaatgcctaatacatagcagaaaatgtggaaattgtgcagggcaaaacaggcggttgggggagattaaacatataattatcgatcattatttgcgtatgtttacgcttttcccaattttacgaccaccactcaccaaatggacgagagagagaaatgaaatgcaattggggggggacgaattttgtggaacaaacaaacaaacaatggaagaaaacggagcaaacgcacacagaagggaaccgcccacttcggcgccggccttttcggcgccgttgctaacaacttttttcctgatcaaccaaattaaaaatttttgttatcattcgatagctcttcagattctctattagcctgtaaaatttcaaaaaatttcgtcagtttacaaaaaagttatggccaaaaacctcaaaaattaactttttcttggctttttcggcgccgcgtggcataacttttttatttttgaatcattcatttctatttttacatgtaaatatagagcacacatagagctttcaatgatgccagattggctanagctaactgacaaaataaaaaagtatagcatttcaaaat

SEQ ID NO: 15405 - DNA, 1795 bp, Heterodera glycines
tttgatagaaaaagcatcagagtgcctaaactaacatgttaataaaatttggtgcgtttcagaaccctttctgaaaaaatatttaagaattaattttgcaaaaaataaataaaaacgaaagactcagattttcgaaaatttttttgagccagctagctcggcgctcatttcagtgtaagttagtcctttaccggggagtatccctgcaaagtttggtacgcttctgctcaattagcaaaaaatatgagtgatcgaattttcactaaaaaagttaagcctacattttttggcatatttaaaaagcaattaaaaaatttttaaaatttaataattttcctgcaccgaaggtactcactcggcctcttcgcggcctcgtgggggccttcgccgccggagagagagaaaagagagatataagagagagaaagaaaaaagagagagagtgagagagagagagataagagagagagtgagagagagaaagaaaaagagagagagagaaagaaaaaagaaagagagtgagagagagagagagataagagagagagtgatagagagaaagaaaagaaagatagtgagagagacagaagagatagagagagaatgaatgttagcttttttattcaattattttttaaattataaaaaaatttttttaatttatttattttaatttataatttattttattttaatttaatttattttttattaatcaataaaaactcttcaataggtttaggttcactcccggacccatccaataggttttggtttaaaccaataggttttagttttgggattgtttatttattttgatttttattatttatttatttttaatttaatttaattatttaaatttattattaatcaataaaaacccttcaataggtttaggttcactcccgcacccatccaataggctttggtttaaaccaataggctttggtttggaacggtggttttccaaccccgaaaaagggggctagttactactggagaagaaaggcattgccatggacaagcaaaagttgaaacacggggaaatagaactgataaacgaattgacaatgtccgattacgaaatcagaaaattttcaatattgagtctgattataatttggtaattcttctctctcgacaattgtaatttgtcttttttgaaaaatttatgattttccatgtttggtatttgtctaaaaaacgaatttttttgactcttgaggctaaaataatagatagaggtcaatagggcttatatttatagttgctaaaaatgccaaaatgtttatgttctaaaaatcccaaaaattgctaaaaatgggaaaataattactaaaagtttcaaatttagtggtaataaatgacaaaatttattcaaaaaattaaaaaattttggccaaatcagtattgagctaaaaaaattttcaagccaaaaattcttgaattttccaaaaataaatcccgaaaatcataaattacaagtttggtggctcctaggttggccttgagactttgacttatttcgggctagataaggcggaattttcaattttaaaataaggaaattaagcttattgttgattttggaaattctttcacgcttttttaaatgtttttgcaagaaattcttaaaattaatcctttttctttttaattccaaaaagtctcttgaaatttttcatctgttcgcctttatttttttctttttaaattttgtttgtttttctttctgctgttggccccaatcacagataaattatcgcattttcccaacaaaatttttatagaa

SEQ ID NO: 15406 - DNA, 1530 bp, Heterodera glycines
  unsure (1)..(1530): unsure at all n locations
cccctcccccctttaaagctgaatttgtataccaacctagtttttggtatcctttatttgatgatgaaaaccaattcttcattccatcagcttcatctaaaagaatgacggccaataaaaaaaaaaaacatggaaagaaagcgacgagaatttgcgcatttgctttgatgtttggatgggaatgaagcctaaatacaaaatttttaacaatagttaaaaacaattatttttttaagaatccgacaaggccggaaagatttttaaaattaaatcagggggctcgctccgccattggacaagctcgatttcaaaggaaataaggtgaaaataatattttgcggtgcgctttttacaaaaaaaaaaacatgggaaaaaaaagaggtccggcagtgcagataggctccgccttgaaaattttttgaatttttatagggatttgttaatatatttttttcaaatttccaagagcagatgaccagcaggtccatggacttcctttgaacccaagacaagcagttggtaaccctggatgaaaggnttctcgtggttttcaagctagcttattatgaaaattcataactgcatcaaatccttttacatgtagggctatcgactgatataatgaaaattttgttgctttggagcttcaatgtttggaaaacaatttctcggcctttagacgctagagaagcgccatttaaaaaagtgaaagtgttttcaaagaggattttttcaaaaattttaaaattttaatgcgttttcccaaaaaattttgagaagtccccaaatttatgcatttgattttgtaaaaatgtacggatgggaatgaaagaatgaaacctaaattcaaaatttttttattttatttctaacctaaaaattttaaagttatggtcaaaaatgtttgaggtttcttgagtacatttgaccataattctgttcaaacttaacgaaattttttgaaattttgcagacttgaagaaaacacatagggccatcgaatgccttcaagaattaaaaatgtagttgcttttgggcaaagttatgggtaattttgttggaaattttaatttgatgcttttttataactttctttttgctggcttttttaaaacgacatagcaccctttttacgctagagaagcgccattttaattatggagtttagccctatggctacgaaaaatgtttcctaaaatttaatttaaattcaatacagttaaatatggaataaggaatattttttgtgaggaatgcattatttcaaacttttcagtgcgcttttatgccgtgatttttaattgcacatgcagacaggcatttgccatgtaccctttattgaattattgtacacattattttaaatagtgaagccattcagcctagagaaaaaaaggaaaaacgtaaatttgaatacaatgcttaggcaagaaggtggcacctacccactcagcatttgcgctgtctcatgacttacaccaaattattaaaagatgtccaccccattaaaaaggtcatttatattaatgt

SEQ ID NO: 15407 - DNA, 4467 bp, Heterodera glycines
  unsure (1)..(4467): unsure at all n locations
ttattgctccaccgagggcaccgattgtcgcgctcgttaaaatatgcgcactctttagagtttttagtgttttggcggcttggtaaagggtagcaattgggtggcaattgctcacaacaaataaattggtcagaaaaaggatttttgacaataatttcatttttaattaattaattaatttggttacacagtgtttttatactgaaaatcagtactaattgcgttgttaaattgcccaaggctctttaaaaaggaaaaatatttttgtagactagcgggaaaccacatcgataattggggccaataaaaaataacacaaaaaaaacggtcagaatcgatgtaaaaatgttagaaatgtttcggaaaaatagaattgggggcgcgcttgccctttttcaggttgaaaagtgccggaattgaagtgccaaactcatctgggactcaattaaccgcactataaaacattcaaaatacattttgaataaattttctagggaattttgtggcgctgatcacgaataagaaatgtatttttcaaaatttcgaatcccgaacccggttctcttgactaaaaatttgacgcaactacaaatttaaaaaacattcgtcagactttttcctctgccctccgtctcgctattaacaatgataatgtataacttagcaaaaagcttccgttagattaaaaaattgtgacaaaaattaaaatattttttaaaatttgaaagtgtataaaaactatatatgaaattgaaagtttttagcatgaaattatatgaaattaacatatttgaacaaagaaataaaaactaattttacaaaatanagaaaatattattgaaaccaaaaaaaattttttaaaaagcttaaactttaagcaaatatcattgaccatattaaagtttatatttattaattaatgaattcagtgttttccaagtagcgcgcgcattagctaaaataacaaaattaactataaataagtaaaataaggtttttaaaaatcaaaaaatagacaaaatacatcgagagcttaaattaatcagcatttaaatttaaaatattatccataagagaatttataaataaaaatgaattaatgaaatgctttatagttttataatttttactgctaataattcatttttacaacgaacattcattaatgaaaaacctataaatttctataaataaataaataaatttgcaaaaataaatgtattaaattagaatatcgtttatttattacttaatattctaataaaaaattttatagcacagatttggatgtatcagagtggttaagagtataaagtaatatacaaataaactttggaaataacaaattagaattatattaattattagtttaaaatggagcaaatgaataattttgaaaatttataacatgtttaataaaaaaaaaataataattagatataaaattggataaatcatcccggaacatgatgaacgaacttaaactacaaccggcttcaacgtttgcacgcataattgtcaagtgaaagtatttatattaaatggtgatatgttaaaaaattaaacttgctcatataaataaaaatcaaacattttgattttacaccaagaatgcagtaattatagtaacatagaaataatgatatttgaaccataactatctttaacaatttactcaatttaaaattaatttattttatttgaatcaaaggctgcactttatcttaaaaatatattttattaaaaattttaaaattagtaaaacatattcaaaaaataattgtaaaagaattaaattatttcattataatttcaaaatatttattttactaaaaaagcagttaaagtgataaagaagctactagttataacatatttaacataacaaatttttaaaaatcgactattgcaataacaaaaatttaatttgaatatgcaaataaaagatgcaattgtataaatttgaagtttataacaataatataatatatatttaaaaaatattatttatcgcgaaaagaacattgttttgaaaaaatgagaaagggctcaaaaaccaatagagctctaaatttaaacccaattgttgtagaacaaaaatgcatctgcattaaataaacatctaaacgcataacaaaatcatgtaattgaattaaattcaaagcagtaagaaataaaatttttagtatttattaacaattatcatatatccgtggcccattatttatctaattatgaaaatttagggaatgtgaattaaagaaaggtaaggaaaaatgggaaagttgagtcgatgaaacaatacacgttaattatccctatttttgtggggaaaaaacaacaacacgtaatttaataattatgttttgttatggaggaggaccgagccaagaacacggacatcaagtttgagcggctcgtcgaagaatgccgctccattttgtcgctcaggagtgccgccgctgcactcgaacatcctggtcacgggtggcaggctaattcaattttagttaagccgcagcgtgagaaggagcgacaaggacgacagcgacagttcagtaattctcgcactcagggcatttcaatgaaggacggacgcacagtcaatcagcaaacggccgccagtcatcaaagccgcgtctgccttttccatgcaaaacgtgtggaggaaatcattggaacaacgagtgcaaaagcaagcgtgaaagtcatcggaacaacgaaagtgacaacaaactatggcaaaagtgctacaactgtgatcgagtcggacattttgcacgatagtgccgaagcaaaaagcagaccaacaacaacgactcgatgttcgtcatgaatgtgtccgacgacactgacggatggatcacagtggattgcctgatcaacggcaggcaggtttcattggtggcagacacagccgcctgaaaaaccatcattcaaacgcccatttgggagaaattgggaaaacccaaatttaaaagggcaaaactttaggaaaatatattcagggcataatttcgagttaattggtttatttgattgtacagttgagttcgcaggcattaaattggagttggaatgttttgtggcaccaacgggagcactcaatctctttggtctcccatggattcgtgcatttgaattggcactgcaacgtccaatcgccacaacacttcaaattgtccaaccagaaccagcattcatggccatggcttcatccgcagacctggacatcgtcacggaattggaccgtttgttggcaattgaggccattaaacagattgattacagccgttgggcagctccgattgtggcagtcaaaaagaagtcaggtgacgtccgagtctgcatcgacttctcaacagggctcaacgacgcgcttgaactcaaccgacacccgttgccacggcagtagtaagtactgccacaccttagcagtctgacgctaattagatgtgacagctggcggggaagggtgtcaattagtcactaattgggggggatactaattggtcagcggtcaagagggcactaattggtcagccgtagcgtgtggggtggggtgtaaattaattagggaaacccaaacctattgaacggtttcaaattgtcacgtaactttttttgatgagcgaaaaaatttgattgatttaaaaagtgacagccgagggggagggggaatttgattggtcagcgaagtgacagatgagggaaaaattcaaatttctgatgggcggggggacgtgaattttgattgatcaacatatgacagtttttgatattattaaattattcaaatgaagtgaaataatttgttttgcactcggtctttatcaaacttgttatgaaggtgcaaatttgcaatttgttgacgatttcgcgcaatgtttcgaccgaaattaaattgtttgtcacttataaaataggtcaatttgtgaatatttaaggtttccaaaatggaattcattgtaattgctacatttgttccatacttttcttccaaaaattttccatcccattctattgttgatagaaaatggcaccacgtgatgactccagtaacaataacaataatggtcagccgtcaatccaatttgatcaacaagttcgccaggaccctggtctaaatgctgtttttgactttgttcgggaacagggcgcgcgggtaatttgtcacagcaaattaattttttcattttttgattaattttgtttagcatggcattttcaacacacccgccgaaatcgtcaatgttcttcagcaaatggcacagcatcgactgaatgagcgcagagcggggaataattgagagaatgaagttgagagaaaatgaagagcgaaagttgagaacaaattgatgaaacaatacaaagatgatgggaattctgaattattattatttttttttcttacatgatttaatttattgacaatgctaaaacaataaataaaaatgggaaataaat

SEQ ID NO: 15408 - DNA, 1081 bp, Heterodera glycines
ccccataaatgtttgagtcccccaaacggactctccaaaaaatatttttggttttcggggcagtccccctgaaccgatgcgcccagatttatggggagaccgaatctctccggaatatattctctatagcctgtgctctaattgtgcgttggatttttgctctccatatttgtgtgagtaccccaaacggacactcgaaaaaatcgattttttttgttttcggggcagtccccccgaaccgatgcgcccagatttatggggagaccgaatccttcgggaatagcttccctatagcctgtactttaattctgcgttggatttttgctccccataattgtttgagtaccccaaacggacacttgaaaaaatcgatttttttgttttcggggcagtccccccgaaccgatgcgcccagatttatggggagaccgaatccttcgggaatagcttccctatagcctgtactttaattctgcgttggatttttgctccccataattgtttgagtaccccaaacggacacttgaaaaaatcgatttttttgttttcggggcagtccccccgaaccgatgcgcccagatttatggggagaccgaatccttcgggaatagcttccctatagcctgtactttaattctgcgttggatttttgctccccataattgtttgagtaccccaaacggacacttgaaaaaatcgatttttttgttttcggggcagtccccccgaaccgatgcgcccagatttatggggagaccgaatccttccggaatagcttccctatagcctgtactttaattctgcgttggatttttgctccccataattgtttgagtaccccaaacggacacttgaaaaaatcgatttttttgttttcggggcagtccccccgaaccgatgcgcccagatttatggggagaccgaatccttcgggaatagcttccctatagcctgtactttaattctgcgttggatttttgctccccataattgtttgagtaccccaaacggacacttgaaaaaatcgatttttgtgttttcggagcagtccccccgaaccgatgcgcccagatatatgggg

SEQ ID NO: 15409 - DNA, 1921 bp, Heterodera glycines
tttgggttgaaaatgtgggtcaaatatttttctggggtattttgatgtgctgagcacgaatctgatgttcattttcagtttaggaaattttggaattttttaaaaattcgaaaatatttttcaattttttaacccttgggattttgggttaatatttgaaaattcataactaacctcagggtaagtcaattttaatacaacaaagctttaaaaatagcaaaaaatcaggagaattttatggcttttatttagattctctatcatgaatataaaaaaagttattccagaagttctagaaaatttcgaattttcagaaaaaaattctgaacacggttctgaaaagttattttggaaaagtaaaataatacaaaaatccgcaattttttgctctattttataaattttattttagctttttatcacttttttgaaaaaagttatagaaataaaagtgattttgggaatcgggaccaaaggggtgagtataggatttttgagttgaaaaattttttcaccaaaaatcttcaaaaaacatgtcattagggctattttatgacgctgatcacgaatacgtgatcagattttacttttgacatcgttaagacctcagaatccctgtgtgattggggattctgaggcatcattttgaagggggagggggcaggttcgaagccgggcggtgtacattatttttctaccatttttttcgtgtttttcaattttattcatttaaaatattttttgagttaataaataaaaaattatattttatttaatttttttttgataaataaattttataagttttaattaattatttttttaattgatagaatttcatgtatctgttgtacctttttaatcacttttgtacctcttttatcaaatttgtacctcttctaatcactgttctatttcttctaatcactgttgtgcctcttctaatcactgttgtacctcttctaatctctgttgtacctcttcatatcactgttgtacctcttctaatcactgttgtacctcttctaatcactgttataactcttttaatcactgttgtgcctcttctaatcactgttgtacctcttctaatctctgttgtacctcttcatatcactgttgtacctcttctaatcactgttgtacctcttctaatcactgttgtaactcttttaatcactgttgtactaatcactgttatcttctaatcgcttttgtacatcttctaatcactgttgtagctcttttaatcacttttacacctcttctaatcatttttgtaactcttctaatctctgttgtttttttggcccttgggaatttgggcgaatatttgaaaaatctcaaggggtattttaaattatttaatttttttatttaaattgttttattaatttattttaaattattttctgatgaataactgttttatttacttcttttaatcactgttgtgcctcttttaatcccttttatatctcttaatccctgtgtgattgctcgtctgagttcaactaaattttaaaaacgggcgcgaagcgcccgcccaagcccaataaaatttgaaaaacgggcgcgaagcgcccgtccttgcccaacaaaattttaaaaacgggcgcgaagcgcccgtccaagaccaacaaaattttaaaaacgggcgcgaagcgcccgcccaagcccaataaaatttgaaaaacgggcgcgaagcgcccgtccaagcccaacaaaattttaaaaacgggcgcgaagcgcccgtccaagaccaacaaaattttaaaaacgggcgcaaagcgcccgtccaaggccaaaaaattgaaaaacgggtgcgaagcgcccgtatgagcttaatggatataaaaaacgggcgcgaagcgcccgtataagcccaacaaaatttaaaaaacgtgcgcgaagcgtccgt

SEQ ID NO: 15410 - DNA, 3050 bp, Heterodera glycines
  unsure (1)..(3050): unsure at all n locations
tcaatcaaattctttggggcgagaaaattttccttaaaggcggagatgcaaaaagaaaagcgtcacacaaaccgtagattttatacacgggaactgacatcagagaaatgaagggaaggccgaagcgacttcatttgaattccatttcgcttaaggcggggggggtcggggccattcttgcccctcggggcgcttgcccccaaatattcaaatttttcaatcgatcatctggatctgtcaccgcggcacgccagcacggcatggcagtgggaggagtcagcagcggcaccatccccaagttctcttctcatcatttgccactttcgcccactttttcaatttgtcagcagcggagacgcatcccaaattcgcttttcactagttgccattttcatccactttcatcatgccctttattgcccccggcactttcgcttttctttcaaaagagtatggggaattttcgactgggcattttgacccaaacagagcatacgacccaaattcacttgcagaactttcgtaatacatttattttgcttccattatctttgatttttttctttgtagtcaatggagaaaagagtttctggacggccgataccgatccaaaacaaccaacnccctccttcccccctgcgtgccccatcgcccagctttccaatcccggtcatcgttggtaatttaaatttcagttttttttggattttgcaaatattccgtttacaggaaatcgtccacaggatgaaaattgtttggttttccacaaatatcttgtctgattttttccattttagggcggcagatgttccccgatgacgatgggtacgaatcggaagatgatgaaattctcttgccacctccgccgatccccccgcaacttggccaccctccaccaaatgtgccggtaatttcggtctcgcttttcgttgcttttctcaaatttccgagtggttttttcaggcagttcgtgtccagccaatgcatgttgggcagcagcggctgccgctgagagacttgccacaattcgaggaccatctgcaaaatgtgccggtaattttgggtcgattttcgctgcgttttctcaaatttctgcgtgtttttttcaggctgttcgggtccaaccgatgcaacaaccattgccgctgagagacctgccgcaaattttccaccctccaccaaatgtgccggtaattttgggtctttctttcgattgctttttctcaattcccgagtgcatttttcaggcaattcgtgttcaaccaatgcagcaacccgtaccaatgagagccgtgccacaattcctccaccctccgccaaatgcgccggtaatcttgagtctcgttttcggttgctttttcaaaatcccgagtgcattgtttttcaggaaattggtgtgggaccaattcatgatgggcaacaaccactaccactaagagcgttgccacaattcgcccaacctccaccaaatgtgccggtaattttggctcgtttttttgttgtttttttaattcccgaatgcttttttcaggccgttcgtgtccaaccagttcaacaaccgataccactgagagacgtgccgctatttggcaacccaccaccaaatgtgccggtaattttggctcgcttttgttactttttttcaagatcccgaatgcaggtaattcgtgcccaaccgatgcctcaaccgttgccgctgagagacatgccgcaaattcaccatccaccgcgaaatgtgacttcaatttggatcaaattgtggttgctttttcccagtctctgggtgtttcttcagggaattcatgttcgacaaattcaacgggaatacgccgtaccgcaatttgcccatccgccgccaaacttgccgtatcatccaccagaaaacgttccggtagttgggtcttgtttttcgtgcgtttctcatattttcggatgcttattcaggcaatccaaccacggcaacgaccgcgccagctgagagacgtgccactattcgaccacccgctgccaaacggacaggtaatttcagaccctgtcttctacctaacaccgaaacatcttttctaagcaaatgcatcccaaccccccgagagtgctggaagtgatccgacggctgggcgagtggagaggaagaccaagggacccaagacgtccgcttcaatgaatgaatggaatttggataaaatttgttgtttttaaattttttgtaatgataagggttaaatcccgttacctaaattgtttgaaaattattaaaattttaagaaattagatgctaaacctaacctttgacaaagattatgaaaaaatgaaaagaaatgacgaaatttttggaatgttccttctttttattatctatggatttttttcatgtgcattattttggtgctagtaagatattgccgaatgaattaattggttttttctcttcattttaaaacatttcacgtccccatgccctgcccacttcccgcggaattgatcaaggaaataattgacgctctcccccctccaaaaacacatcggcttttgcgcgtaaattttgttttggcatactttgttaaatgtcggttttattccatgatgagaagattgtttcgcccagagcatatatcaataccaatggcccgaagaactggaatttatttctttttcgatgttcatactccccctatttattttccactataccaataataacatttaaataaaattataattttttatttcttatctgattaatttcgatcaatattttttgataattaaacaaaattgtatttttcccaaaagatttttctcgcagtagcaactcatcggcttttttttactcccttcataaaatgtctcgcttttgccctatcgcccaaatcaaggaatcgggtcggcttaacacaccaaaggggaaatttagtgagttccaaacctatcaaattaaaaaagaattttgatattcgttttaggtcttttttatgctttggaaattgctcgaagctaccagcttatagggaaaagtataacggaaaacaaattccgttatctgatgaaga

SEQ ID NO: 15411 - DNA, 1510 bp, Heterodera glycines
  unsure (1)..(1510): unsure at all n locations
ttttccactcaaaanccatgtactccccctttgtcgcaattgcgaaatcacttttaattttatacttttttcgaaaaagtgataaaaatatgaaataaaatttataaaatagagaaaaaaatcgcggattttttcattattttaatttgtaaaatacgttttcagaaccgagttctgaatttttttctgaaaattcgaaaatttccagaatttctggaataactttttttcttttgaagctagaaatcccaaataaatcccataaaattctcctgatttttctctatttttatggctttattctatgaaaattggacaagcctaagtttagttatgaattttcaaaaattacctcaaattctcgaggcccaaaaaaatgaaaaattttcaaaattttttaaaaaattccaaaaattgcgaaacaaaaaacaaaggtcatattcgtgctcagcacctcaaaataccccagaaaaatatttttaactccattcttcaacccaaaaaaaattttcaaaaatttctagggggcctagctcgaaaatttttgaaaatttttcgacatatagtacacctttcgatagcattttgaaagctctacaattttgctctaaggcaatttttcgctaaaaccaacccccgacgagttattggcccgggactcaaatgtcccgctcaggccaaaaattttttctatttccggaaaaaaatcgaaaattttctaaaaatgtcaccaatcgatagagctcgaaaaacggttgcttgaaagtggtctccgtttttctgggaaaattcgttaaaaaatcataaaattcaaaaaccaaaaaatcgttttttaggcctagctcgaaaatttttgaaaattttcgaaatttttaaacatggttcgatagccctttgaaagctctacaaaaagtccgctggcgactacccgctccgagcaaaccctggcgcggcattcagctggtactgaagtgtccaaaaaaagtagttcttacgttgcctaacctacaggtcaggggtttgatctgatcaaaaaaagtttgctggcaaagttgtagcccatagtttgggcattgatcttttggggttcactaagccttaaaggcaaatgcaaaaaatttcgtaacagtgagactgtcagcaaagtcagtttttgcgcccctggtactcagttggacgtcgagaatttttctctatagttttcccagatgcgccgtctcgagctaccccttggtgcaaaatttcagcccggtgtgcccagccgttcccgagaaatcggttttagagatgagttgccttgtcaatataacatatatataactagcgggtgcgtgaaccgtcggctatttagctggaaaaaagcgcttcgcgcttcttgagcttcgctacctaggctgtgaagcgattcaaattgatcgaattggttggagattttttttgaatttttaaaaattattagcgatttttaggccgcttcgcgccgttttttaaattgtgctgagtcggacgg

SEQ ID NO: 15412 - DNA, 1002 bp, Heterodera glycines
taagacgggctgcttggcgcccgttttttaaatttgttaagctcagacgggcgcttcgcgcccgtttttaaatttagttgggccttttcggccgcttcgcggcctcagacgggcgcctcgcgcccgttacaacggtgttagaagaggttcaatagtgatcagaagaggtacaacagtgatcagaagattacaactttgataaaaagggtacaccagtgattagaagaggtacaagtgattataagaggtacaaattagaagaggtacaacagagattagaagaggtacaaatttgatgaagaggtacaaaagtgattagaagaggtacaaaagtgatagaagaggtgaaacagtgattagaagaggtgcaacaatgattagaagaggtacaacagagattagaagaggtacaacagagattagaagaggtacaacagagattagaagaggtacaacagagattagaagaggtacaaatttgatgaagaggtgcaacaatgattagaagaggtacaacagagattagaagaggtgaaacagtgattagaagaggtgcaacaatgattagaagaggtacaacagagattagaagaggtacaacagagattagaagaggtacaacagagattagaagaggtacaacagagattagaagaggtacaacagagattagaagaggtgaaacagtgattagaagaggtgcaacaatgattagaagaggtacaacagagattagaagaggtacaacagagattagaagaggtacaacagagattagaagaggtacaacagagattagaagaggtacaaatttgatgaagaggtacaaaagtgattagaagaggtgcaacagtgattagaagaggtacaaaagtgattagaagaggtacagcagtgattagaagaggtacaacagagattagaagaggtacaaagattgtaggaatggtacaataatagtttaaaagggtaaaatcatggtttaaaaattaaataaataag

SEQ ID NO: 15413 - DNA, 5002 bp, Heterodera glycines
gcgagcggagccggggaattttgcagttgtctttgccctccattgaatgaaacctcttctgatacaagattgaacaaggagaggcccatttcgggaaaaaataaatgaatttggggaaaaagtgattcagaaaggggcacagattcggtggaggagcgggcaggggctgatattcaaaaggggaactgtgatgatgaatcagaattgagacatttcttcgctgccttttttgctatttcaacaattagggttatgaatattaaaaaaataacacagaaagtattggctaaaaaattaaaaataatttttgaaattccggaggcaaaaagtcgtgccagccttaagcgagaccagcaccaccgtgcagcacacacctcgtgctccaacgcgttgtcgcgcaacgacagagagccaacgcacgcgcagtcgccgatgtgctgctccaacacggacacgcaggcggcagagccgacgatggccgagtcgaggcacaggtgaagcgagccgggggcaaggtgcgggttggcagagagacctgtggtacacagacagtcagtcagaacggcatttttaaaggaatgccgacattagcactgccactctttttctgcacgtcctttgttgttaaaaaaaaaaatcaatctaggccccaaaaccgaaaagtacccatcactttgccattgttggccttcaccccgcccgtttgcacctcttgcaaaatgttggtgccgttgttcgcccgtgccttcgccgctttttagacgtagtaattacagaaagacttaatttttgaaaggaaccttcatagccacagattttgcaatttaatggagtgttgtttgatatatctggtctttttcaaaccttaaagatgttttggaacatgatgatgatcaggttaattggatacagatttgtgaagttttacatcctgaagctgatcaaagtcccctggggatgctgaaattgatcactcccctgatcagcctcatgaatcaatctgatcacgggaaccatttacttgtctgagcagctttgaaagttgtgcttacctgattttttagatttttatcaaatgtgaaaaaaactcatctcatctaacttttggtgcataaaaattcaagtgagcaccttccttctccttattcgatataaaaattattatttttttttaaattttaagcaattttcatatttcttttttaaattgttcctgaacagtcttaggcacttactgcgaaaagccaatttttttttaaattttcattatttgtgtaaatcattttgatgtccatttatcacattaaaattcatatattttttataattgtttcaaaaatcgactcatcgataaattactgcccaatgattcatctttctgatcattttcttatgcttcaccataattgtccgtcgctcttatcagttgccgaagctgcccgttggtgataaagatcagccgctggatggtattgaagcgccggccgttgatcaatgcttgttgctctgcttgatgacggatgatcagcttccttttccttcttttgacctctatggatgctaccagtgctgtttcttcttgcatgcccagcttcctgcttcaatttttgatcatttaccagtaccaatttgctgggtgaatgctcctgatcagttaatttgctgggagaatgcttctgatcagctttttggctcattttctgatcactgatcaccatcgtgtctcctttctgatcaccgatcacaatcttgtcattccactgtgggcttggcaaggcgtgaaattccaaactgtacatctgatcagagttctctgattccgatcgcagcctcagttcactgctgctttcgatgatcggtgtcaatggtgatctgctgaacatatcttccaatgttggccgtctttgaagcagactaaatccctgaaactgatcagtgccgtcatcccatggctgttccgcctctatcagtgtttgagccatctgaatataaatgtgaatttaaatgtatattgtaatccacaagcccgttccaatttactcaaaccccgggactcaattcggcgaaccacattttccctttcccaccttgtctcccgctcaatctccctcctatccgatccctcttttcatattccactcccttccgccacttacggatatttttcacgtacaaaaggcactccgaattcccttcccaccgttttattttccccgggacccgacaaaagtggcattttttccccaggcattctttaagcgctttgggcgatcgatctaattaatttctcatctcacaaattttatatttccattttacccatatgtacagcaataaatttatttaaaggaaaagaataggaaataaaaagaggaagggcatggaagcacgagaggggagggcgcttaaagagaatttggaataattaaaacaaatttcgggaaatcacaggaccaaaattcggacaatttccctcatttctcgggcccggcacacacttcccacatttctatgtatatgttttttagtgcaaattcaaaaatataaaaaaaacagttttgcttttctctcaaattaatttgccattttcagtttttttcacttggtataacgcaacgccaatgaataagtttggaattttaatgaatttgttgaaaatttgcaaaaattttccagaattttccctttcatcagcccctcgcgcacctcatccaaactgccgggtagagcaacaatggcaccttttttctcgcccattgccgacgactcgccctgctccaaccgtaaaaactcgtgtagtgtcggcatgttcagcaccgtccgctgatcagtcggatattctatgatgtgctgatcggcgatcagactcttcactttcttctcaacttgtgcgtccaacttctggccaaccagttcaatgttcttctgtccggtcagcgattcttcataggccatggtttcgttcaaactttgtcgttcctcctccgtcatgcgattgaaaatgtcggtgtacaggcaaacggcacgtgccacataggccaccagttcgttgggcttctgcttttggaggtcgtgctggtaaaaaacacagctatttgttgtcatttcgccaagagatgattctttgaaaatcaaatctcgaatggatattcattctatggtttactgttggtggccaaacatttaggcactaatgatctgagccccaatgcttgcgcatttatcataaagtgacagaaattgttttgtcagagggcagtccattcccgatcactatttaagctgttccctcacaattgttcaccccccccccccggttcattttattccaccagtctccaattgtacaaagacaatccggagatatacacacaattgactgtacgttcttcccttttcacttccgaataaagcataaatattcgaattaccgttacacagtgtttttgttaaatatgttaacaccaaagtgtcccaattatattttttaattttatattcaatctcttccaaccaaccccaacgtgttgttgctgttgttgttgtggttgctgcttgccaccgctgccggtgccgggagacaacaactgtggcgtgacagaaataatttttttattgatcagatgaaaaatatttaggtttggcattggatttcagaaattttagggtccttgaaatctcacccgagacaacgataagcgtgttttaattggagatgaaatggaaaacccggcttttgtgacacctgacctgaattttttttcgggccaacagatatttcgaaatgagataagatacggaaaataaaatttaaaggccactatgaaagaaatttagccctagaaaaaaagaaattaaaaaattacacattatttgagtcgtggccaacccagtcccacccattcaaccaaccccgccgccgctcaatgtcagttgctgtctgttcgcggtgccgggcgataataactatgacatgaatattttattgaacggattaaaaatattttatttgccctttggatttcaaaattaagatctggaaataaagtttaatggccactaggaaatcaaacctagccatagaaaaagaagaaaaaaatcccgcgtcaggaccaatcagatggggggggacccatcagtcgaggacaactcagctttcgacaatttaataaaaaataaataaatttttaaactaaacatattttttaatctttaaaaggcaactcatacaatgacttaggctaggaggctaggatgaagcttttttaggctaggcctaggcttgcttggacctaggtttaggctttatttggtaatccatcagccgaattcagttgagttgtccccagctgattgtccagaagtcgaaaaatatatacatatttttctaaaaaatggctaaggcgcccccacaaagtgtccaagccacgaaatgtccaaaagagtaaaaacccacgaaatgtccaaaatttttcaaaatttataaaaacaaaatgagtctaatttaggatttttagggttttcggggtcgctgaatacgaatataccctttatattaccccttgcctaaccttaggcccatctgaataataaaaaactcaaattcgagacttggacatttcgtggcctggacattttgtgggtcagcgatggctaaaaatggcttcgtctttgagtcctggccaactcagtcccacccattcataacccaccccgccgtcgcttattgtcaattgttgtctgctcgcgctacccggcgacaacagctgtgactggtcgtcatttctgctggaacttctcccgacactattcagccgtttcagtcctgccttgaatctctgtctgtagcttggcgttgtgcttccgtccgtcatgcatcgccgttgggcgtcagcttcaatttcttcaagttccaggccgaaatgtttggtgctcaagtagagaattttgtcccgaatgtccaccaacgggcggaaagtgaccgcgtccacttcatgcttat

SEQ ID NO: 15414 - DNA, 3429 bp, Heterodera glycines
ataaatgatgccgagtttaaataaattaacattttatgaatctgaaatggtactcgtcaatgtgttttgtgctcaactattagactgtcccgtcaagtcactgcgcgaccgaattaaccaccccgaagatcgtgtaaatgcaatgaacggattgatggggaagaaagttcgaacaacctacaaagatcgcaatgggatgcacaagaccttttttgtcggcggtatcacggagcgcggtgcagctttcgttccggcttatggcaatctacgggcaccatacaacgtaaatgtggcagcttatttttatgcacggcatcgcataaagctccatttcccttacgtgccttgcgtaattgaacgcttttccgggagaggtgaggaccgtttctacacaatggagttgctgggaattgtggatgacgaaaacaaagggagattgtttggacgaatgtttatggaaattggtgaagaagcagatgatgatgataatgacgaggatgtttcaacatcctttgactcaacactacgatttgatatgggacgcgatgagtgttcccaattatggcgatgatcaatatttgcaatattcatcttctattactaaactatgcacttttctacctaaaaattacattttaacactcttaattatttaatcaatatatatttttcactctattaattcggcatttttctacccaaaacagacaacttctttttttcatttattcaaattcacaaaataaataagaaaatgtttacaaggtgtgaccaaagtttaaaacattaaaatctgacttaacaattccctttccaacgtagggcctataacatttctgcattgggccactggtcacttttcctccttctctgatgctaggccgcaggaagtttgggtaggtgactatgatcggctcatagtcaccagtagcggcgaagtccaacacttgttgcttgaaagtttcataccgtaggtgttgattattgatgacatcgtagttgagtgtcatcccgcgcaccttcagcacatactctaacaccgcagcagcaggtgcatttaagcgcctcaacttcaatccgtactaaataaaaatatattagcatattgattagcattttaaaaattaattacttgttttgcaccaccgctgcagtactccacaatttcgtgttgcggatactcatcggtaaactgacccaaatgtgggccagttttgagtggacaggcgttctttgggtgcacaaagatcaatgaatccgtgtctaaattgttgatcaatatgttatttttacctagaaatgataataaatttaccagtgtataaaagcacgcaaccaggtgttcgtgccaccttttgcatcgcctttaggaggaggagccgcgcagccgaggtcgtccaaagagaaatcactgcaattttcatattttttatatttcattggaatctttttcccatacctatgttggagcagtcgtgctcctctacccactccttcttattttcatagctatgtaagatatggtccaaaacaagttcgtcgattgccgtcacatcgaccgatcggttgtccaagtgttctctgaacgcaactgggtcatctgtgatcaacgtctgcgaaagtccaaagttgcgcaaagagaagcgacccccttaatatttatttcattattattgacgtttgattagaaaaacccacataaattatttagacatagctttgcaatagaccgctttcccttattgacagccatttttgacggatcaatgcttatcccaaactgctcataacattctctgacgaattgttgctccttttcggcgtcccctttgatgctgctgtcaaacccgctggcctggattttctgcgccataaactcagcgatgtatggacgaaatagcttgtcatcactctgctcgtactccaacacccggaacactttcgtgacgcggtagccctcttcaagcgctgcgttgagctcaattgaagtgctggtgctgacccatccgcgttgttggtcattatgtctgcagtgatattcgtcgtcaactcctccagtagggtagtctttcgcgcacttcatgcacaatggaaagcataaacgttcaccaactttcacaggcagaaccggaatggtgcactttcgtggcggaatcacccagcatttaatcagtgccaaagggaaggtgttgtgtgctgggctcgtccaattaacatcctcgttcaacacgtgaaccttcgggtggcccactggataacgggttgtgaaactggaaattaaaaattgtaacacaattatgtaaaaatgacaaactttatgtatgggtagagtgaagtaaagtcgaagtaggaaattttttggtctgcgcctgccttgtggaagagctttagtggtcccgtccgcccgccggtgaacgcgtcacggatcaccaacggtccaccatccacatattctgcaaattttttccgcatttccctgcttctgtccaacattcgttgaatctcgcactcccagaagacatcaactcgtgtcacttgagtcctcaagaactgtaaccgcttggcatcgcgctccctttgttctccagcagttttcccgttgggcaacatcatgttgtcagagggaaagcattttctacagccgtgccaaacacaacctgcaaacaacttttttttaaattgcttaaaaatatagaaaaattaccattcacttcaattacacacccttctgcctcaatccaaccgtccacagtgtagtttgcaatctttttttctccatcaggtgagtaggctgtctgcacttgtacgttgttttcctcagcataccagaaaagaaagcggagagccagcttgctctggttctgggtgttgtcatagcccttttcagggacaatggcaaggtgctccgccggcagatggttcaacctgaagtgcttcatgcacgcaccggcaacagtcatgcattcccgtagaacatcaatcccatcgtggttttcccggtcgtcgattccgtcgacatattcgttccgcttcgacacatcaaaaaactcgcggcggaatgcgacgagagctgccattagaatttcaacgtcattcgtacaataactgaaaaagtccaaaataaatattttaatttaaaaatgttttacctcgctagtgcttcatcgagttgaaaaggctcttcgcggtgctgctcgaaccaatgatcgaattgtcgtcgcttctctggcatcattccgttggccaaatagtcgtcaggggttgggtagatgtgttgaccgtagttctccggacggttggccaaatgcgggaaaaagggtttgtcttcgacgtccaatccgtaggatggcaccagctgagccaatgcgcagggcatcaagttgaatgagaagagaacacaatgtttgggttcccggttcttttgcttct

SEQ ID NO: 15415 - DNA, 1336 bp, Heterodera glycines
tttcatgttgcaacaaccggaatatttcacatatcatgttaacacagccggaagactttcatttgatgttgccatgattttccgtttaatgttgccaacaaccgggagatttcccatttcatgttgcaacaaccggaatatttcacgtttcatgttgccacaaccggaagactttcatttgatgttgccatgattttccgtttaatgttgccaacaaccgggagatttcccatttcatgttgcaacaaccggaatatttcacgtttcatgttgccaactactgaaaaaaacaaccagagaagattaaagtttcatgttgccaagaaccggaagatttcacgtttcatgttgccaacaaccggcagatttcccatttcatgttgcaacaaccggaatatttcacgtttcattttgccacaaccgggagattttcatttgatgttgccatgattttccgtttaatgttgccaactaccgaaaaaacaacctgaagatttcacgtttcatgttgccaacaaccgggagatttcccatttcatgttgcaacaaccggaatatttcacgtttcatgttgccacaaccggaagactttcatttgatgttgccatgattttccgtttaatgttgccaacaaccgggagatttcccatttcatgttgcaacaaccggaatatttcacgtttcatgttgccacaaccggaagactttcatttgatgttgccatgattttccgtttaatgttgccaacaaccggaaaaataaccggaatatttcacgtttcatgttgccaactactgaaaaaaacaaccagagaagattaaagtttcatgttgccaagaaccggaagatttcacgtttcatgttgccaacaaccggcagatttcccatttcatgttgcaacaaccggattatttcacgtttcatgttgccacaaccgggagattttcatttgatgttgccatgattttccgtttaatgttgccaactaccgaaaaaacaacctgaagatttcacgtttcatgttgccaacaaccgggagatttcccatttcatgttgcaacaaccgggagatttcccatttcatgttgcaacaaccggaatatttcacgtttcatgttgccaactactgaaaaaaacaaccagagaagattaaagtttcatgttgccaagaaccggaagatttcacgtttcatgtttcatgttgcaacaaccggaatatttcatgttgccacaaccgggagattttcatttgatgttgccatgattttccgtttaatgttgccaactaccgaaaaaacaacaagaagatttcacgtttcatgttgccaacaaccgg

SEQ ID NO: 15416 - DNA, 1887 bp, Heterodera glycines
  unsure (1)..(1887): unsure at all n locations
aaaaatacaggggagatttaattttatttatttatttttaatgtaaaatatttttntaataataaatattttataaaaatataaataataaggtcatcgttctgtgttcgctaaacacccaatnttgttcaccgaatctggcattttctattttgaaatcaaaattaaaagctgtaaaaggtanaattacaaaaaaaaattaagttcgatttgatttatattttaatntagtctttgctcaattggatttgccaccaaagcgatgccattgggcgaaaatgttggccaaaattcggacagttgtgcataccaaagcgatggccaattttggaccaatgggtcaaagaattttggaatgccgaacttttctcgtggcgatttcgtcggttgtggcattaatttggccactcggcggattatcttcacaaagaatggccaacctttgggtcttttattttattttaaaattgtttatgtttgattttttcagatacctccgatttgttcctttcgcctccttttggttttccattgtttccgttcatttctttgaatgattctggcgattttattgagacaaattttgggccacaattcaaattcgaccccgcaaaagtaaagagaacaaaattatttaatcaaataatttgaattaatcttaaggtgattctcaattttccacgacaaaattattgggatgccaatgtttgtgatgagaatctccaaatcattggcaacaaaagtttgactgtccatcacaagggaactacttctggtatttgtttttaaatttataaatcccatttttttcttcataagattattatcattccgtcttcgctaaatatccgattgcgctgaacaagtctttgtctgactttttttactatgaaatttcaattatgaaaaaaggaaaaagcgagtaagcgaatttgatattttgaaacatttataattataaaaagaataagagaaatattttattatttatttcttctttattcagttgggtcatgttcggatttgcagtcaaacagcagcagacaaaattggatgaattaattcatcttgaaaagggcacttatgcattttacaattatggctatttatgtattaacggaggaataaagggaagaaatgccaaatattcctacggtgttggcgataccgttggaattggcgtcaatttggccactcgaaagatcattttcaccaaaaatgggcttcgtttgggttagcaaataataaataatataattttacgatttttaaattacaatttggttaattgtctattttatctaatttattttatgtttaaaataatcaaaaatcccttaactttttcacagatacctctgattttttggttgatccatcttttgctgatggttctctttatccatccgtttctttgcacgtatttggcaaccaaattgaggcgaattttgggcccaatttcaaatttgatttggcaactctctgaggaagaagaaatattcactaaaactgatcaatttgttctttttaatcctttttatttccgtcttcgcaaaacacaaaatctaaattaatctgtttgtctgaattttgaaaataaaaagacttgagaatgttaattttatctaaattcataaaatttctacaaatggaaacctcactattaaaaacgcgggggaaagtttgggcaccaaatatggattttaaaaactaaaatgtttttaattgtgtaaaaattgcaaccatttcatttatgattagaggtcattagagatcaaattgttctttttaatcgtttttatgttttattcatggtgatttaacgagctgatgcttttagtcggcaatccaaattttctgaatttcgcaattgaaatttgaaaattc

SEQ ID NO: 15417 - DNA, 1210 bp, Heterodera glycines
ggggttttatgaaagtcgtcaattgcacttcaaataagatggaaatgtgtccttaaatgagtttttaagacttttttgtttaggaactttttctttgatcttttttccgagtttttatgggaatttcgccccgacaaatgttcctgcccccgacatttttaaatttctccagccatccccgacaaatttagtcggggaattttcaccccgaaccccgacttttccaaccccgacgtcggggtcgcaaccctagttttgagcataggctcagataaatcttttccctatttttaatatcgtattttaatgaaatataaatttgtcctaattttgataaattatatccatatttttgcaattttttgtcaaactttgagaatattagtaaaggcacgctgcgccgaaaaagccaagaaaaagtcaatttttgaggttttttggccataacttttttgtaaactgacgaaattttttgaaattttgtaggttactagagaatcacaagagctatcatgatatcaaaaatatttaatttggttgataatgaaaaaagttgtttgcaacggcgccaaaaaggccggcgccgaagtgggcggttcccattttttggggtccccgaccacgaatctttcaattattttgaccaattccgatttcctaatctaaatttgaacaaaaaatagtaattcgaaaaattcagaatttaaatttatttgagttcaggttattgattagaaattagtcaaaatacatatcagattcgcgatcagcgacttctaaaaccccggatcacttttcatatagcgccaaaaacagcgaatgtctgaacaatcttttggggcatgcccggcttaaaaagagaattccgtctaaaaagtctcaaattactttcagttaatgaatgagaaaatggacaaattccaattggaaatcggcaaattgaaccaaaatgttagttttaattttttttttttttttaatattttaacaaaagatttattaagtatattaaaattttaagtttcagattatcgaaaataaatttaaagtgaatgagaatcgccgggaaattcaggtacagtatatgttttggtacatatatataattttgatcagaaaaatttggccaaatttgcaaaaaacacaatgtttcttttgaaagaaaaaattttttaagcaaaattataagaatttgacgttctttcaaatt

SEQ ID NO: 15418 - DNA, 2979 bp, Heterodera glycines
tttaattttttaaatttcactttaccatcgttttgcaagtgttcacgtcatttgttccaatggcacaatgaatttcaaatgcgacaattccaagcgctgcgccgtcgaaatcattcaaaaaaacaccgaacggaagagcattttggaactcggccaatttagcggaagaggaactcattaacgctaatgactcgatcaattaaatttaatttgttgtagaactgtaccctttgtgatgttaatgtccaaaaagtcggagccgtgcacaaaaaattttgggcctatttccacggataaatcctttctaaaattaaatttgctttttaattttaaattaaatcactcacccaaaagaggactcaaggatcagcccatttttcttctgttcgatcattagcgcgtgccatcccttcgtgccgtctgtgccaacacatctttcagccaattgcttattcccgttgcgccttttgaacacttttcccactttccatccaaaattatcggccattttgctcttgtagcaaatcagcagactaattaatgcgggaaaattaattaattatcaccaaaattatttgcaaattactttttggctttctttcccattctgatcattccgtttccattcaattcgcactttttccatttgtcctcggcaagtctaaagaacagaaagcatttgaaaattgattttaattcatttaattacccttcaccgatggcatttgtcgccagaacaacaaaaaagaacgaaaagcaaattaaattcattttgattttgggaaaggaataaatttgctgaaaatgggaaaaatgattaataaattagtgggtttattggctttgcaatcgcttaaaaagccaaaaaagccaatagaaacggtgactcatcgtttattggctttatctttctgctgatcggaattttgtccattccatattcacaaatcagtgcagtgtttgggagagaagcgatgcaaatgcctttttttcattttatgtggacaaaacggacaattttatccactttcacattgaatcatcatcataaaaatatttagaaagatttgtgcataattattgtatacagtaaagtaaagtaaaaatatttttaaaatggacgatttattagtaatttcaaaaattattttaagtccaattaaatttaaattggtttcaattgatggcaaaaatatacggacagatttgaattcattctttatcctttttctcgtggattcctggctccgaaaaagatttagctgaaaatgtgttggtgctgctcaaattggccgacttcttccaggtggaatggctgatgacgcgctgcgatttgcatctgatcagttgcgtggaaattccgttgatcgaccgtttccctccccaatttgaaattgttttttctgattttacattcattttttcacatttttttccatttcagatttctttttccatttgaattgcgcatctttttgaatgagaacagtgacaaattgggctcattaattgacagtcaattgccggcaaattgttttttgagttgtgccttcggcttgttactgcatgaaaagaaatgccaaacttgggagaagtggagaagtgccggaattttgttgcaaatccttttcatatttgtagttttttctttttttaattctttttcggcttttgaatttgggctacatattttcttcaacactttcttttgaccattttacttttttaaaaactacctttacataaacttttatttaaaatgacatcattattttcattaataaggctgctgggatttgctctcacttgcagcttacacggtcgtgaaattatatgacaaaatttaacgcttcatgactttttcgagatgcacccaaatttaaaattttttattcataaaaaaaaggtacgaaaagatataaacctaaaatggaagaaaaaaaacttacaaaatttacgtttataatcaaaaaccatttttttttgttctaagcttgatggaaaatgcaataattcaaaaaatcttgaaaatgtcaaaattttaataattcaaaattttgccaaaaaaaaattaaaacgtagaggaaaattttataaaaattttccatttttggattttgtaggcggaatttagcataaattatgaattttaatttgccaaaataaccaagcgcatttaacccttgctaaaacatcgacgaataaaaaatgcgacctttgtatataattatggcgcatattatttaatttttatttaataaaaacatttattttattttgaatttttaaatttgttttttcaaattaaaatttttgattgaaaaatgaatcgattaaaaagagtgcttaatgttaaacaaacagataacgaaagtatgtcagtcatttcactgaatatttttgcttgcgtccaattgctaaagcatttcgcttagaaaataataatttcatacttcattcgttttcgaatgatagaaaatttgttatttatttgggcaaaaaccttaaacaaaatattaactagttctttggcacaactgtgagacaagaaaactctccaaaattggctaaaatttgaccacagattggaattttttcaaaatttgatgaaatttcaaatcttttaaaatctaataaaaagaaattaaattccaaaaacgagaaaaagaaataggaaaaattcaagaataggtgtagttcaccaaattgtacaaattttatatcaatcgattcctctaggtctgtaatggaagaatccgaaagaatttttttgcggaaaccaatctctgaagagttactgacccgggactgaaatggccaaatggctttgggactgaactgtccaaagccataaacgcacggaattgctaccaaatagatacaaatcgatccctcacggtctgctaatcatgaatccaaggaatttttggataaaaaagaaattgacaaaagttatgtgtccttaaaaatctcacaaaa

SEQ ID NO: 15419 - DNA, 3649 bp, Heterodera glycines
  unsure (1)..(3649): unsure at all n locations
tggacacgccgtaaggcacggtcctgcactctgatcatccgtttttcgcttccggccagttgggagcgtgccaaaatcacacccttttccacgaaaagctccacatgactctgatcagaattagttttaaattttttgaacaacaaattatattcattagaaaataattttgtaaaatgagtaaaaaattaattcaattaaaaaattaaatattattttaatttcaattgcaattaaatttaaatttaatttcaaagataaatattctaaaattaaatgaaaccaaattaaaataaaagctattagtaatgggtaataaatttaaaattataataaatgttttttgattaaatctattctaaattttaaaaagagaaaaaatatatttaaaaaaaacatattaattaaaaacaaaatttttattcgaataaaaaaaaattctcacccgtccatcgcctgccaacaacaacagagcattagaataatttgttcgaaatgtgatgttaaacatctggcgtaaactccacaccgcttgtggttcatcctcctcatccccatccaaagaaactattttaaaaataataaaaaaaattttaaaaataaataatttaaattttcatttttctaccggtagcaatttcgtctaccgtagacggttctttgcgcagatcgtaacccaaccattcgttgccgaaaaaagaaacctccgtgctgggcttttctagaagaaacgcaaaattaggaataaataatatttaaaatttaatttntaattttttaaaattattattantataaatattatttttattttgattttataattttatatattattttnaaacaattaagcaaaacaacaaaaaactgaactggtttcacaccgtctcccttcataatcactatccgtacagtcacatcgggccccattgtttgcactgtaacatcggccatcattctgacaataaactcctggggcagtgtcggtggtggtggcactttgtgccaatttggccattcggctggccgcaacaacagcagccaaaccagatgatgccaatgaggtgaatgtcggctggcaataatccttatcagtttttcgtgtgcccattgaatccatcaattgaggatttgaaacacctataattaattaagggcaatttattctatgcaatattatcaattaatttaatcgtgattggacagggaatcaatggtcttaccagaattttcctatgtttgagtttgatcagaagtcttgatcatggtaattaggagtaggattaagcaccgatccgatacgaggaattatgaatctcatctgctgtttcatgtcaaaccgaatgaaaatgtttttgaatgagttactaagaattttttactttttaaaaatttctgtaatatttttatgaacatttgctccccgatatttttgtaatttctccacccatccccgacaaattttgtcgggcaatttcatccccgaactaagacttttcgactccacgagggtcggggcttaaccataaataggagtgctgccgtatttgggaaattcttcaatcctgaatatctctaacttcattattccgtaaagaagtttatttggaaataatccctactcataattctcgtttttaaaaataaacctattatccaacaataattagtgattaattattgtttttttcggaatattaatttcttctgaccctgtgggaacagtcgataaacaagacttcgtattgcacccgcaaaatgctgagaatgccgtcgaagtggtgagctgagcttttcaatttcctgaaattgtttgtttttgcatttaataaatatacctaagtgccattttgaaaaaattcttttaaaataataagcgttgaatatattttcagattatgggatgatttagtttaaaataggttaattctcttcctttcagtatccctgcaaagtttggtgcgcttctgatcatcgaaaaattatgtgtggcaaaattttttcaaaaattggaaaaatatagcaaattggaaaatccaaaaattttttaacaaaaccctatgggatggaaaattaatgtttaaaaatgttttatttcgtcatctcatcaagaaaatttaaaaattttgcattgacgaattttttaatgcattttttaacaaaaaaaaattttttttaaaggtgcaccagcgaaatatgtgctaaaaccctgaaatgtgtggcgggcgatatgttttaagtgctcgggtcttgtcgcgccaattagtaaaaatcccagttccattaattagcgaatgacattttataataaaatttttataaaaatttattttaaaaggcaataataaatttttaacgagctcatccaaccttcggaattccaccaacgaaaacatccgaatttgttctaatgtttcccagcgcaaaagtgcgttggctcagcacacggaacgccttttcctcgtcaagttgaaccctcacattttcccaggcctaaattttgagaaaaagttaaaattaaacgatttttcatttatttgattcaaaaaaaacacctggaaaaagctgaaccgatgccactttccgtcgtccacccgtgcggcattgacaaatccgatttggataaccggacgtcgttccggcatttcgaattgttgctcgcccagacgaaattcgacttggatatgcccgtcaagcaacgaaattgtgaaaaaattttgttgaacagtgcctgagatagaagaaatttaaaaattaatttttatttttgaaatattttttttgtgtcaccccattagaggggcttgtgaaaatagtggaaaaaaatcagttgggaaaaattgtatccttgccaaattttcagtttttcaccccaattttttgaaaaatgaaaatttaaaaaattccaacttaaaaatgtgcaaaaaaaaatatcagaacattttttaataacaaaatatcattaaaactttttgaaaaatattccaattttcaaaaaaatcttagaacatttaaataagaaaatttcattttcactacaaaattttccaatttttttcttatatattttttaactttataaggctttttgaaaattaaacgaactttgcaaataaagtttatttattaaaaattgataaaaatatttatcaaaaattattgtaataatttctgtttgttttatcatttaaacttgccatcatctgtatacagcagtaatgcattgggcatgcgcgttttgaattcaaaactaagttcattttcngaaggtttgtgcccattttgggtacctaaaatgcatattttaaaaattggaacgggtttttttttaaatttgtaaatattcattataacctggcaaatgaatcaggggaccccgaaaggataagagctcggcacatttgagtaataattacaataataataataataattggggaattaacggatttcagacaaggataaataagcaagggcatgtcatgtgctataatttaaaatggaatattttttncatttaagaatttttatttatttaaaaaattttactattaattatattgataaaaatttaattnttaccagaataaaattttattannaatataatanatttacttatagattatcctttattttttaaggatca

SEQ ID NO: 15420 - DNA, 2866 bp, Heterodera glycines
caaaaaataaagaatttttaaaaaattccaaaaatcatgaaacgaaaaacaaaggtcaaattcgagctcagcaccttaatttaccccaggaaaaattttttcacccccattttcaacacaaaaaaaattttcgaaaatttctagggggcctagctcgaaaatttttgaaattttccaaacatttagtacaccattcgatagagcttaaaattctctacaaaaatgttctaagacgatttttggctaaaaccaactcctgacgagttatgggcccgggactcaaatgtcccgctgaggctaaaatttttttctatttccgggaaaaaatcgaaaattttccgaaaaaaataccagtcgatagagctcgaaaaactatgttttggaagtggtcttcgttttgccaggaaaattcattaaaaattcttaaaattcaaaaacccaaaaaccgttttttaggcctagctcgaaaaattttgaaaattttcgaaatttttaaatttcagaaaatcgagcttccaaaattctacaataagtctgctgggcacctttccctcagataaaaccccgacgcggtattcgcctggtactgaagtgtactttttgagcacgcttcagttgccattttctgcaggccagggagtggctctattaaaaaaataaaaaataccagcatgtagaggacactttggcggggtgccctcgcagcgggcattttttgattcgagttttagaaaaaaagttacgggccttgaaataaaaacaaaagtgagaaattagccgccgggactcagttggccaccggagagaaaaacccgtatttttcccagatgcgcctcaaaaagttgtaagacccttccactactttcagggcgctcccggccttcggccgggagattttgttttttaagacgagtccccctttttctctatatatatataaactagggtgaccagttggctatggtgtgcatgcgtggcttggtaatatatggccctcatttgttattttaaaacatacaaaacattatcaattgagttctgttgctgtggggaaagcgcttcgcgctaagggacgcggcttcgccgcgtcgctagaaattgatgtaatttagcaattcatcgcagcctcaggacgggcgcttcgcgcccgtttttaattttttgggggatattcggccgcttcgcggcctcaggacgggcgcttcgcgcccgtttttaattttttgggggatattcggccgcttcgcggcctcaggacgggcgcttcgcgcccgttttttaattttttgcctgcgcgattggttcttgcgggatgcaagactccgacaccaaaccaagcatgtcagcttggttttcaccggccacttgggcttgggtgagaatggcatcaactgcctgtccacttgtctgtggttcgatgatcattatatcatcatgttcatcaacttccattagctcagcggccttggatgtcgactgcgcttcatccgtatgccgatagacaattgggcaaggagttggcaccccttcccttggatgatatggcacattatcagagccatatagctcgttaatgtgccataaaatgcgctttttttcataattgatgttcaaatccggcagaacaaatgtacggttgttcatcagccaggattcagcatacaggcacacgaagtacccgcagctgttaccatcattttgctttgtcaattgctgcacgtattcaacagcgaatgacgcattcccgggcactatctcagcaattattgactggatgagtgccattctctcatcactcaagctgctcatatgcagcgagtcaaggaagtatgcaccatgtgcaacatcgtagacgatgagagtccaatgatttgggaagtgaagcggcataagcacaacttcaggaacagcattcggatcatagccgaaagtgtaattcttcacgttggaaaatcgagaaatatcagttctcgatgccaaagaatccacaactactgtttttcgttgtgaaatacttgcaatgtaagctaaataggcaacaataaagctgtcatttagccattcatttggcctgttccaacaggtctcaatgaatcttgggccagagcgtgggccaagtgctgtttcgccatcacgctcgtaaaggccaattgctgcccatctccaaattttacaggcaaaatttcgcgatgtggcgaaattaattggcacagtgctgaagtcaatttttttagacacaatgtgcgagggtgccggacttagagcgttttccacactttggtccatttcagagcttttggtcatagactcgttggttttgcctcttcctttaccggcatgccctcccagttgcttaactggtcgccctccacgactttgagtcgaaacaggcgttgaagcaatagcttcatttgcaaacgtgggtttgtcacactcggtgacctttcccctttttttgcacggcgaaccttggtcactttgggtgacagcagttcgaggtgtgtcaattgaggacacagtttcttgcgttgccaaaattggcttcgctcctgctttcaagggtcttcccctttttttacttccaatggaagaagcaggtgtgcttatttgcaaagcacttaaacttggggtggtggtgccccggagagatgccgatgcctctccattcccatctgcacttccgtctgggacgggtgagcgacctgggctgacagattgctccgtccgccgtcggtatcgctcctgatcattctttcttttagcttcttgtttctctgccatctgaaaataaaaatgaagaaaatgatatgtacatgtggcaaaatatttaggaattacaaccgataaaccacactcaaatcaaata

SEQ ID NO: 15421 - DNA, 1089 bp, Heterodera glycines
tccctctctcacctctatttccgccctctgttccttccttcacgccctctgtttcttgtttcctttctctccccctcctccgtccccccccgcccactcaaatccctctataaaattttgccggttcaatttctgcgcgacttaatcttcccactatgaattattttttagtttctttctttctctcactcccctctctctcctttcccttcactctctctctctctctctcgttctaatctctcaattccattttctgttttatgcgtgccatcgtatgacaaatggtccaaaaaatgaaatgtccccctctttcaattccttcacatccgttggcctttgctgcaaatgtttcgcccctttttgggtgtggcccccgtaataataaataaatgtccgtcccttcctccgtgcgcagtaattcgtttttttaattgccccgagcaaaataataataaatgattaaatgattgactccgtccattgaattttctcagcccataaattgtgaatggaatgcctgcactgaaagtgaaaacaaacaaaaggcggaaatttacgccgaaatgaggacaaattgcaccgaaggaatgaaccgaaagagaaaaacagaagcagaaaaagttgatgattaggcaaccatcgttaattacctagttaattaatggtttcgagataaaaggaaaagccgaaactaaaatttttattcaaacgtttataatttaaaaaataaaaaaaggaataaaatttctcattgtcagctcatctcttccagtaatggaaaacccaaagataatgttgaaaaaaaatattcaacttttaccacatggcagttaataactaaggcttggcacgaaagcgcatggcactcggaaacaaaacccaaaacctccactgtttaatcaatgtcttctgtcattttcaatttaatttcagtgttttcgttgctaagataagactctgtcttctttggtcgactctttttgtttgatcagtcaatttattcttaaattccccccccccccccctcaggtttcatttcctccgatcggtacccaaaatgcgtgggttggcttcccccgcccccgt

SEQ ID NO: 15422 - DNA, 1794 bp, Heterodera glycines
ttgaactgattgagaaggtgcagcgtgaagctagcaaattgttttcaaataagtcaattaactgattgtttgattgattgaagcccatgggaatcatcgccatgttggacgaggaatgcattgtgccgaaggccagcgacaacacactggcagccaaactgttggagcagcacttgggcaagcacccgaacttcgagaaaccgaagccgcccaagggaaagcaggcggaggcacactttgccatgcggcattatgccgggacaggtgattcagtagaaaggatattcaattgaccaatcccgacgaaattctgtggaaatccaaagtgagtacattattaagtgcgctacaatgtgagtaattggctggagaagaacaaggacccgttgaacgacactttggtgggcgtgctgaaggcgtcgacggacaatgctctgctggtgcagctgtggagcgactacaccactcagattcgtgttgttttgcttttgcaaaaaatgccaatgacatttgatgtcatttcacattgggcaatttaggcattgtttaaaagggtgggggcaatttcaaaataaatggtgaagaattaaattataaaaaatcaaattaagcgagaattataaattttgtgaattgaattatcaaaatgctttttcaagaggaagcggccgcgaaacaaaccaaaggcgagaagggcggcaagaagaagggcaagggcggctccttccaaaccatttccatgatctaccgcgactcgctgaacaatctgatgactgtgagttcctttcgcatttgcactgcttgtcttactgtagctttacactacacaaaatgcacttttacggtacgccctaatccaaaaaaaaacacattggaccgtttaacacagaaaaaccataaaatgattgagtcggaggaatctccgaattggaaatattatttaaccgatctttgaaatcattataaataaataagtttaataattgttgctttagatgctcaaccaaacacatccgcacttcattcgctgtatcattccaaatgagaagaaacaagcagggctaattggtgggaaaagccctttaataaaatattattcatttaaaaagcattgctttaatggaaaaagaataattagcaaaaaaatattcttaaaaatatataaaattccctatttttactgatttagcttatataaaaaaaatgttaacgttagatgctgcacttgtgctcaaccaattgacttgcaacggcgtgctcgagggcattcgaatttgccgcaagggctttcccaaccgaacccaacatgtgccaaagacaataatcattaaatgaattgaaaaatgattaatattttccaattttcagcccgattttgtgcagcgttacgcacttttggcagcagcggaggcagccaaagacgggaaaacgaacccaaaaacggcatccaccaatatgctggcacggctggtcaagcagggcgacttgggaccggaccaattcaaaattgggcacacaaaggtgagatggacaacccacactaatgggctcattaacgaaattaattcttttgacccacttgttcaggtgtttttccgtgccggtgttgtggcacacatcgaagacctgcgcgatgctcggctgtcccaattggtcacggctttcaggcggtgtgccgatggcattgtgccaggttttgtcttagtttacagccaaatcactcaaaaatccatgccgttgttttaagtttgacgtggcacgccgacacaaacaaaatctcgcctaccgtctgat

SEQ ID NO: 15423 - DNA, 1893 bp, Heterodera glycines
cctactaaatctaaaaaatattcgaataaattggataatagtttatatttctttacaaaaatcccgtagaacagaagcaatgcccctagaatataattccaattttagaaatcaccaatacataaaaattcaggtcatgaaaaactctagcaattaaactaattttcattttttttcaattttctaaaattttaccaaatcattttgtacccaaaatccctttgtctgcatttaataaccgtgtaatatattttagtaatcccgtaatcaccatcctatatttcaaacaattgcaccacaatttgtacaataatgtccagagcattacattacattggtaaatctagttttgccgccagcgccatcgcggcgctggcgccgtcgcctaccctcgggtgacatcgtccagtccaatcctttcctctctgatccaggggatcaagttttctggattatccatccccccccccccccctctgtcccgtccagcaaataaaattttttgcacaaatcccatcgcctgcggcggctgtgggtggacgaaccaattggacacggcggacacgacgaattgtgttgtgcaatcggcgcggtcggtgggcggtgataatcgggcgtattgagatgatgcggccggcgtaaatttgtgtgtacaaatttattttccccatttttcacgcggcggcggcggcgattgggcattttatttttactaattggcccaattagcgcgctgcgcaatagtgaattctttatatatttttttggttggctaataattggcccaattagcacagcgccacaggcatcaataacaatggtcagcagaaattagtgtggcgctaatgaccgaagtagatcaatttcatagtaatttggcccatttcttctgaattccatcagagaccagcagcattctgccaaaggttttcggaaacataaatcacaggatcaattagtactaatggatcctgtatttgtctgtcattagtcattatacattgatcagtcattttcagttattgtcatagcttttcgttaatcaaacgaagtaaaagtgaaaatggtcgagcaaattattttagattttaaaactggatgaggaaaaaaattggagaatcaggaattctgggcttaaaaaacgacaaccaggctatagaaaaaaaattcaaaaatgaaaaaagtttcaattattgcattgctggaaagtggtgtctccatgaatttattctaaaattgtatggtatttgttggccggttttatcgaaaaatcataatttaacattttgatacagaattcctgaatttatattattaattaaattatgtaatctttttttttcttatttaaacaatctcatctatggcaatgacctttcatttgttggccatcttttttgctaatcgccctaagtcaaaataaaacccataaaaacaagcagattatttcggattgttttatcttaaaccttatactctgttttttcatccacattaattcaacaaagttcgccattttttggtgccatttccatttcaaaatctgaaagatataaattgatgaaagtgggtgcatggcacggcacggccacaggacgatggcaacttaagcgcctgttcaaataccaatcaaacaaatccatgggttcaactctatcacaatcagctggtcccgtttttttctgaccagatacgcacgataagcgcctcggcttacttagtagaagttgaagcccgagatgaagagcctgaagctcaaagcttttcatgaagctaattaggccataaattctcccaaaatttgcaatttttggtttttttcttttaaaatattccttttcctctaatactcaaaagatttctcgacctcataatctcgactcatagactcat

SEQ ID NO: 15424 - DNA, 1254 bp, Heterodera glycines
tttggggggggggggggggggaggggagaaaatatgtggcggaaggaagattgagagaaagtgtttgggatgggatggaccccccaaaaatggggaggagaaatttttggggggtggcgcctggtggcggaagattgcgaatcggcggatgagcaagcgcaggaataggaggagaggaggaagggatggatgaccttcgccgtgacttttgctcttccatcccttccgctactgctctccactcctcacttcatgccctcaagatggtcatgatcatcattgacaatgaatgtccccttaggcatttctattgaaaatggcaattaactaactaattaattttaattaacggtacaagggtaatttgcaataaattacaacgattaatccaatcattttttggcaaaaactggtgataacaaattaatcaaaattttgcaaaatcataaagtgaagaaaaattattgaaattttgaaaaaattgtctattttttggcaaaaaaacgcgatcgaaaagccataaaacttaatttcgaaagcgatgaaaattatggcatgaaatttggtcagtaccattgattatgactatttgtttaagtgtctaaaagttcatccattgtgacgacaataaaagttttttttattgtttctgtctgtctgtcccacaaaaatttcactttttttttttgtttccactttttaccattttgggggtaatgagtgcgcgaaatgtttttcatcgacggacggacggacaattccatcccaaaatgagtcgtccccgattttattattacaccacatacacacacacaaaaacaatacaatacgccccccgaagaaagcaaaaagagggcgcggtgaaaaggcgcgcaaggccgacgaccgaatgaatgttgacgaccgacgacccctggggggacgacaaattggtggggcggggggggggcgggagaaaatcggaaaataatcccgggaaagccaggcttgtacagcagaggtgcctccgaattttttttaaatttgaggcaaaatttataaaaaaaaaattataataatatttcccagcgtatccgtccgtcccccacctcccgcgtttgtcctcgtgccgcgagaggcgcagctcgcgcgcaacaaaaaatgtcgcgttatttgcgagttgctgatccccagccctcttccaaaaaaaaaaaattctgcgatttaaaaaatgctaccggcgctaaagctcctacttaaatttttaatacaaaa

SEQ ID NO: 15425 - DNA, 3045 bp, Heterodera glycines
  unsure (1)..(3045): unsure at all n locations
tttagaaatatgaggagaatgacgttaaattaaattctgccattatttaagaccgtcaaatccttgcaaaaaaaaaatcaacaaaatttttctttgctttgatttctttcaatgaaataaattctttattcttatcaattcttcgatcagcaattatttgaattcatattcgagttgtattaatcctgattgttcgcaagtctagtcatgaaatttttttaaccaagtatttttttttagaaagaaaaatagaagataaatttttttttttgcatgaaaaaaggaaaattatatttcagctcgtattcgaccataatttttttaaatcatttttgcattcttttttcaattaagccagtttggttcatcagtttagttctctttttatttgatgaggtttaaataatagaataattaattcattttaattttttgaattaatactactgataattaattttgcctgttagcaggcattgtcatggatgttccggttaatgattaatataccgttaaaaaactaatagaaaataatgcatctttattattttttattttcttcattaagcctaatttatgaggtacaaaatgttgtttttttttacttccttgcatttttccctctagaaaattgagtaatactcacaaaaacctatctattccattggtttagaacagtttcgaataaaattaggttcattcgaaagcttatactttgggtacccaaccacttgccaaatatttttatcttaaccttaacacattttaaatcacaacaatcgaacccaagattttaaggatttttatattttttgaaattattattattagagctcggataaaaagtcactaaaatcggaaaaaaacgtcaaaaaggcaccaaaacggcaaaatgccaaaaaaggcatttaaggcacgaaaatcacgaaaaaggcaaaaaaaggcataataaaagtcaacgtagaagcctcaaaccaagtggaaaatgcgttttttatgcttaatatatcgaaactagtgcgcagaaaaaaatgcatatgcctcaaaatccgagctctaattattatttataaattaacatgataaaataactttgtattttgttctacttttgtatattataaagctttttccattaaaccgtcttataccaacagcaaatactcagaaaacggatgagcaccaaatgccggagattgctttcccaccaatgaactcagattcaaattttgcatactttcaattatgcattaatacttaagcattattgtgtcttaattatgtgagttttatctacctattctcatgggtaacatgacaacataaccttcggtttcatttcaaaataagaaaaggtcatttaaacttaaatgtacaagcaatctgcttcggcagcactgtcaagaaaatcggaatattggtcaatagaaacacgctaaattaatatactatctttttctctagctaattgagaaaaagcattttcgccttatatttgttttcaacttttacataatgaggaatttcctgcggcgaattatttaatttttttttattacaacttttcgctattcaaaaataaaagtttcaaggcccacaatttttttatagtgcattgtggcttatctttttcgcttagaaaagcttctcgtcaaggtcatccaattcggctgcaaaaaaaaaatcaattaataaagcttcaaaaatattttcaaaaataatcattttatttttaaagaaaaataaataaaaacattaatattgtggagtggactcgaccctcctccttctttccgtttacttcttacaaaaaacttttttgccacacacggcacctttttgataaaggagttcattttcgggactctgtgtaaatggtcattcgtcattgtttagaataaataattttttttaatgagttaaactttgacggaagcaaacggacttagaattagaaaattataaactcagtgttttgaaatgtgttgttagaattccaatgtgaaaagagcggtgaagcattgagaaaaaggcaaactcatagcagaaaggactttggtccatcagtcatgcaagttccttttaaaatgaatgccttaaaacctaagaggtttttgtaatttaagtttttattgaacatttgacaagacaattataacgaagccgtaactgattgttgagcgtaatttatccaaaatggatcaaaacttaaatttgaaattatagaccccatttttattagtgatatacaaagtctcacgaaatcattttgcaattattttttcttgtttacaaaaaaataatttgaattatttaaaaaactattgacaaaaaataattaatttttgatttatttactctaatatatacatttttagccagcacttattcagcaattaaacgccttaaaatccgtgcctataaaaccaatttttttttctcaacatttcataatcatgacattattcacctatcggatataaaataaaagttttgttctggtcattccatgtgattaaaaaaattaacccaatcactgtctgtttgacaccgattctaatattttcagtcaaaatctaatcatttatgatcattattcccatgactttggtcaatcagtcacgttttgatgcttattttttaaaaattaattcaactcaaaagtagctcaatcaaagtttgaggacaaacttaaaggaaaggtggacgtgtaaggcgcaatttatcacatccgttcaatctctttctcacaccatttatccccgcttttccccatctttattccgttccataagtccaactatttaatcgggagcattctctcgataaggagtcagttagttgagcgggcagttaatcggcgagcgagagccgagagcagaacgcggcggaattattattaatgtaattggccaatatttatattattattttactccttctcgcccatccccgcacgcgtattagatctaataggcgcccatgngattacaaatttggggaggtcatttatccagggccccggattttggcttattccttttt

SEQ ID NO: 15426 - DNA, 1238 bp, Heterodera glycines
ccctttgggcatgtgtcgcaccaaagaggttcgctgactgtcccttcggggcatgtgtcgcaccaaatcggttcgctgactggcccttcggggcatatgtcgcaccaaagcggttcgctgactggcccttcggggcatgtgtcgcaccaaagcggttcgctgactggccctttgggcatgtgtcgcacaaagcggttcgctgactggccctttgggcatgtgtcgcactaaagcggttcgctgactggccctttgggcatgtgtcgcaccaaagcggttcgctgactggccctttgggcatgtgtcgcaccaaagaggttcgctgactggcccttcggggcatgtgtcgcaccaaatcggttcgctgactggccctttgggcatgtgtcgaaccaaagcggttcgctgactggcccttcggggcatatgtcgcaccaaagcggttcgctgactggcccttcggggcatgtgtcgcaccaaagcggttcgctgactggcccttcggggcatatgtcgcaccaaagcggttcgctgactggccctttgggaatgtgtcgcacaaagcggttcgctgactggccctttgggcatgtgtcgcactaaagcggttcgctgactggcccttcggggcatgtgccgcaccaaagcggttcgctgactggcccttcggggcatgtgtcgcaccaaagcggtttgctgactggccctttgggcatgtgtcgcaccaacttttggatctgcattcttaatgggatgtgtgagccctggctgatggattccagcacaggatgactacactccatggcgaagaatgatgtctttgatctttatttgtgcattttggttaataaatttttaacttgtgtgcatttattggttaattacctcatatttttgccgcatttgctattccttcctgattttttgtttcagatgccttctaagcaaaaaaaattgcggaaaaaagagcaagagcgttatcagcggcggacggagaaatctgtcagtcgggataactcacccgtctcagacgggagtgcagatgggaatggagaggcatcggcgtctctccggggcaccagcaccccaatcttaagtgctttgcaaataagcacgccggcttcttccattggaagtaaaaaaaggggaagacccttgagagccggagcgaaacccattttggtaacgcaagaaactgtgtctgccattgacacacctccgactgctttcactcaaag

SEQ ID NO: 15427 - DNA, 1403 bp, Heterodera glycines
ctctcatcgtctacgatgttgcacatggtgcatacttccttgactcgctgcatatgagcagcttgagtgatgagagaatggcactcatccagtcaataattgctgagatagtgcccgggaatgcgtcattcgctgttgaatacgtgcagaaattgacaaagcaaaatgatggtaacagctgcgggtacttcgtgtgcctgtatgctgaatcctggctgatgaacaaccgtacatttgttctgccggatttgaacatcaattatgagaagaagcgcattttatggcacataaatgagctttatggctcagatattgtgccgtttcatccaagggaaggtgtttcaacatctttcgctgttgtgtctcatcacaatggggatgtagcgcaaacttcctccaaggtcataatgccaatggaagtggatgattcaccagtgcttccttcctcggaagatactgctgttcttgcgcaagcaccagtgatcggcgaaaatcaagctgacacccacggtgttgttgcggacacaattgtccagcaagaaccaatcgcgcaggctgatgatgtaattttcatcagacctaagacgccaccaaggcgatcaatgcgcgttcaaaaaaggctttcagcttctgttagccgttcgccttcaccggcgccgaaacgccccccgccagcaaattcgctgggagtcgcaacgccgatcacacggcgttgctctgcatttcacaaggggtggcaatgcgctgcagcagcagccaaacatttcccggaatattgtgactccgggaaactcggtgacaaaaaatgcgccgattgcggtgcgcatctcttctcacatgaagacagtaccatttgctgccggaagggaagagttgtgctgccaatgcttaacccgcatcctgatgagctcaaagagctgattgtggggaataagcaatcccgtgaagggaaagaatttgtgcgacacatgtcgcgttataacaacctgttccaatttgcgagcgtttccgctggcaacaaaccaagccctgctggcggtccgatggccgttattcttaacggagaattccatcgccgcataagcagcatgcaggctggcacaactcagattcctggctttggccagttgtacattctggacccagtcgaggctatggaacagcgtcgaaacaaccccaggtttactggggagaaaatcacaaacgaagatgagtttgtgcagggtcaccagctaaatgagcagactcttgagatcttagaacaaatgatccaagtgcatcatcctgctgcgcaggcatataagcaggcgcgtgagcagctcactgagcttctccaacaacaaactccggaagagcttcgcttatgtcgcatgactttgtgaatcagcgcagggctccagctg

SEQ ID NO: 15428 - DNA, 2897 bp, Heterodera glycines
acattttcatgaaaaaatattagattttcacaagaaatttctataaattcctaaaatttttgaaaaaattgtgtaattttggatattttttgaggcatttaataaaagcaattccttaaaaatctagtattttaaaacttaacttttggtatatgttttttggaaaaaaaaaaacgattttttaggatacattttcatgaaaaaatattagattttcacgagaaatttctataaattccttaaatttttgaaaaaattgtgtaattttggatattttttgaggcatttaataaaagaattccttaaaaatttagtattttaaaaattaacttttggtatcagttttttggaaaaaaaacgattttttaggatacattttcatcaaaaaatattagattttcacgagaaatttctataaattcctaaaatttttgaaaaaattgtgtaattttggatattttttgaggcatttaataaaagaattccttaaaaatttattattttaaaaattaacttttggtatcagttttttggaaaaaaaaacgattttttaggatacattttcatcaaaaaatattagattttcacgagaaatttctataaattccttaaatttttgaaaaaattgtgtaattttggatattttttgaggcatttaataaaagaattccttaaaaatttagtattttaaaaattaacttttggtatcagttttttggaaaaaaacgattttttaggatacattttcatgaaaaaatattagattttcacaagaaatttctataaattcctaaaatttttgaaaaaaattgtgtaattttggattttttttggcatttaataaaaaattctcaaaaatttcaaaatatgtacgaaaaaatgcgaaaaagtccaaaatgtacatatgtaatatgtataaaaatcccaaaatatgtaaataaaagtcccaatttttgttcgcaagcacaaaaaataaagtgtttttccttctaattaggctatggagaatccaggaaaaaacatgtatttacataaaaaagaagccctgttaattagtttttcacaatataattttaattttctccattctccaaataatcatataaattttcgtgtttcgtgccaaaatacgaaatacgaacaccaaacatatgaaaaccacgaaaatatgaaacacgaattaatatcactggtccccatataaagagcccgtaaaggaagactgggcaggcaaaacgtaaaaatgttttgaataatttatttcttgcccaaattacaaataatttataagtgacaatgatttagttgagggcatcctcgacatttgaggaaataacttttgaggacccgacattgaatatacaaaatcaaaaataaattaaaatttattttcaatcattagaaaaaaagaaaatccctttctcaaggaccaacgggagcgaatataagctattggtccagagttttaacaatcattgcgcaagatgcgatattgcaaaggtctgagaagtgtaacaattcatcttcttggttctcaatcgcattaaagcctttatccaaattcaaactctttgtcgctgtatatttttcggtaccataaaaatgatataaaaagtggaaaaattttacggctatcaccaaattcgttaaatgaccgttaactacctcattatggacgtggtaaaaacggagtcattaccgtggttaaatgacaccaatttatagttatttatttaaccatatattttcgtagagatctgcttggggaaaattcaaattttggaaagttgttgccattttctccaatcggcaacaaatttgatgattcgaaacaggccttttaccttatactccaagaataatttgctattttttaataccagccaatttattaggttgaaacgcattatacagtaatggcattcaatctatattatccaaattgtggaccgtttgaatgtccgtcaggctagcaaaatcgttgatatgtcatttgagtttttaaataagaaacacgagaacgagacgtccaaaaaggcgaaaatacgagaaatgaaacatcgaagaatgaggaatatcccagctgatggacaaacctccatatcagggatggcattccttggcctcaaaaattttcggaaatcggaattccgtgcaaaatccactatcagcacaattaaaattgaaaaagttcttttctcaaaaattgtagaagatgatatattcacattttgaccatatgtccgcacccgtcgttctccaatttgtgggcccgtggtgaccgcaattgcgccaaccatttgcgtgccaacatggccactgttgtggcactgactgaactcgccaccggctgtggccccatgcgcaattgggagtttgtaggtgcgcgtaccgtttgagtctttttaacacatttttaactttgggtttaattaacccatgtttaatttgtaccagggggagacgaacatttcaattaaatattgttatgacctgacggcataatcaacgtccgatcattctgattggttttcgcttggcacccgcgtgctttacctttgtgagtgatcaaactgggaagtcgccgaaaaatggcttttggtgtgttttaaaaactctaagtatttgcttctcgcattttatgtccggattattttgcggttttaaggttaaattttttgtaaatattaaaattagggttgagcggtaccggtaccggtaccgaccggtaattaccggtttttttggtaccggtaccggtaccggttttttcaaaaatcaaagtatcggtaccggtttgtctagtaccggtaccgccggtaaaaatttgcactggtaagaatgggggtctgggtgagagaagagtagggaatggtgaagaaggagaaattttgaga

SEQ ID NO: 15429 - DNA, 1309 bp, Heterodera glycines
  unsure (1)..(1309): unsure at all n locations
aatgatagcgccacccttaatttttcggaatttctttctgggcgagttngattgtgaaaatttggaaaaaacgcctatctctttttctgctcaacactctagacaatcccaaccccatttacggaatgatagcgccaaccctaatttttccggaatttctttctgggcgagtttgattgtgaaaattttggaaaaacgcctatctctttttctgctcaacactctagacaattccaacactctagacaattccaaccccatttacggaataatagcgccaaccctaatttttccggaatttctttctgggcgagtttgattgtgaaaattttggaaaaacgcctatctctttttctgctcaacactctagacaattccaaccccatttacggaatgatagcgccaaccctaatttttccggaatttctttctgggcgagtttgattgtgaaaattttggaaaaacgcctatctctttttctgctcaacactctagacaattccaaccccatttacggaatgatagcgccaaccctaatttttccggaatttctttctgggcgagtttgattgtgaaaattttggaaaaacgcctatctctttttctgctcaacactctagacaattccaaccccatttacggaatgatagcgccaaccctaatttttccggaatttctttctgggcgagtttgattgtgaaaattttggaaaaacgcctatctctttttctgctcaacactctagacaattccaaccccatttacggaatgatagcgccaaccctaatttttccggaatttctttctgggcgagtttgattgtgaaaattttggaaaaacgcctatctctttttctgctcaacactctagacaattccaaccccatttacggaatgatagcgccaaccctaatttttccggaatttctttctgggcgagtttgattgtgaaaattttggaaaaacgcctatctctttttctgctcaacactctagacaattccaaccccatttacggaatgatagcgccaaccctaatttttccggaatttctttctgggcgagtttgattgtgaaaattttggaaaaacgcctatctctttttctgctcaacactctagacaattccaaccccatttacggaatgatagcgccaaccctaatttttccggaatttctttctgggcgagtttgattgtgaaaattttggaaaaacgcctatctctttttctgctcaacactctagaccaatccaaccccatttacgggatgatagcgccaaccctaatttttccggaatttctttctgg

SEQ ID NO: 15430 - DNA, 2033 bp, Heterodera glycines
acgcactcaaaggggccaaccgcagatggcacaatttgcaattgatgcgcaatcggaataaaaaaaatgcggcacagaaaaacactcactcatcaccagcagcgaattaagtgaatgccattgacaattcctgctaatgctgaagtgcaaacggagaaagtacgaccggcactaatcagcagaacgaaatgctaaacgatgaataattagcggacaaattgtgaaatcgatcagcggcacatcaaaagaaaccatccgactctattaaagcgaagcagattggggggaccaaatttcaatagtcaatttataataaaacagacatatttaaataaacgattggcaagaatcagcccctaatgggcctcggtccctcggccccgccgtttctcccaaaccaatgctctcccgactgagctaccgtgtcgcattggccttcattcactaatggtttttcaacgctcgtctttcgccgttttctccgtctgtcggcttcctttgatcatttaaaattcgttcttcgctgtccgtccgtttgatctctcaaacttcgaattccctcccaattttcaattgcttcacaggttattggcatttctctttttctgccgttttggtgataaaaattggccaggacagcacacgcaccgcctccaccgcccaccggtggcatcgccaattcccccgagggcaatttcattgcttttgggccatccccgcagggcaaatggaaaatgtttttttttggcgttttcctgctgaagttcatccatttttatttgagtgatgagacatcgaaattcccacttctccatttttgtattcatttttaaaataaatcatattttagctcagaaattgaaataaattttaaattttcattaattaaccaaaaacttcgatcgaatgatggaacaaatttcatcggaggaaaggtgtcagttttaaatgcaaattttgtattcttttttggatttgtttgaaatatttttttatgattttacatattgaaaggaagtgtccaatttcctccattccgccaattcaaattggcctttttgattttgataattaattcttaatgtgtgtcttttttttaatttggtgtctccattagcacaaattaaccgtgaataataaacaaaaagctttgattaggcggtcttttttttgtttgttttgatatcaatgaatatgatgtgacagacattaattggttatgcagtttcggagagtgcacttcgtccgccgaccctccctttgccgtggctgtcgaagaggcggacgagggcggcatttccattgaagtgccgacgcttcagggcaatgcctcgggcgatgtccacgggacgagcggctgttgccggcacattttcgtcgatgttcgtttaataattccctttttccaatttttctaatcgcttaaattcatttgttcaaaccaaatattttaatcccttcatttccactaattacccttccccttaatcagcttttgatcaatatgcgctgctccgatcgctccatttgggttctgagtgttctgctcggagttctggtgctcggctcacagacggcgcccattttcctactgaattgggttctgatcagagagccgcgtccgttgaatatcactcggcttggcggccccgtggccggcgttgacgaccagggaccactggtaagagagggaaaggaaaagcttaatttaaacaaactcttaacacaattgaaataatgaaattccggatgattttttcctttttttgccttaggaaattccgttcgaatacaatgccggatactttggcatgtgccggcaacgattgccattgaacctgagcagcgccgaagaggcaattgcggcacaagtcgaccaattggtgcccattttggcaccggacatgtgagaaaggcgaagcgggaaatactaattaaaatcacaaattattaaaattatcgaattcatttcaggtgcgtttggaactccatttacaccgggggagaagaaatcggagaatttaggtgagcga

SEQ ID NO: 15431 - DNA, 901 bp, Heterodera glycines
  unsure (1)..(901): unsure at all n locations
agaggagtgggccctttcccaaatgtctcaaattaatgaggagaaattagtggtttttaccaaacgaccgaacatcaaaaaataaatatttggtatgttttggcgaatgtgccgcttctgattcgtcgttctttcagaggttcctacactgatgtaatcgatcaacagagaggaaacggcaaatcagcgagcaacagcagtcatcgacgaggggaaaaggacaaaaaccgatgtcgggtgattatttgggtgccccatgttgtagtgcactttcatttgtttctcgctttttgtcccccaatgttttccattttgtcaagtcgtcggccgatggtggtggacgcggtcaatttggtgtacgtcaatccggagcagcatcaacttggctatgtccgttccttattcaattccgaggagcgccacgatttttcgcccattttggtggtcgctcattgcaccctgacgtctgaattcattcactgctttaccccccccccccccctccccgactgtccccgtttactcccgccacgctcccgactgatcaatcctttccatgcccctccctaatccatcataattattttgcgattgcggcggcttcgcattatcgtgtaaattaaccgcttgcaaatcgcataaatgttttggccttttgtctttgggggtaattatatgtgtttgaagtggatgattttatgatagtgcggttgtcgtgctaattaaatgagtcaatccaaagatggaattcccaattcagtctaatattattgtcaaattattcgctttccgcagtttgatcagactttttactaataaacttaattcgattaggctaaaaatgcgtcatcagccgattatgtatttcattttcttaaatattattactctcgngttttga

SEQ ID NO: 15432 - DNA, 2067 bp, Heterodera glycines
atatactcaattgtttttggcttttcctaagtgacatccccccccgggattaacaattttagcaacaaaatttgcatacgaactaggcggcaaaacaatcggagaaaagtgttgtcggccaaaatccaaaccgatgggagcagcagcaaagcaatgacgtggaagacctcctgagaagcattggcattccgtcgagggcgacgagcggcaaagagcagcaaaaagacgggagcagagaagaagctgctgcaaaagcggaccatcgcttagggaagggacagacgacggcactttcgacggaaggcgactccgtcgcggcaacggaaggccaaagcaaagcgaaacaaagcggcgccgggaaaaaagtgacgatgaaggccaaacaattgaccaatgaaaagccaatgccttaatttattagttggatttgtttcttaccaaaatgggccgcctccgaagtacaaaatgtccccccgcctcggctccgtcttcttttcattctgctgccatgccgtcttcgtcctcatccgccgttccccacctccacgactgtgccattcccaccgcttatcaactcctttcccctcggcacttcccaaagacttcggcgcctccaactgaccatttgcggatgactcatcctttcgcctcctcttttccttcgttggcttcatctttatttgtatcagcagcctttttgttattttgatttaaaatttgtggtaattcctcagaaatgcgacaattctccgatgggaattcgacagcagcaaattcagaggcatcaacaaaaaagtgaagaagtggacgaagaagtgatcaccgtggacgaagaggacactgtcgatgcggaggagcagcaacagcaggtgtcttaaacgatgactaattgaccaattaaaccgaacattaaagagcactttattaccctagttaggaaggcattatctcaaaagtgataaggtaattccgctcgtttgacaggttcacccatttcggcacaattcggccgcacactccgccgctggtccttcggtggcttccgttgcccaagtgagcgcgtggcttggcctggtggccggggaaatgcgtctgcgactccaatgtgacggcaaaaagtgggtcaaattggccaacaaacagtgaagcgctcgctgttcccctcttcagcggttcgatggtcctttcgcccaatttctcgggaagggccgtccatcggttgcaattcgtcccgggcaacgacagggaattgaccatccgacagttcgctggtgaccagctttaccaggaaaagaggtggcattggcacgggctgtccatcacggaatggacagctaattgccgtccctttcccttccaacgcattcattccgttcagatggacttggcacgatcaccaggaggagcagactttgcacgccatccgcggcatttgcttccatttcttcttctgtcgttaattacaaaattaccaaatgaagcctttttatccaccttttgtttatttgtttgtttgttgtaaattttggtgtttacttttaaatcagccaaattaacacttccttatttttggactcgtctattggcctgccagggacggtcccaagggggggggggggtacgcggggtacgtacccgccagagtttttgggagcggctttgggaggctaccagacgtgtttgataagtcgcgcgagaaacaagtgatgtgcttctgaaagttgtctcagacagagttggtccgcttcgcgaatctggattacatggcgactgcagtactaatgatggtgctttgtccggcaacatttgagatatatgattcaagatttatggaatgttgacagcagccgggaaaaaaaaccaaaattctgtccattttattgaatgattttgccccaatatttttttatgcaaatatccgagcactaccaattggcccatatatgtacgaatacacaatcttcctctaagtaacatccgaaactctggaatgagatgtagggccgatgtatgagcgcacaaaagcgcgaggcctggcactgccgggcacgtgattatttattattg

SEQ ID NO: 15433 - DNA, 999 bp, Heterodera glycines
gcccctccgcacccgaaatttttaaggaaaaatagtctttttgctgaaaattttgggtttttattgctggtacccccgcccagacctaacctcggccaagtttttcaaaaaatttcgcaaatttttcaaaaaagccaattttttgatgaaaatctgctaaaaatggctcaaaatcgcaaaatttgtcattttttggacaaaattcgttaacaaaacgcattataaaatgcaaaaattttcccggcggctcctatcggcaccgccggacccccctattccccaaatatgttttttggaaaaaccgccgcaaaaaaaagtggtgtgaaaagcaaaaaaaaaatgtcgtcgcccgggggaggtaccccttcccaagctgaaatcctgggaccgtccctgtggcctgcctcatttaaaataagcattattctgtctgtggtaattaattaaaaccaggaccaattacaaagaacattggatattcgagagttcgtcaaggctttgtgtttttgttttcatcatgcgaatgcgtcgtctttcagatccaattttttcaagggcgcttatcaacagcacccgtgatccccaaaacactcctttcttaaacaccccttaaactccaaaacccccaagtttctttgattgaagtaaaagttgtttttcttttttcgggatcggatttattagattattgccaaaaaatttataaaatattaaataaaaatttaaaaactgtgagtgattgtgataatgcaaaaaggaaaagcttcataaactaatttgagaaagttagttcggaaatcccacgagagttgggtacttttctttgttagtagggaggggagagacgacggaactttcgatgaaagacgacgccctcaattcatttaataatgtttattaattaattattaattaaatgcaatttaaagcaatgaagggggcttttcattgtccaaaaaggttagccgacatttgcggaccgaccatttgtgagtgact

SEQ ID NO: 15434 - DNA, 1091 bp, Heterodera glycines
taaagagaatacagtaccccgggggaggagacgacctttttgcgggttctgtagtggtggaccaatttggtcacagtgcgcggagtcagccccaatttgagtgccaattgttcaatgcaacgcgaattcggccgttgttcatgagcaaaaatgaacagaagcgcctccttctgcttgtccgtgatgatggtgcgctggaagcgcttaattcggctgattttagccaaagttggcgcttcctttgctattaccgggatttttttgggcggcggaaccaaagggcaaatttgagcggcgggtgtaccgtcgcttttttccagtgaaaccatcgacagcgaaggggcaacggcatcgcccgcggggcaatgcccggccttacgcttcagggcaccggtcgaaaagacattctgaagttgagccatttcaacaatggcatgtgatcagaaacggaccattggtccggcggagtttggcgtcgccggagagtttggcgaattggtctttttcaaaagggcaccgattggcgtgtgggagccgagttcgccagatgccaacccggcgatcagttgcagtgccgaagtggtcgcgttgggttgggagggaaatgccggcggcggagaagcggcggaagagcagggagaggtggagatgggcagcccaacggcgagtgcctccagcgcatttaaatggccgttgctctgttgcgtttggtgtcccccgaggggcaaagggtcggccgagtcgccaatcgctttgagtgcattcagcgcgttgttcaccgcgcaccgctgctgctcgtccgcctttagccgtcccacagagtcgggagcgtcgagaaaggcgatcattttgctgtacgactcgcgtcctgcgaaaagcacggcgcgttaaggaaaagcatagcatggccagaagaacaaacccttgtaggaaagcataacccacggcttcggcttcgtcagcaaatcggacacacaacccgaggtcatcttcagaatgtgttcgccgaaagcctgggaaaggaacaatattcaagagggaagttcaagagagactcaatcgtaataaaagatccgtaaaaatcaaataat

SEQ ID NO: 15435 - DNA, 1457 bp, Heterodera glycines
ccgagactttagggaattgtacttacattagaattcctttgcggataaaaccgggacttaatcttttcgggaatttgctagcaaaaataaaatggaaaactgagaaaatggatttgtgacttttgttccccatttgtccacagtttccgccagttaatcgaccagcgcattgacgagttggccgagttgcgcaagcggttgaagcagctgaaagcggtggacctgcagcacgacaaggaggcacgcgacgcactgcaacagcacaaggaccagcagaaggcggaggaggaggttaatgaccgtttaagggcaattttttataggaaggagagagagggtttttcgacatagactgggtctgatggggtcaaaaattgctgcaaaatgcaataaaaaacaataattgacacgtacaaatctttgtttcccattttcataattcggttctctgttatcggagcagggcaaaacgacatcggacgaattttggaccataactttttttttcgactaaattaaacattttggatatttttcgaaagcgcttgacaaattctattactcgtaaaagttaaaaaatttagttaatttagggccaaaatatcaacaaaaaaaaaaactgatttttgtagagtaaaataacaccaagaatatttacaataatttgtttaacaacgaaaataagaattgtttaaaaaatcgtccggcaactttttggtgctccccgctccatcgtacaattcaaaaccatgcacacttgtcaatttacagcttgtggacaaggacgagcagaaggcgcgcgcggctgtccaacgcgagttggcgctgctgcgccgtgcagtcgcccaactgaacgagggccgtcgcatcaaggacattggcgatctgcgcgagcgcatgctggacgctcagcgtccgttgccgtggcgagcgatggccgacgcgcgcgaagtgcacgagttccgctcggtgcaacaaaacttctactcggacaggaaggaggagctgctgcgcgagatgtaccagctgcagggtgaataattaaattgggagcaggtcgcccccccccccctccccccgatttttttttaatttccaaacagaaattttccaaaaaaaaattcttaaataatttcttactgttactaagaaaagtgcaagaaaaaaaaatttcagcgatttttttgttgagctactaagttttttcaaaaaattccaaaaaatcgctgaaaatttttaccgggggggaggacggcgggggatgaagtacaccttttgcttgaaatagtcaatctcccctattttagctagtaatgctttcgattaaaaatgggaattttcaggcaaaatgggcatgtttctgctgggccgtgaccgtgcgttccgttcctattactacatgaacaccgccttcatcattctgtgcccgcgccgtgatgagctcgccgatggatact

SEQ ID NO: 15436 - DNA, 930 bp, Heterodera glycines
ctgatggcatgcaccggcgatggcatggagcagtgcccggtgcacaacccgcccgcgagatggccacgcctgttggtctacgtggaacgggacggagtgcgcaaggtgggagaagtggaagagggctgtctaactatctgattgaatctttaaatcacaaaaaattagtattttcaaaatttgaaattttaggaaaattttttaactgccccacaattataacgtatagcggaagggggtgacgatcaaagaagttttcagagcttgagatcttgaaaaagcgatgacctagacctgactttgctaaaccctgggctgatttttggtcaaaaaatcacgcttgtcaaggcctggccctgatttttttcattatttcaaataaagaattaaaaaatctgttatttgcttaggaacgtctcaacatcttttgcattttagcttctggacgcattgaacccgcgcggttttcgcgagtcggaattggccgaaagcatttcactgtaccgcgatttttacagggtaattttccgtaaaaataccgttactaaaatttccatttttctcttttgcctcccctttcagcaggaaatggtctcactgtttgactcgacagacacactggaaatgaattggggcgcccatttgttcggttttggccacgggaagcccaaggagttgagggagacggagccaaccgagttggacctattcgtcgaagtgcgtcgccggttgctggacttggagaagctggtaggttttgtccttgtctgtcagtcatctgaggcaataagaccaattgttgtcctggttactccgagtgccaaaattgttgccgtaattatggcaccatgccgcaggaatttgctgtttctgaatcatttcttttaggatcattttttgggtcctttgaaagggctaaaatcccagttt

SEQ ID NO: 15437 - DNA, 716 bp, Heterodera glycines
tgatgatgaaaatgatggggtttcggagcatcagcatttcctatggtgctcagcaattggatatcatcatagttgatgttgtcagttgattgttgttggctctgtaaatataaatcatcataactatctgtcgaccaggacccataaaccagggatttttgtccaaaaaaaatacacaggtccagacacccaggtccaacatgaaatcataggtccaggggcttttttttcttcaaatgggcaaggtttttcaattttcaacatttctaagaaaccacacggtgtcagggcaactcgtacaatttttaatgtgtttagtcataacttttttttaaaatcaaccaaattcttcaaacttgatatctgcttttgtggatttttaatgttcttaaggggtgtctcgagacaaccccccccctcgtcgtaagaggcctcggacaccccccccccccttcgttcgtaaggggggcggctgtaaaagagggagggggtcgtcgtgtagggagggcgtaacgaaggggggtatttaaaacttgcacacaatttccttagcaaaatctatacaaaattttaaaattttcccggcggcgcctatcggcgccgctgaaccccctgtcccccctaaaagatttttaaaaccacgccgcaaaagaatgtacttggaatatgacatatcgacaaaagaaaggtcgtctgcggagaaaagattccgtccg

SEQ ID NO: 15438 - DNA, 1978 bp, Heterodera glycines
  unsure (1)..(1978): unsure at all n locations
atttggatatgctaatagataactcctagggctaccgaatgctgttaaattaattcaattaggacaaatatgagaagagttatgctncaaaaagcgggcnttggcgccccaggtgggggtttggttggcgcccagtcgtaccgatccggatagaccatactatccttctaatccaattcatccatgcataataaatgccattgacggtgcttaactatgggaaaaattttttgctggtttcataaaggttttttttttactttaagtgggtctgtctggcgcagatgggcgccagggatttgtcagaatgccgattcccaatattttagacttagaattccgatttacgactgcctaattttttgtgctgtcgaaattccaaaagccaaaaatttgggctgtcggaatgtcgatttccgaaatgttttagagggcgtcggcacacacccctgggtggggggacctcctaaattctgataggagaatttgtgcaaatcccaatgaatccgaccaccattatgccaagaatacgactatcagtgccgccattttaatgccttactctgttcgtttcggacgtttcgctcattgataatttttcgccaaaagttaagccgatttttttgcacaagcgtgaagacatcgtttcagggaacaggcacaccttaaaaatttattttaacaaaatttccatttattttcccctgttttgttttacctctccttttgtggacgttatggcacgaaaaggcattcggcatctacaaagaaaaaagtaaattaattaccccccccctaattatggcaattaattgcctttgtcgtggactgtgccgtgaaatgctgcgaatgtaaaagtccaaataagtggttttgtattccacaaaatttattcgctgtttgctgcgcttaaatttttcaaatttaaacaaattcgaattaaacattttaaatcgatggtttatacacctaacctaatttttattaaacaattaaaaaactaaatttaagtttttaaattaattaaatggtaaactcattaacccattatttatttttataaattgatcaatatcaatttaaacaaaaatattatcttgaaattatttaataaattatgaaaattttaatttgaatggaaattaaacaaaaacataattcgctaattgaataataattttaaatcttattaaaataactattaaattgcatttaattatttagtaaattatgattaaaaatcaaaataaatggaataattaattaaaaaaggaaaataaataaacaatatcagttaatgacattttaaatcaaattaaattctgattaaaataattaattaattagcagcagcccaatgtttaccggatattccatgttgttaagccctttaagaagcaccaaaatatgctcgtccacttgcgctgtccgataaatgtattttcggatagccctaatttggttgccctaattaagaaaaaaaaaatttaaaaatttaatttttttttttttattatttttacaaggggttcctccttgtcatgacaaatgtcggccaatttaattttcctcaaattgtagtaatccgtgtcaatttcttctgcttgatgttcgcctaaattaagggtggaaaagaaattagaaatttaacccaatttaaaaaaaaatgaaattaattattacaattttgaaaatacccaaaaattttgatggattaactcttcttttcactcggagttttatttgaaaaattgagaaattcttttaaaatatttaacaaatgcaaagtgaaattttttgaaaaaatgatgtttttttcaaaaaaaaaatagaatttttaaatattttttaacggaatattaagaaaaaattgttgaaaaaatcaaaaattaaaaaatctttttttttcgagaattttaagttttaggcggaaggagcaaaagctacacgcaaacagattacgtcttttggcacaaat

SEQ ID NO: 15439 - DNA, 2586 bp, Heterodera glycines
aataaaaaactcagttagtttcggttccaggaaatcactaaattttttatcctaaaaaatacaaaaacaagcaaaactgatcattccaacaaaagcatttttatgagcaagtcaaaaaatcattttacaattcataattatcgatcgatcgatcatttcttaacaattcaatcattcacttctactgctgatcacttgggccgggagttgcgtagagaagcctaaaaatagaaaagcaatcaatttgaatttttgaataattattcgctgtccccaatttgacgctcactattaatttgaatgtcaattctgttccgttggtcataaatttcccatccaatcgcttcctcttcccattttgtccatttgctttcgtctcgcgcaattggacaacggatcagcagcaaacgatggttaatccttttgaatgccaattgttcacgagtgaattcgttggtcagaacgaatggcacaacggagtcaacaaaagggggaagaaacgaaaagacaatgatgaaattggaaggagatgaagccgaggcaaaagcctaaaatacgtgaaaattgtgctctattgcagttcacacaaaacaaaaatttttcgcaactttagtgcaccataacttttttaagaagcatccaaattaaacattcttatcacatccggcatccatttcggccaattccgaaacctgggtccaattcaaacaaaaaatcgaaattccaaatttcgcatttttggttcaaaatcggtttaaacatacgaaaacaaactgaaaacaaccaattctgcaataaaatatctttaatccgttagactaaaaatgcgaaattctaaaatttaaagtttccactttttgttcgaattcgggtccgggtttcggaattcgccgaaatggatgcaggattcgtgatcagttacctcgaaaagccaaggaaacttgttttttttggcaaaaagattgaaaatcttggtatcattcggaagatttgatgtgaagaagctttttctatgcaaaatgctaaccgaattgatgagttataaaaaagatatgggcgttagaaaattttgttttttgaataaattttcaataggttttcttgcttctcacgaaggttgtttaatccagcaaagatttattacaaattgttgagttgaatataaatggactttctattatgcagggttctcattcgtccttgaatggcaaggacgtccttgaaattgggccctctttcttgaaccgggaatttcccaagaaaaatttttttgaaaaaaaacttgaaaatttgagtgcactttgttatgaaaaattgcctattttctaaaatgtacccataaaaatttttaaattttcgtttgggaggagtaaatcgaaaaatttttccattattcgatggaaaacgtttaaaaattttaatttctggggcggggttgatattggaattttctgattcccaaaattctggattttttaataaattaaaatttcttaaattttttgcttttaatcgctgtttttgtggcgctgttttccaaaaaacttttggtaacattggtgagggggcggcagggtccggcggtgccgataggcgccgctggaaaaatttttaaattttgagtgaaatatgttaacagaatttgtcaaaaaatgaccaatatttggttaatttgtgattttttagcctgtttaaaaattaaataaaaataaacttggaatatttttttattaattaaaatttcattacataaaaattataaaggaaataagaaaaatatgctgtcttagtggggaattgaaccaaagcgaaaaatcatgaaaagcagaaggtgtagccactagaccacataacgatgtaaacaaaagcaataaacaaataaataatttaatttttttctcaaaaatttctccttctcaccaattcccttctcttttctcacccagacccccattcttaccagtgcttatttagtcccgccgggaccgggactggcaaaaccgggaccgggatttctgtttttcgaaaaaccgggatcgggacgggacctgaaaaaaccgggaattcccgtcccggtcccgaccaactctacttttttgttaggtattttgatcggcacgtaacttgaagatgaacagttttggcatttgtaagaattggggtttcagggtacaaagatgtcggaacccgtcagttgggccctcacgattgggcccacacgtttgggccccagcatgtttttccacgatagctgttttctttggcatccaaatcgaacattcttggtatcattcgaaagctcttaacatgctctattagccttaccaaaagcgaaaagattttcaagcctggaaaaaattttattaaaaaaacttcaaaaatttcaactttttgcaattttcatgtataacttttttggtaattgtctaatcgcgaagcaataccttagaaaaagcttctaaacatgttaagctttcgaataccaagtttattggatttgggtgacagaaaaaagttatagtggaaaaatatgctggggcccaaaggaggccagggatgttgcaaattgaagaataaaagaatcag

SEQ ID NO: 15440 - DNA, 568 bp, Heterodera glycines
gctggtgggttaagtcccggcgattgaaatgccggagaattgagtcccggcgattgggatgtagaggaattgctgagatagagttccgatgagtgtatgtgtatgccggagatccagtgatgaaatgccgagggttggcacaaccgtactaccgctagttgtttaaagaatggatattttttagatcagggttaccatcgtccatgctccgtttccaaggacgggtatgccgatttgcaagaacatagtggggaaaattcatgaaaaccaaggacatttaaatttttattatatgtatgaaagaaaaatggttaataatttactcaaaggcttgcatttttcaccggaatggatttttttctacatttttttgatttcactgatttttcctcatttcaccgcatatgctgtggcgcgctttgttccaaaaaatttccggggaacagggaggggggggggggggggtcaggcagtgtttgttagcagattttgtctaaaaatgaccaaattttgagattttgggcaattaaatttgcattttatttacataatgcataatttaatccaa

SEQ ID NO: 15441 - DNA, 1429 bp, Heterodera glycines
agatttagtaccaaaagatatttttttaatggtcttctgttttaaaatttgaaacccaaatccagggttaaacggctcacttttttgtgtgcattatttgggtattattttgagtggaaaatttaaaaaaaaggataacaaaaatgatttcctgggactcattttgccgtggcaaacttttccttccctctcccatttccgcgctcatctaatggtcggtgtctcaattaggaattagggggggggggcgggggcggggaatgaatcttcatccatccccccaggggcatggcgcgccactgccggcggatgccgcctttggcagttctgtgtctgtgcctatggcgtgtgccgtgccatatccgtcctccagtcgtcgttgctgctgttggatttatttggcacggaattgtcgctgtgccgggccgatggggtgggagggcatttggcccgaggcacaatgccatgccactgaaattgacacttccgcactacgccgagggggcggcagagggaaatgaatgaatggttaatgagttcaaatcccatcccatcttcatcatttttgcccccgccggcggagggcggctaaaaacaaaaacttttaatggacaaaaaatttgccattggcatgaaaaattaaaagcaaaaaaaaaaattggcattttataatattatgtgttcatcatcatataccatatcaattagggattgaattttagggaaatgcctaaaaacttttgcgtatttaaaactttgagcatttttatgccttttttggtgcctattttacgatttttttttttgcctaaaagtgcaatcccaaatcaacttcatttatctacatattattttggttggaatcttctcttttttgaaattgcacattaattaatatgcgtatcaaattgcatttgtttgccccgggcggacaaaaaaaaaagagtccgccgttctctttccgatgagttcttgtgccgtatgcaaatggcatttgttgggttttgaaaaaaaaaaattaaatgatccttttatgtctaacacaaataattttttaaatttaatatattctctcctttcctctgaaatttacgaaaaaaattacgaaattgcgaaacgcgaaagcgaaattttttctacaacttttttaatagtcaaaatcataaagcaaaaatcatttttttttgtaaaattctattccaaattttaaaaatcaataaaaagcttttttgaggcgcgctttttccaaaaaactttttgggaagagggagcaggcggtgccggtaggcgccgccgggaaaattcttaaaatttgaataaagtttgttgacagattttcactaaaaactgataaaattttgcgatttttgcatcttttctaaggaaaaataggagttttgggggcgcggcggtgccgataggcgccgct

SEQ ID NO: 15442 - DNA, 2266 bp, Heterodera glycines
  unsure (1)..(2266): unsure at all n locations
tttataggtaaaanttttgaaaaattnttagggggaattttcgtttcaatgtcttagggggngnaaaagncgcgnngcgcgcccccttcgaaatgcgaaagcgaaagcccatccctggtgtggggttaccataactttttggtctgcgaggagcttgttcctgtattatttggaacccgcaaattctgggaaataacaccaggaacttttatacaaaaaaacgaacaacaaatattcaggaaaaaaaaaatttgcatttcaagaaaaatctcttcaacacgttgaaaacccacaaaaaatgaattattgtaaaattagttaatgcaaagtctaaattataattgttttggcacaacaaagtgcgttgtggcaaattgctgaatgaaaaactgcaagctttaagtgaatttttgcattttccaaggcaattgagaagggggggggagacgggagctctttttttgccgaaattcccacggattaaacacgccaaaattggtggaaaatgccgagaacggacagatggaaattggcaccatcagttctcccaattcacagtgcaaggatggcaacactttttgtgaagcagcattgatttatttgctgctttccgggcccggggtggacactttgggcgttggaggggaggggggaatttggcatcatcaaaaagagtgccaccccccttggcggggggggggggcttaaaatttcattttttcccatccattcaaaagatgagggggggggggggggggggagatacaaatccctgaaaaaatttttgccaaaaaataattgcatttttattagtgttttttgagagtaatctgttttctctgtttgacaacaggggtccaatttttttgttgagttttcctattttccgggactcctaggggccagaaaaatacgaaaaactttcttttaaataggtcattaagttcttttttgaatttttacggcaaatttttcgaatttatatgggaaacatttttcttaattgtgtgaaaatattgtacatttccctcgtcctcctccttttaaatgatgatgattttttaacgaaatgccaatgtgccaacattttgtgccgacaaaattggcacaatttggagaaaaagtgtgggtgtgcaaatggtggaaaaagcggcgggccggcgcgacggcaaaacggcgcgggacaattgccataatttggggttggcagcgaaatttttgccatcgccatttgaacgaacgaacgatggatgaaagaattaacataattaatctaccaatttgagagattagtttttcaaaaacggattggtaaaaattggaaaaaagtttacacgaaaacgggtgtcggacgcgattatcggcatttcccctttcgcgtaaaaagccaaaaacggcaaaatgtgcaaaaaagaatcgccaattttaattaggattttggaaaaaaggaggtttccctccatgaattaaagttatttgaaaaatggactaatattatacgaacatttaaatttgttttttattatttattttttaatcaaatttcccttaattgggtgggaataaaaataattaacagaaaataattgatgctcaatgatcgatcaaacacttcttgccacactcaatcagtttcagacgtttagtttacgttcggcagcggctaaaaacgaaaaaaattataaaactttgcttaattaaaaatttaaattttcagttttaggcattctttttttccatttattttttgccctattttaaattaaaattttaaataaataatttttatgaattttttcctacatttttttgcctgcccaatctcgcggaatcctctcgcgaacggattgaggtcgattttcttgtcgcagacctgcaagtcaaagtcaaacaattatttttctcaaatccatggagtaattttcctcttaattaaaattgtgatgaattttctcgcgctccctcagagagtcggattttcttcgtcttttaattttaaaattagttgggctgttcgagagtcgaaattctccaagactcgagaaccaagaccaataattgacctcgagacagagaccccaaaaagttcccgaaatttctcgattcgagaaacccgagcagccatataaatcacccctgtctttctcggattggggggggtggtttagaaaaaacccgccacaaagggggtgttagtcaaaaaaccgccaaatgagaccctttattttttctcatgtcttttactgattattttgtataaaattat

SEQ ID NO: 15443 - DNA, 1251 bp, Heterodera glycines
  unsure (1)..(1251): unsure at all n locations
acatcaactcaatttgcttgtttaatggcgtcttcttatgtgttctgcgcaatactttggcctcgactcaaatgctttgcgactgtatgattcagggcgtttcgtatgtgggcgaattttcttacttttccgtggacccgatagaaagaccgaaaaaaaaggtgtgtcgaatggtattatgtacggtcgattatagtccgatgttatattgacctctcccatttttgacaaaaatattttttgttcatggtaaataagccctttttccaacaaaataagcttttgaactttttagcgaaaaaattgagctaacatttgtattttgaccgggctaaatcgggcttaaattttgccagtgaaactgtcaaaaattggaaaaatttaaaattattttggcaaaatgtctttttcaaagtgtgaagttagaactgaaggaatttttgaaaatttgtacagtttcaacagattaaaatttttcacggcgatgactaacggtaaaatttgatccaaattagtaattttttgttaaaatctcttaaaatgggtaaaatacagaaaattcaaaattttatcgcccatcactaaaaatcattattcttttaaaaattgaataaattggaaaatttgaaaaaagtcgatttacatcactttacctaattataagctaaaataaaagactaccaatttttatgttattgatcaaaattcaacaaatttttaaaaatgtccgggcccgccagggcgccctacagtacggtctctggtccgagtattgcctgcacgaaaaaaagcttggctaatttttaaccattcgggtcaagccggttattacattttataaaaaataatttaataaattttagccaaacttgtctggtttttacaaagaagaaattaaaacagctgctatgcgagaattatgcaatttgctgcacatttcatcaatggagccaatgatggaaaaactaaaaaaagtgagggcattttaatttggaaatgcttgctcagagatgtgccgtatagtgactaccgttgccattaagtagaattttttttctaaaagagaccccaaaaatctatttaaaaacaacataaacagaaattcaataaacccatttaattttgtaaaatttatttgcagtatttttctgacgtttacattcccatcgactcttaccacttcctatacagctacgcgtgcggcccatttaatattcggaactgtttagtgtgctgctanatattcaaaag

SEQ ID NO: 15444 - DNA, 1392 bp, Heterodera glycines
tgagatattcgcgaacttaggattatgaattatacaaacataaaattctgcaatttaaacaaggaattccaaaattttaaaacacatgtaattaaaaaacagtctttactaaaacggaaaagaatcatttaaaattttacgccaaattgccagctcccacccttcctattaaaaagtgcgattgcgacggctgtacgctgcaactccgtttcccaatgtctctcgatgataaatggaaggatgaagaagaacaaatacattttgataagaatgctctcttcattatcctccgcgagaatgacattgagtaaatgacgtcaaaagaagcgaaatttaattttggattatttagggaaaattgccgaccgccttttgtccaaacaagcgatcaatgaatgaatcaattggtaatgaataggaatcatatttttaggtttttacctaaaacatgtttttcggttattgtaaagctagttttcgagtttttagactattttttaggtttttattttgaaaaaaatttccataatatttttgctttttgaagaaaaatttcaattttacaaccctaaattcggaaatgtttggcgcttattttctcatttttactaccttttttgggggttttagaacctaaaaactaactattttggcagtttttagaaccaaaaaattgcatccccaatagagactagcgcgcgcgggacgggatcccgcgcgggattttgcgggatcccagactgcaatcgcgcatttttataaaaggcgggatttgcagttaatcccgcgggatccatcacccaaaaattttggattgcaatcccgtagcgtgatccgcagatttcgagtaatgaatgaaggcctatgctcataggattttttacttacaaatatttcatgcattcttatacactttccaattagaatttaaagtagtgaattttaggcgaaattccaagcgctgaaaacacaaaaatggcgacggctccaatgacaataaaaactatcataatgatccagtttaaatcgaaagatgcaagtttttttcaagtcaaaaaatataattattaattaaacattttcgagataaactttcgacaagaaattattggcacttaaaattcgaaaacaatttggatgttctatttaagggtcggggtcgttttcgtacgagtagaaaaaagatataacactgttaaatagatttaatgttttgtgtcaattgaatttaattgtatttaaattatgcaacaaaattaatcggcttaagccataaagtccattattttgccaacacttcttcatgtcatggccaaacacaacgccatttctcgttcgatgcactagacccaactgcaaatgagaaaaatatacataatttatatttaaact

SEQ ID NO: 15445 - DNA, 1437 bp, Heterodera glycines
ttggaaaagtatcgttcatcccactaattgagtgtttattattaattgaaattttatgataaaccttattatctcagaaagctatctaatcgattcgaatgttttcatcccggttaactagagcaacgaaaattggtttgaatcgtgaagtttatcatttctaactcacctctcaaactgaggtgcacaacttgcaggatcgcgaagagccagagtcagtgccctcggtgcaggaaaattattaacatttcaaatatttttcaattactagataaatctgccataaaacgtcatcttatctttcatagcgacaatttgacctatcatatttattcgtacatgaccacatctgtgccattcttctcagggatactccgcggtaaagtacatacttccagtgcaatgacgcgccgccccccccaaaaactttttaaaaatttgaaaaatttcaagaaaaatcagaaaatttttttatatatgaaatttcaaagtaaaaaaaaatttttttaatataattttttgggtttaaaatttcctaaaacacgtatcagggtgttttgagacagctggtcacaaatatgtcaactattttgactaattcggaatctcggactctcgaattggtcgaaatggatgcggtattcgtgattagtgacctcgaaaatccacacatacttgttttcaggacttttacaacaaaaataatatatataatttggtcaaaaaatgggaaataaatgaagagagtaccttttttggacaatactgttaacaagtcgcattaaacattacaaaattttcactggcggcgcctagcgccatcgccggtctccccccccccatgttgctcaaatttttttttgaataagtgtgccataagtttttaaaaaacaaaaaaaggttgcattactttgcgcttaatcccaagctaaataggtgactactatataaatttgatgatgacttgcctgggaaagtcgtctcaaaagcgggtcaaagtccgccttgaacaacggagggttttgcacagaaacaccttgggccgacgatcggtgagtggcatatgaagccaattgtaaagccgatgccgatcattaatttcttcgtgagtgttgttgcgctcttctgggaacagccaattgtccacacagatccgatggagattcggaaatcccaatagccccgaaggaagaatgccgcacataagcgagaaatggttcagcgacaaattaattgccttgatgtgcgcccagccaatggcagtcatgatttgaccggcaaaaagccgacgactgttcagtccatctaaggcaacgcctgtcaacgacacaccgccgctaaagaagtcattattttcgcgaaactggagcactgagtcattaacgcatctgaagtttatatttattaaaatatgtaggacattcccatggttgaaca

SEQ ID NO: 15446 - DNA, 1629 bp, Heterodera glycines
tttcagaaggatgtgatgtccagcagaaaacatgatgaatttcagatcttaaacgtgaaaatcattctaaaacgttttttactacttttttctgaaggtatgcaatgaattagatatcgaaatatcggatgttttgcatcggtttcatttagttgtaaaaaattctacaggcttagctttcatttgatcccaaagttatggcctaacaaactgaggatcgtctttggttggacgctcttacgcctgttgggtatttaatttttcggttataaaatggtgtcaaccgccgattaaaaagacggcataatcattcaccagcaggatgaaatctttataagtattagtatcaaagcttagttcaacaaataacaaggtaaattgtgttttaagcaattattttggaggtttttgagaatatgaaaccgccgcaaaatgatggtcgatttcacggagagcacagaatggctgtggctttttgttcattcattcgttccttagaaattagcaccgtcctccctttttgtcagctcagagagtgcacggcacaacgaacacgaggcccgactcgccaccgcaataagtgagtcccacgcatttgcgactgaactcgcaaaatgtgagcgcttcgagacgacgaccggggcaaacttcaggggcacgcctccgacaaattcgctcctaaaaaaagtaaaactcaactgggaattggaacacttgagctgtattgaattttaattatatttgagaatatccgtttatcattcgtagtacattttcctggtccattaatgcgcagtcgcccaggcgaacttctaacctccgataagtacaacactcgtcgtgtgagaagcaaaaattctgtaaaaatatcattttcatttaaacagtttacgataattgtcgtttttttgtttgccttattattgtcttcgctttctgcaattgatttgtcatgcattatcaagtgcaaaagtgtacggccctgcatgagattttcaccatctgtcagttatttattggtcattaaacattttaaagaaacaaaaaagttgaaagcaccacctccctgcccattcggtgccatcctcccgttaagcgaacatgccattcgaccatcggcacccacagagacgcacagcccagacagctgacacacactgacgcatgtgttctggatttgatggctgaaagggaaaaaaggggtaaaagtgggaattagagagccagtttcgaccaatttgagagagttgtggcacaaatttggtccttttcagactcatcgtccggcgaagaagtcacccaaatgtaagaaggcgcctgaaatcggatagaaagggatgaagtgcattgggtaccggtaggaaggacctgctgcgttattccaaaataggaaaaagtggatgattcgaaactgatgaggccgggaaagatcaacggttgcgagcagcactttgcgccgcaggttttgttcaggtcgcactccaaaacaggatgggacgaaccaaactgaaagggaattacactaaaaactgattccgagcattcacttggtcagattcggacggaagaatgaaggcgtaaatacgaaaaagacgacgacggaaggaaatggcaactgaaaaaagaaaa

SEQ ID NO: 15447 - DNA, 1878 bp, Heterodera glycines
  unsure (1)..(1878): unsure at all n locations
gatcatcattagcatgataaataacagaacacataaattaataaacaaaagagcagccagggaaccccgaacncatggcaaagagagacattcggcggaaagaaccactgagacatacggatatggaacagctaatttgacaaacatttaaagtgctgtcatcggacattggaggatggactaaagaaaacattgcatccgactcaaaaacgcatggcaaggaattgttgacatctcggctttgagatttttcaacgagactttcaatttccgatggaacgctaagagaaaaactcaaattaaaatttgaaaaaattagatgtatattatttacctgtaaatgtttatgcctccgctgtgggtaccaaccgctaacaagcccagagattcctttgtaaattcggtaaaactttggcgagatgttgaaggggtttcagagtgatgcaatctttgaatggcacgctaaatttaagtgtaatttgatgaagcttgaaataacattctgtacgggtaatgttcggaaggattcgaattcgtcgtcaaatattggacaccaattcagtgaacaaatgtgctgggcctttgggacacgcaacaaacactcaaaccgtgctatttcactataatgagcagagtgtggcttattggcatattttgtgattacttgggattcttcggattggtcgtccacagttggacaaatgcgtcttgactttcgctttccatttttagcattttttcatcggcgaaagtgccaatggcaatcagttctcgtcctttaataacatttaatgcttttcaaccgaatataaattattataatatccttcaccagggaagaaaagcaaaaaaaatgtccgggttctccccaaagaaatttattttggttacgggcctgacatgacccaaaaacctactttttaaatgacaaaatcttgatcgatccctacccttttattttatgtgttcacctttttttgtcgctcgtgggcaaattgccaatgcagacaaaggaccaccgcagaaaaaggcttgggcaatacgttgatgacattttccctgccggagaaccaaacggtcgggagtgggcactgaacctgacaaaatcaaattcgaaagtgagggaaggcaatcaatttgctgacctgaaatgccattcgcattttctcgcttcattcgtggatccattggtggtggtaaactgttgtagatgtcaacaacctaagagaaagcacaacaaaaaatgcgtaatcagatgtaaaagacatttcattctgacctgagcactttcaaatcgttccgcaacagcaggcgcaacatccacttcataagtgaaagtccgagctgtgaatatgggcagtcgggcactgactgtgaaagggagtgtctgggcaccggcggcggagtgcccttcgttggcattggcctcctcgtcatgtcgccttgtgaatgtgggcggctgggcaccggtggtggagtgcacttcgttagcattggcttcctcgtcgtgccctttcttcgatcgttggtccggtgctttgtctgcttcttttctcctctcattgcgcttcttctcctcccccgtcgacccatttgttacttgcggagtcgtaaattccctctccgtttgattttcactaatttctctactttttgcaatttgaaaattgtccaatgaactaaaaaatgtttggtattaattatcaaatcacgatcatttgttttgcctcttcgatttgttgccgctgaatgttccttccctggcaagtgaggaagaagtgcagggacggtcagaagcccattgaaaggaattacgttgtgaagacggtcgaacgaaatgcgaggaattattgggtgggggaagaacagacacagtgt

SEQ ID NO: 15448 - DNA, 3344 bp, Heterodera glycines
  unsure (1)..(3344): unsure at all n locations
gccaagattaccttccccttatcttgctatattgtttagccaatggaaaacgtttagacttgtatttgtgtaactgattctacacagaataatgcaaatgttgaagccttgcaaactcaaaataaatttaaaaaatgctactaacaaattacgttgattaatcatattcaaatataattagttaaaagattaaattaaaaaccaatataaaatatttagtttgcttaataaaatttattttgctttgcttgattgctgtggctttgtgtgtatacggtttagggccgaaacacaaataataattaatttaaataaattaacccaaagagacaccgtactgatgaggcacggtctctttcggttaaatttgcacgtttcgcgaagtgcccatttttgcactgtcgcgaaacgccccatttttacaccatttttgcactgtcgcgaagtgcccatttttgcactgtcgcgaagtgcccatttttgcactgtcgcgaagtgcaccaattttatacccccccccatttttgcacttgtcgcgaaataacatagcacgggtacggacaattatttatctaactgttatataaaattttcaaatagaacgaagcgtttaaaataaattttacgcttttcatggattaaatttgaaattatggcaccaaaagctttcaatgagacaaacagaaagagcagattggtagcaagcagaaaagaacaaatcggcaaaatgccttctatttttgttttaaaatcgggctctataaactgtaaaagctttttttttttttgattttttaaataaatttctatttattatacatactaatacatattgttgaagaccctgatttttggtgccaaaatctgtttgtttttttacccaaatgccctcctgatttaaacatttcaaatgagaccatggcccaaaaaataaccccttatatgttgtgtatgtgtgctaaaaagaagtttctctattgcgagaattgttcagaaaataagtaatttttatgcgtcttatccaacaataatataagcggaaaaaatgatcgattacattttaatagacgtccaatcaaatatcattagggcatagataattaattatatggaaatgcattgttttttctagaccgtgagaggcctgaaacgcaggaaaaacaatgttttagcttggtttgatgcttcttctagaatggatttctatatcacgatttaccgtatatgctctaattatagcccagtctctattaatcccgcagtctccaattatcccccagtctacgaggtgttttgaaaaataatccttctatcataatcgcccagtctctaattattctccttttctgaggaggttgaaaaataatcccccatgggctataattagagcatatacggtatgtccatatttttctatgtcctaatgaccatattcaatttctcatcaggaataaaattgttaattcccattattaaaaaataaatatagtaattgtgttaattcccatcattaaaaaaatactaattatgtattgttcgtaattgataatgatttgcaaacgaaatgataggtaatcncaaaaaataaaattagtaattgttcgtagtaattggtaatggatatggcaatcaaatgcatctgtcatggcagtgtaacgaaatgataggtaaccccagcttcatcagtgacgaaatttgctggtggttacaatggcctgagaaaattgaaaaatttgaattcaatgaacatatttaattattatggttacagcagattgtatgcactaaaaaatgccaaatatgctcgtaaaatatgccataaaaatccgaaaaatgccaaaagaagcgcattaaaatatgccctactaaaaactgacaaaaaacgaatttaagccataaaaaatgtataaattgtatataaataggaatagtatgacaaacatattcaaaagaatggctaaataaaaacgtatttaaaaaaaaataaataaaaatgtttcatttttgaatttacgaacgtaaatttttgtgtattttcgaattttaagatatataaagggtaaaaacccaactcgtactattttagagtatctttttttctctgttctctgataacttaacgctgtctcgcttttttctgtttctatatttactacataatagtacgagttgggtttcgtccatataaagtcaatttcttcggctgtgtatctttcgattttaatgcattttttaattaaaaaatttttaaaaaatggtcaaaatatgatttatttattcttgttttaaaatcgtgccctctaaactacaagtgccaatttttagcgtagaaaagctatttttgagccctcttttttcgtttattcataaaaaataaaaaagtcatcagaagggcgaaaaccaaaaggaaaaaatccggtgaaaaatcacccaagggcagtttttttttgtagtcagccaatcgaatgcggatttttcaaaaatgggtttaaaccataaaaaatgtaaaaaagaaaaatgcaaatccctaagaaaatccgcttaaaatcacccaaggcactcctcgtcgttaggcaattgaatctggacagtgttcaaacggttcactatttcgtactcccactgaaccggcaccgcctccccaacaaaaatttccgggcggcgcttcagcagccaattgtaagtttggtgtgccacttgttgcagtgccaacttttccccggtctgttcgttcaccagttcgaacggttcaattgtttgttcttccaagtaaaaataaatgttgtaactgccagaaggagtggtggcactgagaaatgcctataaataaacaatttttttatggattttgggggcaaatcggcggtgttggttggatgatcccaaaaaccacaaatgactatatttattagagctcgacatttaaaaaaaaagttctggacctgaattccatgttggttggacctggatttctggacaaaattccaagaaaatcctggtccaggaaaaggaatttgccaaaattggggtttggaacctggatccaggaaaatccaggactggatccaggtcccaggtcgggctctaatatttcaatcaatgtctctgcctcaaagatctagaccaacatataaaacccgcgaagatgcacgaagaaagaaaaggtggtggccattcccggtccgaccttcttgaactggtcgatccagttttcgaatggttgnccgtcggtgacacatttttaacaaaatgtctaatgatttttttgaaatttttaaannttttcgagggtgaggatagcaaaacaaggaagcatacttagattttctggacaaaaacccagg

SEQ ID NO: 15449 - DNA, 1038 bp, Heterodera glycines
aaacgcaattattgaaaatcttttccaccatttttgtctgttttccttccgatttggtcgtcgcattcacagaaatggccaccacttgggcggacatccaacggctagcggccgatttgcagagagttcagctggcagaagggacgaaacggtgggcgatttgaccttggggttttggctgctttgctttggttttgattcattggttcaaagtccactacgaattgtacttttagcctttctgaagcaaattgcgtggaattagtgaccatgctaatggccatggaaaaagtgcatttggtaattacaacggacggaaaggtggggagggagggacatggtcaactcaatgaaaacctgttaatttgtaaaatatgcaggagtttgtcacgcgtcggcatttggtcaccgaatgtgccaacgaatgtttggcctccggcggtcgcattgcgttgacggaattggctgcccaactcagcgtcgacttggaccacattcagacggcggtcaaccaattgttggcaatgaatcggcactaccgaatgaccgaagacgaaaataccgtcgaagacatttcgacgcccgccgaattcgtcgtctgtgccggggaactcatccaccggtcattttttgagcataatttcctttgaatttattaagctttagtgaatttatcaacgatttgtgctttcgtcttaatgcacgtctcacggaatttggccaaatgtcactgtttcaactgaccaaacaatgggaagtgcgttaagggaatggcactcatgaagaatgattagtccgataaaattccccctccccccggcatagcaatagcactcaattgatttacgaaaaaaaaattaaacgaaattgttttaatccggacaaataattttaacattaaattaaaatattttccttgtattgtcagttttacattttcagttgcccactgaactgttcaactttcacattttgcctgaaattagctcccatccgtccgcgcgcatttgtgccattcgtttcgaggacattctctgc

SEQ ID NO: 15450 - DNA, 965 bp, Heterodera glycines
  unsure (1)..(965): unsure at all n locations
ttttcagattttcttcagaccaaccacttttgttannattgatgacattttgccaccacaatttacttttttgacggacggagattatgccaaaattgtcgaacggcttcaaaagcgcggaaatggcgcgaatttgcggtgataattccgcactttcttttcgcttttcgaattccgtcgttttagcgccacatgcgatcgttcggtcgtttttgagcaccctcaactgatggacaattggttgaaatcgcttgaagaatttgtgcggaagcgagcagcaaaagacgcacccgaactgagaaaggcgcatttggacacacttttgggggcaaaaaagacggagaaacagcaaaaacagcagcaaaaagtgggtggaggggggggggggaaagaaattaatacaaaaataattgatattctctcataaaggacgaatgggagacggacaaaccgacggggagcaaaaagggaaaaagtgcgggagcaaaaaggggagggggaacggcggcagggaaacggaggggaggcggtgggacagagacggaatcacagcccaaaaatggtaagggaagcggacgcagggacacgcaaggctagccaaccatgctttctggggtgtatgccctgcgacagtcccaggattaaggattttcgaggcttgcgggtgtgggtggggttggacatgagaagacaattcgcaatccgtagccaaaaaaccgggttgacggataacctttgattgttttaagtttcttgttattccataaaaatattcaccttttggtacttatttggtttaggggacacttttgacatacattttctagtctatatatgtgtttttgaaattaatgaaaataagtttaaggggtttttagggtcgctgatcaccatacatgtactagtacaaggggtgcgccagtcagacccccatacgtcggacgttggcgcagggggggtgcgcc

SEQ ID NO: 15451 - DNA, 3183 bp, Heterodera glycines
tgctgctcagtgaatgcttttgctcggttggcgccatcctccggcggccgaaagtaaaaatgccatttttttttgcaaaattttccattttcacctcccctttttatttcagtgtaacaagtccaagtacgacgggatcaacaggttcaactatgacgacaacaacaacgacgaccactaccaccaccagcagcacgccaacgacgccaaaggggacgacgacggaaaattggagcgaatcattagcggctgctgttggcggaaagaccacacttgtgctgatcatcgttgggtgcgtttgtccttgtttaccatcattcattggggaccgaccatgacgaaggcgtgtttttttgaatgtcgacaatggcacaaaattctggcatttttgggtcgtttggggaccaattctgacgaatgagtgtttggagtgccggcactgggacgaaattccggcattttgggttgttgggggatcgaccctgacgaatgagtgtttttgggatgtcggcaatggcacgaaattctggcatttttggaccctgggatttcatcatcatcacagcagataaaaagcagtagtaatttcacatttttccccatttgttttttcagcgcactgattgcaatcattgtcctgctcgtggttgttgtgtgctgctgctgctgcaaaaaacgcaaacgccgccgccgccacacttctgccgacgacgacaacgacaaggaggacaacaaaaagcgcaaacgtcgccaccacacttctgctgacgacaagaaggaggaggaccactaccacattgaccagcacaataagaaggagggggagcagcacggaaaggaggacaacaaatcgccgatacaaagcgaactgaaagtgtcgacgatttccgccgtgccaagcgactacaacacgaacaaacggctgggcgcaacagaattggacgtggaagcggaagaggtgccgaagacgaagccggttcccaaaaagtcgaagtcagaaggaggcacaaagcgcaaactgtccaatttcttttggtccaccggcaccaccgagaagcgaccgagcgcggcggaacatggcgtggaagtgccggaaacgattcgtgatgatgaagattgaagatgatttgaatgatggtgttgtattctgtatatacctatattatatattgtatccagtattcttctgtgtttagccatgcatatgtttatgtattgtatgtgcgtattattgtattatatttacggtattcaaagcgatgtatcatttaacacattcattgttggtatataaattctattgtgttgttttgtatggtctgaaaaaactgaattttcaaaaaaaattcgtacatttctaaatgattttgtttttccgatcgactccctcagcttgtttaattttgttggcccacattttgttgacaatttcacctccgccgatttttcagagaaattgcacgaattacaatgacagtataaaagcccgggggcactattattcaactttgggctttaatggaggggtgggggagggctataaaagagattcacacaaaaaagaaaaataccgacgaaattgtactgttttcaaaatggaaaaattgtctaatttcaaaaatcgaggcacaaaatacaacattcagcgacgctttacttcccttatacaagacaaatacaatatgtacatacagaatatacacagtgaaatcagtgacaaaatcagtcatttgatcggataaatacaatttatgaaacgataatgatcagattatataattccatccgattgtccattgtgcttagggctcatctgctgctgctgctgctgctgctgttgatctgcagtttgaaaatccttctcagttcttctcagccaggcaacggtctgaaaacggaggaaaagcgtaagaaaaagccgaacattaaatttgttggcgactcgtccccatacccaatttcgtcatccgagaagccaatggtcacccaattcgtgagacgttcgctgttcacgcgcgacacgcgcaaccaggagaccatggcagcgtcactgaagtccgccggacagcgcagaatcttcacgaaggacaccacgccacccacagctggatttggatttggatgcacattgctcatcagcgtcagcttttccgccgtccgaatgttgaccattttttcactcctggtgtagttgaattcgaacgaagtgagcaccatgtatttgaccgggacggacgctgcagtgaatgactgtgttaaaaagaaggggaaatgcgatcagatcagttgcagaataatgatcaaaaaagggactctgttgcagttcatacggtcataaaaacatttgacagttttaatacagcataactttttctagaagcattcaaattcaacattcttggtatcatttgatagtccaaagagtcctctattagtcctaagttgattttaaaaaattcattcaaaattcaaaaagtaatggtcaaaaatgtacagaaaattcatttttttgaagttttctggttacaacttttttgaaatataatgaaattctttgaaattttgcaggctaataaaggacactttgggctatcgaatgataccaagaatgtttaattttgatgcttatagaaaaagttattattaaaattgtccaattattttatcgtcgtgtgaactgcaataaaaacccaaaaaaggtcagtgaaaaattgaaaaatccgtccccatcgattgatccaccacaaatcccaccgagcacaaatcgttgacgaattggtcccatcctttgctccatttggtcaatttgaacaccaacggacgaccgtcagggcgcggcatgtgcagccacatgtacaggtcacgggccgaggtgtcagcagcatatttggtgttgtcaacagtcggacgttcgggcaaaatcggggtgatgatttcgacaaggttcggacagtcgaagaggacggttggcgacacgtgtttgcgcatcagtgccagttgtttgcgcttcaggctgaccagcgtgcgaagtccgttcctcaacaggggccaaatgtgccgtgccatcgcttgccaagcgcgaaattccgtaatcagatggttgaactgcagcgagatgttggtgctgaacaggcggcgatttcggcgcaggaaattgatcacttggacgtccaaatacctgca

SEQ ID NO: 15452 - DNA, 1846 bp, Heterodera glycines
ccacggtggggtgaagtatcgctacagtcgctcataaaaatagaatgattaaataacagaagctttttttttttggtctatgccaccttgatgctgcggattgcccgttccgcaatcccggcgtgccactggggtgaggtgtgcatgcaatggtgttgcacctctttttcgttgaaaaagcgctgcacgggggcggcagtgaactctttgccctggtccgtcatcagcttccatggcacgtagccgacacgtttgaatatgtgttcaaaagctcggatcatgtccactgacttcttgctcttcaccggctccacacacagttggcggctcagcgtgtcggcacacaccagcagataggcattgccacggttgttgcgccgaagcgagacgaaatcggccaggtcagcctgccagtcggtgtgcaggccggacgccagcgtgggcaggcgacggaaacgacgcacggcacgccggtgcagcgtgtacactcgctgtcgcgccagatagcgacgcacctccgcccgtcgtatgccccttgttggatgtactcgctgtgcctcacgcagtagcggctccacactggtgaaggcggcggccgaccttgtgtccttgtacagcgggtccagcagttgttcaaccacaatttcgcgctcttgtttgggtttttgttgttgttgttgcttttgtcgtcgcatcaccataacatgggtttgaacaaaaaggtattgttgttgttgttggaccgttttgcataatcagcagcggttgactttccgttctttttaaatgcatgcaaaagtgtagcagcggtggagcaagcagccgccaccacccatcttcttctttttctttccgctttccgcgccgctgttgccgaacagcatccgtaccatgcgcgggtctttccgagcattgccaataaatgttttgtacccaggcggtgccttctccggtttgggctcagcaaaatgaaaagtgagtaaagcatccaaatcgctgttcttgatcggacggtacgcgccttgcatcagccggtacacctgctgtccatctccgatgcccagcgtgcccgcgttgcgtaacgcatagtcaatggcttgtcgtttcctctgctcagtgtcacgtaagactgctgctgctgctgtcgatgttgatggatgcagttgcacgtccgcttcttcccgctgtcctttccttgcggggccaactgccgccatattttggggtcggtcgtcgttggagctgtcttcacgctcagtcgtctcagctcctcctcttcctccattatcagtgcgtgtcaacaaggaggcggcagacgacgatgacgggaagcggctagcttcggcgccatccgtagagactgatgtcgtacggggtgaccttttggctggtcgttgtctgcgacgtggaggctgcctcattgtagacgaatcagagtgcgacgactgctgttgttgttggtgcggcgccggctgttttggttgaggttgttgttgttgttgaattgttcgcgccgcctcggaaagtgcatcgcgcagcagccccttcgaggcttcgtcggtgggcagttgggtgagacgaacaggcgctggacgctcctgctcatcctccagcaattttttgaaccgtttgaactcctgttggtaatggatcaaccgttcgtcatcgttcagaaggtgtttaggttgttgccccgatgacggcgatacgccgtccgtgctccgggtgacgttgctgcgtgcagcacgcgccatgcgctttgccgtgtgctcaattggcgtggtatgctgcggtaagccgcccctcgcagaggatgcgtcggcaacaggagccgagctcctggcca

SEQ ID NO: 15453 - DNA, 2630 bp, Heterodera glycines
ggtacagttcctccggcactagcagcatgcgggttgtgtgcttcatttttgtgtgctgtcttggcggttcataaacctatctgccagcagtggaagcacaacgctggccaccaagccagccaaggccgggacgccgcgcccggtctgctgtcgcagcaacagtctacgtgcaccgtgtccgcttctcgcacggcccaacgcacgcacgtgttgggcctgagcgcgcaagtgcttcagatgagtgctcctgagcgggacacgtgcacggagaatatttaacgcactttccaccagacacaacaactgctcactgctcgcccccctcaccagctgacggtaggcacgtgcgcgtgccgagcgacagttgctcagctgcttgaaaaagctggtgttttgttgaatgtattgacttggtgttggcccttttttcttcgcttgcttttgttgttgttgttgatgctgttgttgtctcttttctagttgtattgtttctggtctgtcagtgttgctgttaccgttgttgtttccactcttatgcttcttccgcattgaacattgctgcccggtctcgtggtgcgtacacaacggtcagctcgcccggatatatatgagctttgaggcgcatctgtggccgggtggtcgggtgcatgtccaccaacagataaccaaacgggtccgctgtcgcgtcatcgtaagcctcgaggaagtggcggagcgcacccgggaacagctgaacgcccaacgagcgtacctgaagtgcgcccgacggattgcgcagcagcaccagatagtgcgcattgttgcgtgcaatgcgcagctcgcggacgaacaaatgctgcgtgatcaataccacactgacgccccagttgtgtgagccacgtgtgaacaacgtgtccaggaagggagcgcgcatgccaaccatcagatcgtccaacaccagcagcagtcgaccattgcactcgtttgccgcccgcttcactccctcctcgtcaggcagcgcgtggcagacacgaacccatcgaccactattaccaccactgctgctgctgttgctgctgctttttttgacaccattagttgatgttattgttgtttttggagtgctgccaacgctttccagctgttgcaaacgcagcacgtcctcattcacttccccaaaacagtagagcaccccatcaatgtgggcggggccaaccagtgcgtccaggttggccagcagatggagcacccatttggtcttcccactacccgtacacccggacacacacattgtgaacggatgtacaaacacggggtttgcgtgcgcaagctgctctgactgtgtcatctaaaaatcctcatttttcattctcctcctttgaccaacttctttatatatgctctcaaatttaatatcacattttttgacaatttttgagccacacatatttaatataaataagtttttatgttgaaactatttattgtttattctctaattattttatcaatggacacgccgtcacatgtatctgatcgcaaggccggcgatggtgttggtaatgctgatgcaccggcagcatgccaacagcagcagccgagtttggccgatgacgaaccgctgttggtccgacagccaaaggaaacacctgcgcaacacccgatggagaatgaggaggaaccgcgacaggaaagcgcactgcttcctcagcccacacatggggatgacatcagccaaacggtcagccagttgccacccaccacagtgcacaaaacgcgaaattgtcaaaacaaaaaagtcagttgctctcgtttgttaagatgtcgaagctgggcagcgatggtaatgatgaacatggcggtgtcaaccttggtggtggagatggtggtgatgatgggcaagcgttgccaaccgaggatgacgggctgggcggtgctcatctccctcccctattgttcatcgatgaggaggaggaggaggagagccccgagtcgcgcgctggggatgacgtgaaccgagtcggtaacggtcagatttacactgaaaaagtgaagcaggaaggggaggaggaatcagacgacggcaacgctgacatggattctgtcagccatgacacgtacagaagcagcagcagtagcagcaccatgagttcgtcgttgttcttgctgcatgactgtcatatgcgccaccactaccaccacgacaacaacaactgcaacagcccgccacgaaaacaagcggcgacagagctgctcaagcttccgctcatcgactatttgtgtgggctgaacaacgggtgcagtgtgagagagctccacacgctgcttcagaccaagggcccacgtgcacacatgttggcccatctgcaacagcgctgtctgctgcgcaccgtccatttgcggcccgccgagcgcaacattgcgctacatgcgcatgccctaagtgccctaagtacaaacctgacctttgcatgcggcggttatctcaacctcacggtaataaaatgttttttgaagaagcgccgcgcgcatttttttttgtttttgcctaggtgcgtcagtacttctatgccaaacacggtgtccgtttgcgccacccaaacctgccggcgaaggtgagcgcggtggtggcgcacacatgtcctattatc

SEQ ID NO: 15454 - DNA, 2613 bp, Heterodera glycines
taatgccgcagaaaaaatggttaaaaaactaaaaatccgggctctactaataaatagggctgccaattttgtgtactaaaagtggtcaaaatatgtagataaatatgaaagaaaaatcccgaaatatatacaaaatatgcaaataaaagtcacaatttttgttcgcaaacacaaaaaagaaagtgttttcctactaattagagcatggaaaagccagcaaaaaaatatgtatttacttaaaattggcagccctagtaacaaaaatatcaaaattgaatgatggtatttaaatttttattatttttaaaaaattttctccttgtaaacattttgtttgtttttaaatgaaatgcttaaattaaatgttaaattcaaatttttaaattttcctatttatttccttacactgggttttttgaacgaaaaaatgctttggttaaaaatttcaaattataactcttaggggatttatttaatcgcttaacatatgcttaatgatagtttctaaacaattagtgcttccgaataacatcaattttataaaaaaaaattggtagaaaacgaaagaagttatgcacaaaagattagtccgtcggcgagtcgtgtgccggcgagttgtcatgtaccccgactgaagcggtgcattgcggctggaatgaatacgacgggcattttcacttgtaaaatctggtggggcagccaacagcaaacattggcatttgtgcaacacaaggaacagcaaatggaggagacgaaaaatgcaaaaaaaaaaaaacaggaagaatttggcattgaaatttcggtgagaaaatgccaaaaaagggatttgctgattaattgcaaatattttcgtaaattactcaaacctttgctattttttcgatcatcaaatcataagtgaaatttatgaaatttcttttatttaaaatcaaattaaatattttcatggtttcattcaacattttttgcttcattttttcattctggaaagttatgaccaaataacacgtcttttaaaaagtaccaaaatttgactggctaatttacgaagtgtgaaaatgtggaattattaaaaaaaatttttttttcaataaatcagaagatttaattttaaaattttaaaatttgattgtataatcatttttgattttatttaattttatttgttttaattattataaatttttgaatttattaaggttaattattgtaattaattataatttatttttttattttttcatttatttgaattcttgcaactaattttgacggaataacagaactaagtgggaaattgcaaaggctttgggagccgaacacgaaatttgttgggctgattgtccggataatccgtcacattgctgggcaaaaacacaaagaaactgttcgacatgattatttattttttcaacaaaatgaaaaaatacatatgcttttatacaagctgagactcattaatccattcccgattgggatatcctataaatttcacaagcatctcggtggacccatacgacagttttctctttctgtaaaccttctcgatgcggtagctcgtctctgcatcctttctgacgcgcgccagctcctgatcatagaagctgcccttgaatttctccccgtgttcatccctcagtttgtacagaatcgggcgcaccgctttcaacacctcgtcaatctccaggatttcgtccccgtaatttggcaaatatcccttctcaaattgccccttctctctgctcatgcgtacaaactggtcgttacggaagcgtggcgtccgcttttgaagagcagggtgtccgtacagtcgcttccacaccttttgcgcatttgaaaagttgacatcgttggggcgcattccgtgaacacgagacggagcgctgttaattccatccactgtttctcaatttcctgctcatcgaagaattccttcagcaatctgttcttgaattcggtgcccttgtctgaaaaaatgcgatgcgggaccatgggcatttggtcgatgagttgcttgaaggcatccaacatctcctcggctctcttgttttttgcgcggtacaacaaacaagcgttttgagagcacgtcaaccgcaacgagcaggtatcggtgaccccgattgtggcgcgaaagcgcctgaaaatcagccaaatccatttgaacatcggtcatgaaacccgccgcaacggttcgggcccttggaaagtgcaccctgcgggggcgcatcagagtgtacgtgcggtgcccctccaaatagtgctgcacatcccttttccgtaaatttttcaacttttttcgcgcctctttccacagtgcggtaacaccagcgaatgccgctggggaggatgggtcgttgtacagcttgtcaagtgtggtgttgatcaactccactttttcgggcgaaattccttcttgattgtctgcggcgtccgggttgttttgctttgggatggcctctttgacggagccgtccatgaatacaaaattgggtcttgcctaagcctctcttccaatatggccgctccaggtggcttaatggtggggcggcccgctctccggtctattatatacttgagggccattcgaaaattgctatgcgccaacggtttgcc

SEQ ID NO: 15455 - DNA, 1712 bp, Heterodera glycines
  unsure (1)..(1712): unsure at all n locations
tcgctgacgattttggatgaaacatttaaaatgtaaaaagaattgattgcacggaagccaggaatttttgaaaatttgggtgttttttttaattttgtcgcaaaccatcctgttcatttctaaaatttgcgatataaacgagtcagaattttcgaaatttcctcccaccggacgcaaataaaatatttttcaaattttttctcggcgatgtctgtcgacactgccggacaccaattgttctttaattaaaaagggatcaattgaaattctccccatttaaacagtcaaatgtcgttacattaatagtttaaacttagattttgttaatcgaatgagagattatttctttaaaaaatttttttcaaataaatggttgcgtttacataatgggttacggtaatacgacgttttttttctaattggatgtactgatctaaatttctatgttcttgttcttcccccttttttcgttctctactacaattccacgttgtatttgaatttcgatccttccacaaatttttctttttccacaaatttttgctccgttggatgaatgtgtccagcggcataaaagttaacttttgctttcttatttttcgcatccatttccatggcgacaaaacctccgccgagatattcctcaggttttttaaccgaatccggatatctaagcaaggaaaaatgttcaaaaatgcatttaaattagaataccaaatttaaaccaaaaataattaatttaaaaataaatacatttgaaaagtaggtaaagattctccttaaaaatttggaaacaaaacctacgtaaatttgagcagatgcttgtattcctcgggaacgtgctttttttcattggcttcttccattcgtgagccggcacccgccacaaacacttggacaccaaatttggtcaccaaatgcttcaaattgtgctcatggcccgacaaataggcaccgaccttgtgaacactcaacaattcattgaagcgttcggcacaagtaaagctacggtcgccgtcggtaacataaagcggataatgaccagcaacgaaaagaaagttgacgcctcttaattaatgggggaaaaagtgaggaaaagtcaaaataggaaaattgccaaggcaaagtcacaaatgtggtggatcaaagtttcaacaatcattcagagtgatcatgccacaaaatttaccacgcggttaagataaaagagatttagcgcactaattagcatctatttatcaattttaacgttaaaacacaattttggcaaaaaatgttgggaattaaaactttgattccgagtccggagtaaacaacaattttgttttacaatagtgcgttcaaaaaacaagccccaaaaggcaattgcttgatttagaggcaatttaggtaataattgatttcaaaaataactgttgtggattcttttgaacctcacttttgtaaaatgagtttttgggtttgtgagaattcttggttcagatttaaattcagatgaaaagatgccaaattttgacaagcgttcttttttatttccttanaatacttattccgaaaatggtatttttaagaaatttaaacattaaatacattaccacaaaattttgtggtatcaaatttaaaccctttatcggttgcttcccggattctcagtaaaactgatagtaattaccggtgttagcataattacctgagatcgcattaatcgattt

SEQ ID NO: 15456 - DNA, 1065 bp, Heterodera glycines
aattataaataaaatgtcctctcacttttcatttgccagtttcaattcattttccagccattcgaagtgtttttccgatttctctttgatttcttcggtaaaagttttctcatctttaaacattttccgatttctgccgcataaaatgactgtgtcaaccatcacaaaacgaacacttttttccaaatttatgccaaaattgtaatgcacggtgtaataaggggcgggaaaagtcctaaaagaaaaacggaaaattgggcatttttcataaaaatgttaatttgaatatttatattttaaatttattaggtaattgttttttcttttttttaatttagcatttttgactatttatttattagtccgttattcaccatttttcgcctataatttcaatttgaggcgcaattgggtcgtatccatccaaatgatgataatcccgattgcccgcaacggtgtaccagggcacatcttttgttccgacattaccaaaaatgttcaaaaaattctaaacttttttcatattagcccgtcatggcggattaggagcaatgaattcctgaacatattttattttatggccccatgaagcacctaagaattattaaaaaataattagagattttgccaacaagcagaatctgctaacagccagcagctcaagagcaagttgttgtgccgagaggcatcccgggaaaaaaggaatttaacatatttgataaggtattttgtaaaaaattctttattttttattatttttcattttccgaattcccagtgggagggcggggagcagggaaggtccaaggatttcggcttggggaagtacctcccccgggcgacgaaaaaatgacaaattttgcgattttgagccatttttagcagattttcatcaaaaattgtcggttttttgaaaatttagcgaaattttttggaaaatttggttgaggctaggtctgggggggggggggtaccaccagggaaaatctaaaattttcagcaaaaaatactatttttccttaaaaaattcgggtgcggaggggccttgggggggggggtggggag

SEQ ID NO: 15457 - DNA, 4236 bp, Heterodera glycines
  unsure (1)..(4236): unsure at all n locations
atttatgacacaaatccgctgctttgcctttgctcttctttgttcactttctctgtttgtgcgcccccaccaaattggtgatcgtccgaacgttggcctccaattgttcggctgtgctgttctccaactcgtgcacgaccgactcgtcataactggcactggaaaaagttttaattttggatataattaaaagcataacgagagtcatatatgctcaaggagaggcagaaatatgagaaatttcatttttttcaaaattttacaatgaattactaagttttttccgtagccattccatttctaacaaaagagaggaagcaggtaaggggaactgtatattttaggacaattttgaaaaaaaatcagccctaattaaatgcccactttgcctcctctgcgatgatgccgaaaatttcggcctccaaattctcgcgtcttttcctctccgaatagccccgttcggtcagccgatcgaacagcgagtcagtggcacaacggaggacaatgacgaggtcgaacctacggcaaattgggagggggagggcatgaaacaatgtgttttctgttgtttcttttccttaccatcgctttgggaacatttcggcacagtgatagtccaaaattaggccgcccgcgtcagagccaaagcgttcctgaaaagccaatgaataattacaatttaaattttatcgtattttaaagcaatgaaagcggtcaaaactatttgagtttgatgtgactgttgttgtgtttacttccaaatggtcaaggagtgcgtcctcgttgagcacgtgggtgtccaattgggcgtcgtattccgcataaaattcgcgttccctaaacccattgaagccgttattatagagtaatttggtattggtcaataatcgaaaaaaaactacttatttatgaccaacaaacggagggatgaaaaccgaaaatttttccttatggtttgaaatttttaaagataaatttttaattccaacagttttttgcctctgcaaagtaaaaaatgaaaaactttttggcctcactttataatcgatgcggtgtcgatatgctccatgccaacattttgtgcaacttttttggccaacgtcgattttcccgcagattaaaattttttattatcagtgtataaaataaatgaatttaccggtccccggcgttccggtaaccaaaacattgggcagacgacgccccatttaaaggattaaaaacatgaaaaaaccaacaatcgttgaaaaataaattanatattcgaagtgagaacgaacagaggcaaaagaatggagtaataatattaatattttatttattgaaaaagcataataaatatggaaaaaacaataagacaatggaaaattgggtgaaaatcctccgtcttcaatttgatttcctaatttgaaaatgcatcgaaaatgggcgtttatatcaaatcccccccccccccccgctgtttccccctttgtcgtcgtctctctcatcgtccgattcggcccaaactgaggtccgcgcgtgggttggccgtcaccttttgcacttccacgatggtggcgttgatgcgcgtctgcaactcgcgcatccgcgccgtgtgcagcaggcgcaacacgcgcaaagcgttgtcaaacgaacgcgagccgctcggcggcgtaccttaaggggaaaggggagggggattaacggaaaacaaatgcataataaaaaatggacaaaaaatagtaaggaaatgaaaccccgatcattgttggacaaataaaaaaataataaatttttgtgtcaaaaaaaaatcacaaaattttaaagtcgacagaccagttgccaaaagctccaacggcaccacattcaaaggctggaatagaaaaaaattttctaactgaattttaaaaattaattcatttaaattatcacattttttggcgctccgtcgcccccgttcaatgccatttttatgtcaacgactcgtttttcaatggcacggagcatgacccgcgcattcggatgagcagcgatgccaaaagggtggccaactcgcgcacggtttgtgccaggtcggaggctgaaactgaaaaggagggcaaaatttgtgattcttcaaaaagcgctagattatgaaaattagagcaatccccaaactgcgtctttaatttttgtattcgaaatctttttatatatcaatggttccacaaaatctcgacgtctataatttttttcgtgaattttcacagaaatttcaatcttattaagtttctagcgatgattgtctcggcgcgatttcgggcggcgagtaaacggaaactaatgacaaggaaatgatttctaccattgtttagtgcactgctcgccccatcctgcgacttctgagggctgtcgacttccattaagcgcaaataattctgaaaatatccgattttttttggtttaaaaggtagaacggtgaattaaacggtaattgggcgagcaattaagcaagtaccatgtcacattccattgcaagtataaaatgttaccaaacatttttttattagaattatgcggattcaaaaaataatatgcaatatggcaatgcttacaattaacaagcaaagaaaaggttggacaaagtgaaaaaggagtacatttacaaaacatttcttggaaacttttttgattaagactaaattaaattaggtaaatcaaatacaattcaaattaaacagcaacaccttccaaaaatggaatttggatgaggaaaaatttcaagagctaaacagagtgtttaaggaaattaaatggagaaccaaaattggacaataacaattccgccgatttaaaaaaccaaaatatgattggacgaataaatgcgcaaaataagaaatttaaaaaaataataaatcgaatttcggcatagaattgagaagataaagaaataatggcagacaaaaaagtgtgttgctgctgctcacattcagcagaaacaggaagactcgcgcgtcgtccgctcgtcactgcgactattgccaaaatcgatctgatcaggaaattctgaaataggagaaatccattaagagttcagttcaatggatagataggtctctttagagaagggccaatattataaaacagaggttctattttctttcccaccatcgctctacccccggcgcaccccaaaacgtaccccaaaacgtcgccgcaaaaagtatagaaaaagtacaagaacaatttggctacatgtcgtttcaatatatgtcatttcaatactcagtgaaaatgtgtcatttaaatactaattgtaagtcgtttcaatatatgtcatttcaatactgtcgtttcgattcgtttcgtcgctcaattataacgtcctttcgtgactgccttatgttaaccgaaaattttaatataggatattcttcataacaatggttaccggtgtaaataacaaaaaatgataaatttggaatttgggacaaaggtgagaaattatgggtttcttggatttcccgaagtttgggtcttatatcagacatagcaataaatgaaaaaattcaaaagttaaaatgaatgaaatgagaaaacataaaagaaatgttaataggtatgtcaaatccaataaaaatatcttgaaaggacttagtattgaaatgacatatattgaaacgacttagtattgaaatgacatatattgaaaggacttagtattgaaatggcatatattgaaatgacgtatattgaaacgaaatgcaccggggacaaatgcgtaatgacttttttgtatatcgatcaaattatataattccgtatcgatctacctaaatgtgctctttataagcgattaatatagcagaaagttaagcttgaaaactaaaaaagtctcaattttgtatattttcgggaacaatttcttacccaattcattgttgtttttgtccccaccactattttttttagctttaaggccgcaacattttcctgggcgacgatgtgttcctcaattacaactgttgcgtgttggacgtttgtcgggtggacattggggacaaatcgatggttgggccctttacgcggctgaccacccccgggaccgagcagtgcgggaccagggctgggaatacggaagaccggtgcgcattgggcgaggcgtgtgggtcggaggcggagcggtgattttgcccggcgtgacggtcggcgacggcgcaatcattgggtgggngtgtgtaaacaaattggcaaaaaaggcaatgactgactgat

SEQ ID NO: 15458 - DNA, 3160 bp, Heterodera glycines
actaatcagatccaagttggtccatcgccgccagtaatcgttaggccaagcggacagagccatccggtgggcacttcccacatgaatttgtttgccgatctcgcaaatgcgaattttaacaccgacggcgccgaaagtgataaaacagacacaacgacagtgccgagtcagtaacaaataaaatgaatgttgagtaaaatcgaaaaatttaattatatttttaatggaacagatcaattagagaccattgttctgggttttgacttggagttgcaagtcgagaaaaaaacggggttttcttggagggttcttcttggcattggactcaagtcaataaacgacggtctcttatccgtttcccaccgaccgaattggccctataataaagatgaattctgctttcatccccacaatatgtagtaccccgcactatcgtccacagtgtctcccattcgcaaccattggacattcttttgcgtcagtcgtcggcagcggaggcgggagacagcagcagaagcggaaggacgagtggggagaagcagcgaagaaatgccacttcattttccccatttagcaagattagtcactgcactgggcgaggaggaagcgggcgaaaatgccaaattggccaaatgcggggaacggcggtgctcgacaacgccgagagaactcggcgagagggggggggggggaatggtggcttatttatgggacagagctgtcccgaaggttgggcagcccgatgttccaaaaatttctggaattgcgaaccgggtcggccgagctcgatacatacatataatacatttattattagggcccttgatttgcatggacttccaatttttttgtaaatttatttcggtctaaaaaccaagaatcgtatttttagtttggtttgaagttgtatgtttttcatgtttaaaatcttatttaaaataattttatttgaaaattctttgttctcacaattagaaaaaaagattttctctaatttgttaacgttttcattgacggcgtcacgctcttgcgtataaaattattaattaacaatttgttacatcaaatattaaatttatataaatttttgtttgtaacgaattaaactgttttttgcttttagtcgcaaagttttaatgcttttaaattcgaaaatttgaattaaatttatttttttccatatttttcagtttttatcatgttttaacatttttttcaaaatttaatccatatttattttttcttccatattatattctattttttggaattttttgtccataaaatccaggccctattaattatttataaaaatgatgatatttcacattaagatgaagcaagtccggccaagcaacagctgatttcagcagacaaaaaagcgaggaacaaaaaatatgtttttaattcgctgtttttaaataattaaaaaagtgaatcccatcaaattgcgttgggatttcgtcaaatttgtttaaattcccccgtttcgcttcagcaatgcctttctattcgcttatgtaaaccgcgttctgcctgctgcttccagcaatgacaaagaacactttgtgggtgccggagcgatggcggagaatgacggcattcggaaaacgaggaattttggtgcgcgaggacaacgcctaataatgccattggcaccaaatttgagaatttatcggcaccgccgacaaattatagggcgaatgcgaagagaaacagaacaaaatggacaaaaatggcaaaagatgaaaaagtgacaagatcaaatttgacagtgatcaacaatatgttaattataatttactaatgaacgattatcatgtttatttaactcgacattgagataaaaaaaagcagaggaaactcccgatcgaatggtaccgaaaaatatttaatttcaattataaatttttatgttattttatgatcgcgtaaataatattttacagttgtgtgtagtttttaaggtcgtgtaaaactacaatagagccaaataaacaatattgttatcgctttttttgactccaaaatctctcatattttttgaccaaggatgttcatattttgtaaagaatattccgctgagaaccctacaatattttatgtaatattttaattttgctgttcattttgcttggggccattttcgcgtctcaaatggcaaatactcaaatgactgttttatgccgatttgttctttgtctccttttccccattcattttttgctgtgcgtctgctgacccttccgcggcattttctgctgcttcggtggggtcaaatgtttccccgccattctctgctataaatcgccgttttctcaacattcatcaatccatctcctcatttaaattaaaaatggacttttggatttgatttttctattaagactaggactttcactcccatacggcgaactgcgtatttttcccttcatgacccggcccaatgtgctactaagaaatgaagacctttcatagcaattcatcagctctaatttgataaagcattattgattctttcggttatactttatgaatagggtggggatttactggcaaaaaatccaaaaattaactaaaaagtggcaaaaatgccgaaataatggctgtggcaaaataagtgacgaatgccaaaaaatggcataggtaattaattttagtggtgaatagtctaaaataatgctcccagattaaaaatagtggcattaaaaataggcttcttggtgggccggcggtgggcggggtccaaaccctaattaatatcatagcacccaaatttccccaaatttcatgtcgccccttgccttcgattgctaatgtttttttaatatttttggcataatgttttttctgaattttttaaaatcctttctcttttatgggtctttttgcttccgctttaaagcgttttaagctttaaccgttcactggttcaatctttacaatctttgccagattgggattaattgggattttaatggagcgtcaacgcacttcttccgaaaggtcaatttcgagtgccgattcgtgggaattggtaaagattgacgaccgtgaaaaggtgaattttctcctcctctgataaacgaatcattatccaattaaaatggatattaagcaattgtaaaactttgtgaattccttgtcattttaggaagaa

SEQ ID NO: 15459 - DNA, 1060 bp, Heterodera glycines
tttcaagttaaaacattaaaaacaacataaataaatgcgttcttaaattattcattaaattttcaacttataccattataaaaataattaaaattaccaatcaattaaatatttaccaaattttttattttattctatttaaaaaacaaatattttaaatatgtttaattcggtaattgtgtagaattatggaccccggcgaaaaataaatttaaaaaactggtccttatttgttaggggtcatttgaaatggggtctggggttcgagcccgcttggttgcaattattttttttaggatacttgatgaaaaaccatagacgaaaacattgattttccgaaatctgatttcaaattcataatcagcgcattttttcaccctaggaaaaattaaaataaattttttaaatttattttcgttcgggacaacaatttacacaattgcctttaattcattcatcgtaattttcaagttataaacatttaaaaatgtgcataattttttttttcaattaaatcaccagtattatattactttataaaaaataaaattttctttagaaaataaataatacatttttaaatttgtattttaaatttgtaaaggtaccgcggcgattgtttgaaccaggccatctgcaaatgctcatgcgaggcggacccatcaaaaccggcaaaaaatgtgtgcacaaagtccaactgcgactgcttgcgcatcaaggagtcgtgctcaaaggcgtgccaaatttaatttaaattattgccaaatttaatttaaattatttaaaaataattttttaaatttttttcagttatgcgcctgtaaacaaatttgcaagaacaaagagccgccaaaacgggcggcaaaagtgaacaaaccggcacaggggtgtgctttttatttttgggagtagctccttcccccacaacttagaaaaatttcagaaaaatcttagaaaatgtttgttttatttttttccaacgagtttttgtgaaaatttttgaaaaactttagtaattcttcataagatttattaaaaaaaagtcgctgggaaaattttc

SEQ ID NO: 15460 - DNA, 2889 bp, Heterodera glycines
aaatagcaaaataattatgaaagatcatttgtgaagaaaacaaaaataaagctaaaattattaatttcgaagaatattgagtaaaaatcgaaaactttccatattttcattatttttggcacaaaaattccaatcttatgaaataatacataatcgagaaaatatctaataattaagttgtttttttaggaatttaaacttctaataacaactcttttttttcacttaatttaatttcataatttcaaaaaaaaaattcgaaaagcatttttttaacagttgcaaatgcggcggagattgtgccaacggagcatcaaaattccatgtgcctaaacatgttcagaattgtttcctggaacataaacatgagagcaggtcaattgggaataattatttattttttaattcaaaaaattatattttagacagcaagtttttaaattccaaaaaaaataaaagaattttttcaaaaatattttgtgattttctctaaaaaggaaaactttttgaatttcaaaatgaaaagaatttttccacctggaaatttaatttaaaaaattataccccataaaagtggcctaattgtgacactaattggcgacggttacatttatcgtggcgactttttccatgactcaaagaatgagccgcatgtggaggagcaattagttgccgcaatttatgatctgatctccaagtacaaagtgagtagaaaatagtattagaagtcattaatatttaaaaaaaatttttctattaaattttgcccaaattttcaataaaattaattaccttttttgtgctacagtaattttcattttttttttacattttaattgccggaatttaattttgatttcaactgctaatcacccatcactcattactcaaatgttgatgtaaaattaattacaattttttatttttttgtaattttaatagtatagtttgatctatttttttaattttaatttgcatggccaacctatttttttacattttaattgcctgtcatcaattaattttttttaactgatacttccatccacaaattgaggttgattatttttactcgagttttgggtgtaaaataagctatcattttttggtattatgtgtatactaaaattttgtccatttttttatttattttaattttcaatggccaacctatttttatggcattaattgcctgaatttacttttaatttatcccataaattgaggttgatctgtacgaaattgtcatttttgtgtccaagagtccatgctttcaccaggattgtgagcccaaatgtgaggtggtggacgaatgcaaatgcaataaaggtgtttttttatatttattgactattttatgccttggaaaattcaaaaatacttcaagataaatttttaaaaaaactttttgcccgaattttatttttgatatattttcattttaatatgcccttgaaaaaacaatttcctgaaaaaaattcgagaaatttttcgcccccaatattaaatcattcaattttttggcgtttttaggattttttcaaaaatcttaagttttttagggtggtttttttttgtgttttttttgtctttaggtcagtgtatttttgcgaaattttttttgttgaaaaagccaacctaaaatcaattaagattttaatgaaaattaatttaaaaaaaacaattttacctaaattatttttcaagcttgtgctaaactgttgggattgcttttgtcaaaggtgcgcaaggagttgagcaaagtggatgtgcgaatgacagtcaaatttctgtgagttttaccatattccctaaaacagagccccgggggttttatttttcaaaatcttggaatggtggctttatttcatggggaactgtaattaagcatatacgagacatgtttgtatgattagttaaatatgagcattttaaaaattaaaatggatttgaaatcccaaaaatttcgaaaatccaaatttgcatgcctgtgcgaaatcctctacatattagctaaagataagcaaaaaacaaaaaaaaaaactaaaaacttatttaacatgcaaatttcacttttctaaattcccacgcattcctaattatcatttttttgacctaaaagagatggtttaaaaaaagttctaaatggctgaaataggcttataaataggatttaaatgctaaaaaaaaataatcacataatttaatttaattttaaataattcttttgtaaaggtatccgcatttgaaccgtggtgatctgtacaccaaacagggcattttgtccatgttacagtcaggcatcaaagtggaaccactgttgttgaaggtggtttttgaaaaattttttgggaagttcttgatgtcatatttttgtaaatttaatacattaattgtctgcaaatcttgtaatagatggtcattttatgtttttttttttttgaaaaaaattacattttttttgtatttgtccaaatctttgttatttaaaaaattaaaaaataaatcgaaaacttggaaaattgcaaatataatttttttgggttttcagctttttcttgcaaattttcattttaaaaatttaacgaaaaaataagttttttaattaaaaaattacaaaattcattgtacgaactgtcattgctcctccctcccggttatggggctaaaaaagttttttttttcaaatttttaaatttcaattaattacactaattaatcacataaattaattaaaggattggagtgccgtcatggattgggcaccacatccagaacataagggcgaatatttgcaggtagtgtataactatctatctattcttgtatttgttgtaattacattcattcatcattattcaaataggggtatttaaaaattctataaaa

SEQ ID NO: 15461 - DNA, 1674 bp, Heterodera glycines
ttattttaggaaacaaaaattgatggttataaatgagaaaaaaatgaaatatttatccgacgcatttaaaaaaaaatatttaaaaattccatttgtaaatcacataaattggcaaatcatttttttcattaaatatcgaaaaatcagtcgaaaaaattaaaatattttaaggctcaaagatttgaaccaaatggtggacaaaaataattaaaaatattgatgataaatttgttttcatttattggaatttattagtcttcaaaatgtttacgagaaaaaagggaatttatgcgcacatttgttgcacttattattattattattatttttttttactgacgcaaatgaaaattagtcgatttagtccaattttattccatttcgattatgtaattatatttatttatttttaatcaggtcatttattaaacttaattaatatatttaaaaaagtataaaatacacaaataaaaaataatacaataattaatacttttaattaaattaaaatattgttgactcattattattaaaaaacgcatttaaaacaaaataaattgtatattaatttaaaaatatttccagagtaaaaattggaaatgaatacgtttcttttctcttaaataagagctccgtttaatgcgtagatgcttttattgtaagagtcgtgactgatcaaaggtcaaaaggaaatggaaaggggcggggaaaatggcaaaaagtgatcggaagtgaaaagtgatcaggatcattgtaaaatggaaaacatgggctgatcagggaggcgtgaaaataaaaaaaaagatatgggccaagggacaaaaaaaacgggcgaaatggccagcaatttgcgcaattgcgaacaaattttggggggagcgtgacgaaattcaattgaaattcgaagctaaaattaaaagttgggcgaaattcgatcggattttgggttgatcaaaagttggccagaaaagcgttaacaatcagatcagttttaggttaaagaagggaaacttttgaatatttgtgagtgaaattgggcaaacattaaaaatcgtaaaaataaaaataaaaatcgtacaaattaatttaaaaatatttttagaaaatttttggtttgggtttgataaggagaagacagtctgtatatatcataacatttttaatgacgttcagctgactaaatagtgataaatttcttcccactcgttttctctctttcacttaaatactctctctgaattaattttaaaaattttttggccattaaatgctcaattagtatggcctactgaaatcgatttaatttctgctgcccaattttgcattaatcatcatcacacagaaaacaaaatataaaacttaaagcgtattttaaaatgaatcattaattttattcatctctgctgctgaatcaacccctctatctatagaaaattcaaatagaatcgcttttttacaattttcctttttaaaaaaacgacacgcgattaaaaattgactaatttagtaaaattaaatgttttataaatttcatttttgaaatctatttttatcaataagaagattaaagttaaaaaacaagaagttattatacaatgcatctccctaaaaatgaaaatcttgaataaataaattatttcctactttttttatattaaaaattcttaaaaaacg

SEQ ID NO: 15462 - DNA, 1776 bp, Heterodera glycines
tccccctcacccactcaaattcccccccccccctaatggctcaattagtctcccgccctatgccacgcaattagcaacagcctttttgtcttccgtcccgcccctctcataatttttcaatttttcatcgctttttccgccgccgctcgaaattggttctaaactgatctttctacgtatcacttgcatatgacgcggtggttcctcacacgtttggaacagtgcgctgctgcggtggcgcatcccaaaaaatggaaatgacgcgaccgacggtcgtcgcattaattagtgattaatgatgagttaaaatttggtgaccatccgcggtagaggggggaagtgactgatcaagggcaaagtttatgatcaaatttgggatcaattacagtgacaagaacaatcaatcaatcaaaaaaacaatcaaacaaaggagttgagccaaattgggtccatttaatgatagtggaattgtgctattatttataaaaagcgcactataatcgctttcgtaaattcgccattttacatagtttcccaagtaaaaattgccataagcaactagataaaacaaattcaaatggtccgatagaggagctataagtctagaaattttaaaaatattgtttatttccaaagaaattatattcatttttttctggtttgattacaattttttaaatttattttcttgaaaaaatttaaaaggctaatagagccatcgtcaactggtctcatttcttctgagaaaagtctgtaaaatggtggatctatgaaacacttatggtggtagttttttatgaaatgacccggcatgaattgaatgccaaagatagaagagtttgatagagtcgagatagattccaaagctattgcaagtttaaagtttaaataggtaacaatttcaactaaaaataaaacctcaaaatttggagttcaggaaaatatttaaaatgatttctgtggcgtcaaaaaaatttcctataattaccaatcatttccccatttgctgttatgcagaactgctgaaatatgtacgactggtgctgttttggtcatccaatccatccacagtcaatggtttggcctattaggggggcggcgggggccttattaattcagcacaagcgggcagcggtcggttacattactccgattgcgattggcggggagcggggagaggcggtgggcacacagtttttcgtcccttttttatcttctgattgcccataataagtagaaattaatccaccacaaattatgcacgccaaaaagcacatcgacgggcgggcgggaagaagaaaaagcggaaaaagcagaagcatcggtgagcagccgccgccgccgatcatccgccgtccaaccagtcggtcgttctccatgatttgtcgttgttcagttatgcggtcggtcagtaatcagcggctactaccgccgattggattgaaaaggaatgaataaatgaatacgcattcaatcgggggggggatgctaatgggggagagcagctaattggttggatgggaggggaggggatgaatgaatggcacttgctaacaataagctcggagatgaacatataaagttagacgacgcaaaatctctgtgtgaccagcagagtgcagcaggacgaaatgatttttttggattggaaaatagggattctcccgaatttttatgaaaaaaaggaatcgaaaagactaaatttttgcatggctggaaagaaatgaattttattgaaatgacttatctaataaaatcaaaacccaatgatcaaaa

SEQ ID NO: 15463 - DNA, 837 bp, Heterodera glycines
aatttctggtaaatgaagggaccaatggtaccttgagtttacaatttggaaagcattattttttttcatcctaaaaattaaaaaaaaaatttttttttgctcttttcagcgtgcattcgcttcttcgcctatctgtgcaccaccgatgacaacgcattgaccaaatttcccaaattcacggccgatgttttcgacgcggtgttcaggtggaaaggcgaccgatcacacaatttgtttttttcccaaaaacctccaccaatcgtttggtagtctttctttttaaataattagccatccaaaacgattcataaataattagccatccaaaacgattcactctgtcggctggtccgaacccatgacaaattaaaattagggcgcaaaagtccatcattaactaaaaagggaatcaaattttattttcttggccacagatttgatgcattcgacgtcacgcgtcgtcagttggccttcgaaacgttggcagtgatcagttcgaccagcggggccaagcagatattctcgcagaacgaaagtccgttttttggatcaattggactttttcttctagctcactactaatggtttcggtccttttatacttcccaaactttcagctctctacaacatgcaacgggcgatgagcaatttggctgtggcggtggcaacggccgccgagccgtcgctgaaggcgcgtcatttggaagcagttcggatgttttttgatcggattgccgacgaaagcggttgccaacccgaacagaaagttaggccaatctatttgtatatggtttaattttttgtgggggctaaactcaaaaactgtcccctcccctc

SEQ ID NO: 15464 - DNA, 1088 bp, Heterodera glycines
gggggggggggatgccattgaatgcatggcataatcagaacggagggggctataatcccttgctccaaaaccgggaatattctctcggtgtgcgagtaaaatacaaaaaaatggtgcaaaccattccctaacaaataaagagtttcagacggacgcgggactgaaatgtccaattcctaagcggactcatttgtctgttgcctttgttttttgaacatttcattttaagggatcccatctccgaagttcagttggccgctctccgcgtgctgatggcactgacgcgccaccaatgggcgtatgcccatttttgtgccataactgagtgagtggggttttttgcccacctttagttacaggcccgtaaccagaaaaagattttttgttttgtgtaatttcctaaatttttggtgtcgatggcaaaacgggaaattattagccattttcgccaaattttggccatttttaagacaaagttagggctttgatctattcgcaattataaattttttaactatcgcttttcaaaatgtttctgttgccaatttcaaaccccttttccctccatttcttttcagtttcgtcaatttgctggtcgaccgttccgtcaatttcgacgccgacgcgatgcagctcaaatacgcgctcatttgtcgcttggttgaggccgcgccgtccgcgctgaacgacggacagatggaaatgctgcgcgactattgcacgaaagggcctttttggggggcgccggtggtggaagtcgcgacggaagaggcggcataaatgaaaaggaacgaatggatggacaaagaggcggagatgatttcacaaataaaatgatgtgttaattggaaaccataattatatttcgaatttaaatgaaccattcattggaatttccatataaaaaaattgattttttctctaaattttccaaaatttttttttaaattttgcgatttttttgggcgaaactccatttatgctggtcgcttatggaatggagttaagcaattcaatcgaaccaatggcaccagaaaagaatccatcctttccccattttttgctggacgagtggaaattggacgaca

SEQ ID NO: 15465 - DNA, 1409 bp, Heterodera glycines
gtcgtcgaaaataaaaaaattcaaaattcgctttttgtttctaaaatagattaaaacaagcaaaattaactagaaaccattgcaacaccagaaaatgatcattctacacagattctaacataaaagttaattttgaaatttcgactttttgttcgaattcgggtacggtgttcaaaataggtcgaaattgatgccggattcatgatcagcgaccctggaaagccatggaaacatgttttcatgacttttgaaaaaaaaaaaattttcatcaaaaaggggggcaaccatcggcagtattaccaaaccggggaattaaaatcatgcaccaaataaaggagggttaaaaatttttggatttttttcagagattttgcataatagacatgaattttggtgaatagttaatttaaactttttattcgcatccgggtttggttcgaatagggccgaataagtgccaaaatcggtcatccctaccctgaaaacccctaaaacaatattccaaaaaaaaaatcgagacagtcctgccccatttggttttgcaaaatttttttaaaatttattttcaaggcctccccccgttgggttttcctaactctaagaaaatgctaacttttgtgtccaccctcacccatcacgtgaaattaaccaaccttgttgaattcgcgccactgggcctgcaatgctttgttcttttggcccgggtccggcgccaccgatgagaacactgaacggccaaacttcggttggcgctccaaacggcgcaccgtttccaccaattcctcatccgagcgggcggtgcacaactcggggtcgaattcgtactgaaatagttggttggcctatggataacaaaaatgaaaaaaaaaattttctttccgtgtctgagttcaaaagtcatcggaatcacattcgggaatttgacttttgaatccaaattttgaaattctgcccaaaaaattttttcgcatccgagacctgctgaatggaatcaatcggacggaatcccatttgggggttttatgatttttcaaatccgttttttttgttataaatccgccccttttattacgccgatttcccaactttttttgttcacctcgccggtggcacagttgatcacgatcccattgctcggttcgctgcgaactctctgctcaatcttgccgatgttgaacatgtagcggctgaagatctcacccaagccatcgggaacggatgaaatttgctaaatgattggattttttgaaaaattggaaaagtgcaatttactgtggaatcctttttctttaacggggcacgttttgggggcctcattttgcagaatttcaatcggaaaatttgactaaaaacttaaaataatagaatatcatattctactttgtttatggatggtacattattgaaga

SEQ ID NO: 15466 - DNA, 927 bp, Heterodera glycines
  unsure (1)..(927): unsure at all n locations
atcaaaaattatttttttcattttaaggcatcttaaaattgttgatcactggcgcaagcgaatcaatcacagatgaagcggcaaaatgnccagcaaagagccgggctttctctattacactgccggtcctaaaaaaattttaattgcaaaaaaagttttccgcttttcataaaggtgttcatccgcatgacgcaaaagatttcgatgacggacgaacgttggatttccttcgctctcatttgaccacaaattcgcaatgtgtcgcggtcggcgaatgcgggttggacttcaacagaaatttctcgccacgggaccagcaacttcgggttttcgaggcccaggtttttttttttggcgtttttaaatgcaatttcatacacacaaattccagtgttttccattcttttaaattttttatattcaaaaatcgtgaaaatgtttttccgtggggctttgacattcattttatccaattcccaactgatttcaaaacaaacatcgaaaaattatttttcctttttgttagtgctatttttgtttgcgttggcttttccaggtccaattggcatgtgagcttggcaaaccgttgtttgtccatgaacgtgaagcgcaccaagaaatggtggccattttaagtcgccacagcaaatcgttgccgcccaccgttatccattgtttcactgggacagaaatggaggccaagcagtacatggacatgggactgtacatcggactaacgggtacgagaaaacctttttggattatgaattttaaaattgtagttgccagaattagccaaaataaatgatccatagaagaaaaaaatttttttttaattccaaggcctttctaggactaacaaaccaggaatccatggattgtgctggctgtttaaacctgtattactgcccgaatcccgnngactct

SEQ ID NO: 15467 - DNA, 2827 bp, Heterodera glycines
catgctttcatctagagtgcagcgggaccgggaaatttgggcaagaccgggaccgggactttttgggttgaaaaaccgggaaaaaagccgggaatttcccggtcaaaactggtcaaaaccgggaccttggtactcagttgttctcagttgcccgtgttcaggtcccggtcccgctgcactctactttcatcatatttctccaatttgctttagtggacctcgccggttgtgcggggatgcgcctgccggcaacggataagcagggtcacacaatcatttgcgccggggctggctacccatcgcctaccgcggcatgtccgtccggctatcggtgcacaatgttggcgcacatggggtacggtagtggaatttcaatacgataacgaggagaaaattgaattttgcataagttagtcaagttccaattttgggttgattttaagaattgaatgtttttaaggaaaaaattccacacgtttcgataggcaatagagaaaattttggaattttagagaaatttattttgaaaattttttttgtaccttgccaattcgacagtcttttgaacattttgttcatttttagagtttgctgtcattcagcgacgcaaggtttgttatttccatgtttattctttccacttttctgaatgaaaatacgcaagtcaaatcagggataggcgccgcctggaaaatacgaaatacccaaattaaggtgtagctttaacaaaacaaattaaaaataattaaatctgattattaattgctaaataaatcgaaatacgggtagccctttaaataaaaaatagaaaatttttttataaaaataatcttacaagaaatcgtctcgaaaaataatccaaaagtcaaattacggatcaaaattgcggaaaaatcccaaaaatccgtaatccgcaactccaaaaaccccgcaatttccgtaatccgcaatggcgcccagccctgctaggatcagtacttaatgcatcaattcttgtcttttttctgattagaatgcatcatcaatttatataattaaatttattaaaaaatgccaaaaattattaaagttactaaggattttcctgtttgccagagaaaggaattcagaaccgaacctgaaaactctcttgatgaaatagattatcatcagcagaatttaacaagtttcgcaccgcttcgcattgcaataaaaatttcagatttgtatgaggccaactatcggcccacttgcccaaacggtggccaagcacttcaaatgcaaacgcgaggagtgccaatgactctgatcggtaaaaaatgcgcggacaatttttgcccgaccggcacaaaatgcgtggagaaggaagtgtacgcgcactgctgctaaaacagcattgattggctaattaatgaaaggaaaataataattaatttgtttttttttaaattccaaatttttgtttcaaagataaaatgatcacagcaaattaataaaaatagcacaaaatggcatttcatctaaatattcgaaatgacaattggaatgcttttcctcacattattaattttgttttatataaacagtttaaaatatttctctgtgtaaatgattgagtattttctatttaatggacaaaaaataacaaaagtctaataaaattgaattttctgaatttattgattttaaaaaagtaccaatttttcaaaggtaccggtaaaagctttgaatttctgagtcacaaaatttctggaatttttttaaataattcaacaattttcgttaaagctgcctattattttaaaattccaaaagattcgatgagaatttttctattgtttaataaattgacaatctcttaaatttttttgcttttaaattgctttttgatcaaagctttggttaaatttgcggttttaggctgtttaaaaaaagaaaaaataataaattttaataaatgctttaaatgaaataaataatttaattttttttcttaaaatttctccttctccatcaatttccttctctaatttctcacccagacccccatgttaccagtgcttaattagtcccgccgggaccgggacttgaaaaaccgggaattcccgacccggtcccgctcagctctaatataaatcgctctcgaattttggaatttcattcttcgtttttattttggtaggtgagcaattccccttttcatgttgttaataatacctcttattaaatgtattaaaattaattcatataattaccatgttttccaattctaacatctcaaacccaaccaatgcgccatcgtcggaaaatgccttcatgccatactttcccattccgtctttggcaccggaaatgcgctccttcaaaagtgctcgcttcaaaaacaaaatatatttcttcatgaccgaattctctaattttatgaaaatacatatttttttcctggattctctatgctctaaatagtaggaaaatcaatttcttcttttttttgtgttttgtgaacaagaatcgggacttttatttacatattcggagtttttatacataatttacatatttcgtgattttatacatatttggtacatattggatattttgaagatttttatataaatttttggaaatcctcaaaagtaattcaaaatttcggcaaattttcatttttttaattgtacccctaaaaacggtaaaaaagagatatcaaaaattaatttttaaaatattaaaaaatttgattctaggcctacttaggtcatttttatgcaattttatgcctacacatatttcgggattttttttacatatttatgtacatattttggccactttttgtacatatttttga

SEQ ID NO: 15468 - DNA, 1152 bp, Heterodera glycines
tcatttctttgctgtcattttttgtgtaattttaaagaattaatgctttttatttagaatttctatcttcaaaaggaaaaaagttattccagagacttggaaaatttcgatttttcaaaaaattcataacacccttccgaataagtctttgtaaaataaaaatactaaaaaaattggcatctgtgaaaaattgctttaatttatttataaaaagagtgttcactaacttcatgtccaactacaaataaatatcaaaaataataataatcttctcaattcatcatctaatttcaagcaatgttattcggttcagcattcattgggtgtgtgagccggccaatccaggcatagaaatcacactttccgagttgggcacattttgaacatggacaccttaagagattaaatggatttgattattcctttcttaattgactttacccttgggaccgttgattggcacttggccaatgctaatgccaaactctgcacatttcgagtcaatctcagtgactttctgaccaaactgcccactcaatgtctgccattcgctgttgttgctggcatgagaagaagcagaggcggcaatggcgaacatggcacggacgaagccgaggctaagggcacactcatctaaaagggggaagagatatttaaaatgatttaaaaataaataaataattattaggcaattgtccattaattggttattaccagcagaatgagtggcaagggatgcttcgatttcggccaaaagagttcgatcaccgccattcgagcagccgatcagttggcctttcaacgcgtccgcaacattttgggcatccgagaaaggaactgatcaaacagcaaaatgtgagagaatatcacattgatcagctgctgcttgatcaacaacacgctgtagctgatcaccagccgcaacagcaaccgttggcggtgatggagcaaggcgaatcatcggcaattaaagaaattgttgctgttggagaagacggagcagggaaaaaggtaaaagaattcaacaacttgttcagttgagctatagaagcgcgtcgttgagcagcggaagtgttggctaaaggacctttttgggcgtaggagccaattagagttggggacaaattactgaagcttcggggttctccatat

SEQ ID NO: 15469 - DNA, 3665 bp, Heterodera glycines
  unsure (1)..(3665): unsure at all n locations
cttcaaaattgccggaaaattgtcgcggtgcacaagatcgatggatgtgcacttcttcattgagaacgggttcgcactttttgtgatgtggtgagcaccacattgcaaagtgcaccattttccttaacatttttaccataaaattgaaaaagcaaaaatagttcaaaagttttacgagcgaattgtgcgagtcgaccaaaattcgggagcagaaaatgcgcccagatttgccgaagcaaatatatcgggcgaactcattgaaaaagcccgggtcacacagctcattgttattgaaacggaaatgcaggtagagctgtccgtctgacatccattcttttgcactgatcatgtcaaagttgagagcaagccgtttctgaattgacaaattaaaaataaacaaaattaaattaaattattattacaatttgggtgaagtttaggtgacgcttggcccgaaatatttccataattcgattaaccactgcgataccggatggtggacggccttaaattttgcgaaaaatttgaaatttaaatttttttttttttcccacttggcttgggtgttaccccgccaaataagcacattatgggcagtgagtagataatttcgaagagaagctcggctggtaatcgcttgggcatcatattggtcatgaaatttgaatgaatgaatgaagagtgaattaaaatatttttgtgcccggttctcatgggctcattaattattcaatagttaatattgacttcaaaagacatttgaatttgccgacaatagtgaaggagataacttcaaaggaaatttgaatttgccgacaataaggaaagagagttcgagaaaattaattggtattcggatggggacaccccgcccctaggcttcataaatactcagccaaatcacatttcattcatatctgctcatgtttttttactcactttaataataataataaaatttgtaaaaataattaaattataataaaatttttattttctgctgttaaccagagcggttgcccaattattgggctccgtttatcctggcagcacttgtgtgtcttttagggcttggggttgtgcgcgtgacctttactaattatccgagccgtttaggtgccctgtcgtcttgtgcttcatgggtggcagtgtgctgctcttcagggcatagttggtttaaaaaatctttaaattattattattattatccattaatttgcattcacaacgacaatttccatgcctcaaaaattcgcggccgttgcggaggagggagtgttagcggtgctgggggaggcgccgggtgtgaacaatcgcatcaattcattcatacggttgctcaacgcgttttgttcctccaaaaattgacgcgtttcctccggcagcacacgacgcacacaaatgctttaaaaaacaagaaaataactattaaaagggtcacatacattagtgttcgatattttgaaaaaagcatgggcctgtattttcatgacaaaatccagccggaaattgatgcactacgtttgcacccgccggtttcccctccgcccataccaataagtcccccgcccgaatttttcaatgcttttttttaaattttttaacaatcgctataaaattttcaatgaaatttcttatagggggttaatttttaaagggtcggaattgaattttgctatttattgtatctaagtatttaaaattaaattttaaaatggtatctttaccccggtttcaatggctcccgattaagacgagtttgacgaatttcgacaaatgcgcgccgaacaatggaagcgtattcgcaccgagccatcagttgttcaaattttaaattttggtcaggatggatgtccatgaagttgtacaagtcctcgacagcctgcaatcaaattttccgttttttgtttgctatttttgtttaaatttttcacataaaaattcattttcattcaccccattgaaaatgtcgccagaaattcggctgaatattgacgacagttcatcatcaccgcccatttttggttgattattctgattttgggcagctccgcctgcgccaccgtcctgccgtttctcttccatcgcttttcggcccaccgttcggatacatcgccgcacataactcaccaattgggaactttcgggaaacggatacagatagttgagcatctaacaaaaagcaaaatccatttagaaaggctgcaataagtatagtatatgcacacccctacaaaaaaattaaaaatttttagtcgaaaataataggaaaaaataaaataaaaacctctttttaaaccaaaagttaataaaattcttaataaaatttacagtgtttttccctaaaagtgacaaacgtaccgcatatttttggttgatgaccaaacgctgtaaaaaaatgcacaacaatttggacgtgtccttcactgtgtcagaaatttggttggtttgtccatcggcaacataaaaacgcgaataatactcgtggattgggtgcagcacagtcagaatgtcaacctaaaaagaaaacttttgtttacaaaaaaaaactatttaataaactttttcaatcctggtcggctcaacaattgcgtcagtgaatttggtgagacatttgcggaccaacgatgacaattgaccgccaggatcagaggcctggtatttcatgaccaatttcatcagcgccacaaaacacacattcggatttgtgaattcgcacagtcgaatcacaataatgttgagagaacggaatacctataaaaaatgattgaaacattaaaaaaaagccaaatcaattttaaaaaatcacctgtttgttaagtattttaagacgctgatcgctgaccaacgaaagaagtgaatcaatgaatgaacgcaaagtgtccgtacttatccgttgcataatggtcatttcgttagtcagctaaaagggattgaattagtggcattgttatgaaatccgtttgatggcatttcactaacagtgctaagaaagttgcaaatggaacgcataaattcactaagctcctgctctttttggtccccttccttcactccgtccaattgttcaagatgttggcttcgaatgtgaaagatttgcgtgaccatctaaaaaaataaaataaaattcccacttttcgaaaaaatgaaagaccgtcttaagaatgagttcggttctgtcaataatatactgccgtgttgtctggtcgttcatcagatgaagtaactgaaagggcgcagtcaaatttgcaaaatcccaaaaaaaacaatttttttttgaaattttacctgggctaacgcctcctcggcaatgttaagctgaagacaggaaatgttgtgcacagttcggtcaatgtgttccgcactttccagcgaagaaattgaagacactgactcactacgacgcgaaaaagtgctggttgggcgcacaactggtttctgaaaaaatcggaaaacattcaaccaattctcatggnggaacgggtcacaaattcttggtattataaaaattggttagttattgcatttgttgacaattttagtaatagcattttaaatgcgtaagagtggggctatgggtttctcatttctttttattagatggctcatctcatatttctgatcagatctacatcaaaaattttgatttttttttatatttttgg

SEQ ID NO: 15470 - DNA, 2992 bp, Heterodera glycines
  unsure (1)..(2992): unsure at all n locations
ataaccgcattccaacgcctnttgccttaaaaacgtcaccattttctttaaaagttttccctataaattcttaccaattcaacgctagtatatgtcgccacgtgtctccgctgtgcctcatcatgtgggcacttgtagttacatctcgtagtctccttcttaaattttgacgcacatctccaacatagcggaaacaataatcgttcatcacacttcagctgcaaaaccggaatccgcaaccccttcggcgggttgaccctcactttatacaatcccttatacttcaaatcctctggtctcgtccaattaacatcaatctcatcgctcttcggtataataatctgcggcaatccaattgggtaagctgtaccgtaattcactgacggatacagactcacaatatcataaacactaatttttttcttctcatccgattttgcatacaatttcatcggcccagtcctccctcccgcataagccatccgcggatcaatcggccctttctcattccctctgtcgtcgaagaagtcccgcatctcttcatcctttttcagctccttctcaatttgacagccctaaaaattcacaataaaaatgtaaatgtcaaataaacttacccaaacttcttcgacgtccaaagtcttccgcagctccgtcaatctctcctgcgtctcatcattcaattcctgggccgaccttcctccaatcagttccgctgccgggtcataacagttcatacatccatgtatatagcatcccataacttcaatgcatttgtcgcgccctcccacattcgtaataaatccatccaatttgtaattcccaattttgacctcccgtccgttccccgcgtgccgtatctcaattccatcccgcttgctccgccactccaaatactttattgccatcacactggcgcgatcacaccgctcatatcccttctccggcacaatcgataactgctccgtcaataaaaacattgccttaaaaatattcatcgcaaccccctgcttcgtacaactcctcggcaaggggtcaaatcccttagtaatgtcgttaatcaatatccttctaaactcaataattgacagcaataaaatctccgtgtcgtttcggcaataattttttcaattcatcatccaaataaaaaggtgtctccttgttttcgttgtacctgaaaaaattatttattgttaattttatccttcttttcttaccatttttcgaattttataaatttatccttgttcatagatcccggcgaatagtcctccatcggtggcagatgttccaatcgtattccataattttctttcttgttgtaataataggggaaaaagggcttgtcctcacagtctaaattaaatgtcgccttcagcgactcaagcttcaccggcatcaataaacatgagtctctccaaatcagctttgaatgtttcttcgagttttgcactttaaattcataaattttcaatccattgatgagcggtagcgggttcttcccggtacggcagaggtaattaaaaacaaaatgacctaaaaatttaggatttaaaaattaaattttgaaattaccgtcaaaacgtccggcgttatgtgcaaatatgtacgtatcataatttgtaaaggccgttaaaatccactccacaaaatccttggtcggctcatgtccctcctccacctcgctccaatccttgatcctctcctccccacaaattttgcaattcgtcctgtttttgtcatcacagcattccgtacacgtcactctcaccgaaatataattaataacatgctccttctggtcccccttgtaaatagaatcctgcgaagtctccgaatcctggagttaaagacttatttttgttgattttatttgtagaacttacccaaactacaattctgtagacatctttttcctccttctcctcgatcggcataatataacacccccgcttggggtcatggctcacactacaaagctggcaataagtctcaccgcattcatgtcccttcttcgtgttaaataaatatgtcttatcacagatcacacaacgcttccataatttgcaagtctgatgtccctgatgataattataacactcccaattgtaaaagtaacggtgacactttgggcattcaatcttcactccactctccttttcacatggcattccccccactctattgcaataataacaccttgcccggcactcgaaagtatgtttgacatccttgtcaaaaaagcactcacaatcaatacaaaattttctcccacgattaaaaaaacagacgtaattcttcagaccatcccagtgaccattctccaaaaatatcggtacgaccttctctcgtcccataggggccttccacaaaacacagatcgatttccgcggatcagctgacttctcaaacgcaacaacccggtactttccggggtaaatctcatcctgaaaaattggtcatttctatgtttttcaccgtttttaaacccacccaatatttctgaacattcggcaattgctccacaccatagctatattcgttaatatcaattccacaattatgtaaaagctcaatagctgcgtccctctgtctcataatattgttcataaatcgattaaaaatgtttcgatgcacttccaaataaagctttgacgccaccaaagcataaaacaaacaaaatttatccgcatttgtaatccttaataaaattattattatttccatttattttttctttattatttaatttattttttaaaattttttttctgtttttttttttgctgctttgcttaattaaaaataattatttctttttttctttactttaattattatttaattaatttattttattttattttattttttatttatttattttattttaaaaatttaatttttatttattttttggctcattanaattatattttttaatatttttaatttattntttcggtttttttgttgctttttttcatttttt

SEQ ID NO: 15471 - DNA, 1168 bp, Heterodera glycines
tttcttattactcgaaaacattgacagagagagattccctttattttgccaaaaacattgccaggcgcataccaaaaacaggcggaatgttttgggctaatgtttgggcatctctatcccggtttttagcgttttagccgatgttcggcaatgtttgtgtctgtttctggtagtgtatttgtcaatgtttgggaatgttctgtccatgtttttgtttcatattttctggatgatttagcagatattaccaatgtttgcgcttgtttcttattactcgaaaacattgacagagagagattcccaacatttgccaaaaacattgccaggcgcataccaaaaacaggcggaatgttttgggctaatgtttgggcatctctatcccggtttttagcgttttagccgatgttcggcaatgtttgtgtctgtttctggtagtgtatttgtcaatgtttcggaatgttctgcccatgtttttgtttcatattttctggatgatttagcaaatattgccaatgtttgcgcctgtttcttataactcgaaaactaactcgaaaatattgacagagagagattcccaacatttgccaaaaacattgccaaaacaggcgcataccaaaaacaggcggaatgttttgggcatctctatcctggtttttagcgttttagccgatgttcggcaatgtttgtgtctgtttctggtagtgtatttgtcaatgtttgggaatgttctgtccatgtttttgtttcatattttctggatgatttagcagatattaccaatgtttgcgcctgtttcttattactcgaaaacattgacagagagagattcccaacatttgccaaaaacattgccaaacaggcgcataccaaaacaggcggaatgttttgggctaatgtttgggcatctctatcccggtttttagcgttttagccgatgttcggcaatgtttgtgtctgtttctggtagtgtatttgtcaatgtttgggaatgttctgtccatgttttcgtttcatattttctggatgatttagcaaatattgccaatgtttgcgcctgtttcttataactcgaaaactaagtcgaaaatattgacagagagagattccaacatttgccaaaaacattgccaaacaggcgcataccaaaacagggggaatgttttgggct

SEQ ID NO: 15472 - DNA, 1473 bp, Heterodera glycines
  unsure (1)..(1473): unsure at all n locations
ttgggcatctctatccggtttttagcgtttagccgatgttcggcaatgttgntgtctgtttctggtagtgtatttgtcaatgtttgggaatgttctgtccatgtttttgtttcatattttctggatgatttagcagatattaccaatgtttgcgcctgtttcttattactcgaaaacattgacagagagagattcccaacatttgccaaaaacattgccaggcgcataccaaaaacaggcggaatgttttgggctaatgtttgggcatctctatcccggtttttagcgttttagccgatgttcggcaatgtttgtgtctgtttctggtagtgtatttgtcaatgtttgggaatgttctgtccatgtttttgtttttattttctggatgatttagcaaatattgccaatgtttgctcctgtttcttataactcgaaaacattgacagagagagattcccaacatttgccaaaaacattgccaaaacaggcgcataccaaaaacaggcggaatgttttgggctaatgtttgggcatctctatcccggtttttagcgttttagccgatgttcggcaatgtttgtgtctgtttctggtagtgtatttgtcaatgtttcggaatgttctgcccatgtttttgtttcatatttctggatgatttagcaaatattgacattgccaaaacaggcgcataccaaaaacaggcggaatgttttgggcatctctatcctggtttttagcgttttagccgatgttcggcaatgtttgtgtctgtttctggtagtgtatttgtcaatgtttgggaatgttctgtccatgtttttgtttcatattttctggatgatttagcaaatattgccaatgtttgctcctgtttcttataactcgaaaacattgacagagagagattcccaacatttgccaaaaacattgccaaaacaggcgcataccaaaaacaggcggaatgttttgggctaatgtttgggcatctctatcccggtttttagcgttttagccgatgttcggcaatgtttgtgtctgtttctggtagtgtatttgtcaatgtttcggaatgttctgcccatgtttttgtttcatattttctggatgatttagcaaatattgccaatgtttgcgcctgtttcttataactcgaaaactaactcgaaaatattgacagagagagattcccaacatttgccaaaaacattgccaaaacaggcgcataccaaaaacaggcggaatgttttgggctaatgtttgggcatctctatcccggtttttagcgttttagccgatgttcggcaatgtttgtgtctgtttctggtagtgtatttgtcaatgtttgggaatgttctgtccatgtttttgtttcatattttctggatgatttagcaaatattgccaatgtttgctcctgtttcttataactcgaaaacattgacagagagagattcccaacatttccaaaaacat

SEQ ID NO: 15473 - DNA, 1789 bp, Heterodera glycines
taataagaaaaggaatgaaagtgatggcccactaaatgaagccaaaatgggcgagaaccgttcatcaagcattagcagcatcaacagcaacttaattgatccaattaacagcaatttgagtgatctatccgattatgatgaccagccaatgttgatcccaaatgaatgggcaattaacatgctaatgtaattgggggatggattatttgatgaaaatgcttataaaatgaaatggaaatttacattgtttgagtaaaagcaaggttcacgttaactaaaaataagtaggatatgagtgttttaatatggagtcttccaatttttaaaacagtttgtgtccggcaatgccgatagcttcgccggaggaaattttgctgatttttaatagattttttcaccaaaagaggaaactttttaagaatttctgagctaaattttgagaaaatgatataaaaatgatagcaaatagtataaaacattcatattttggcattttttttttactcaaaagccatcaaaattcctaaaaatttattcaaaaaaacaaaatttcaatttttgagtctttttcatttataaggtaggaattgattaaaaaattgattttaatacatttgaaattgtttctaatattatcaacacagggacaattcgccttttgtgaatccttcgcaaagtttgaaacaaaatcaattcagttctaataatgaaaattttccgtcatcatcatcatcattatcattaccatcatcttcagaggcaccaaatattttgtatgaaaatgctaatgaaaataaaaatgaattgggatttttaaatgcaaattggccagttgtgcagcaaaaaacggccgataaaaacaatgattatgaaattcaaaaagaaaaacggcagaaattggaggagttacaaatggggaacggcgcattggacgagcagcaaattgaagcacagcgaggcttaaaacttttgtgtaatcaatttaataaaattaattattttttaatcatcttaaaggttaaaaaacaattatgcctccgggataattctggaaattttggccctgaaataattttttatgaattttttttttctattatttgttacaaatatttatttatttattttgaactctttatttttaagcaaataatttttgccttggatttactaattaggctttcggatttaaaatgaaaacttttaattcaaacctaacataattttcagtgcataatatatggtatattattatgctgagttttgccattttacaaatccaattggcgcccatcgaaacgaccatgcttcaagtgcagcaaggtgcaaaattcaacttttattatttgaatttggcattggagaaaatgaatgcggacaaaattttggaaaatatcggcactgaattggtgcaggacaaaatgatccaaaataacaaattgtttatggatataattggagaaataaatgtgcatgcaaaaaaagtttttggtcaacaattatatgagtaaggatttgaaattatttttggaaaaataatttttgatctatttaaatttatttgttaaatacataaaaataaattaatattcacaaaaagaaaagaatatgctttttgtctgtccaatttgtttttacatttttagaataaaatctgttcagccaaataatactcaagttgaagccgaaacatttgaaagcaagaaattaaaagtgctttatttttacatgcaattatttcgaaaattaattggtcaattggaaactccgtataataaaaattacatca

SEQ ID NO: 15474 - DNA, 2611 bp, Heterodera glycines
  unsure (1)..(2611): unsure at all n locations
aaaagaaatcattgtgttggcatattttggcgtccgacaaacattggcactgatttatgaacagcggcgagaaaatgttttaagcatgtcaaagcaaagtttggccgatttgttaaatgaaacgacaaaaaatgatttggcatgtttactgttgagccataaagaatcgctgaatttagagcaaattgtcaaaaacatttccatttcaaaaaacgagtaagggaaaggaaacccccaaaatttgggagcgtaaattgtaaacatttttatgatacgctaggttgattttcatagtaactatttaaattttataatgctaatgagcccataatggtacattttaagcaaaaatgccaaaatcggtagaccaaaaaataaacacataaattaaaaggggtgatttttcaaatgtttttgataagaaaacataaaaaataaataaaattaaatttaaaatttttccagcttcggagcttctgtatttttccataacatattaattcatatacatcaaaagcacatcaaccaatataaagagccaatttataaaataattactttcgcacatctttatcggctgatttttgagtattttgatggtatattcaataagatcaatggaccaatcatacaacaatatattgggttggactataaaataatgaaagaattttttgaaaaaagtaccaaacaattaaacggactaatagcacgagggaaaagtgacaaaccatttttatttgctttgaaggaatcggaagaagcatttatcagtgattatttgttggaaaattgcacgcatttaattgacgaacaaaacaattaaagaacagatgaaaaaaagatcaatcaaaaaaagcacagtgatctgttggcgttgtgtttttaggaatgatttttgaatttatataaaaggatttgcatcccaccttaacattttagaattccgttttgttcttatttagatttagtccgaaaatgagcattttgtttttgggtgtgaccaacagcaaaagcaattcgattgggtagcctaaagaatcgggggcgcaataaccagaaaatatttcggcggaggaatccccccaagccctgcggcaattttgccttttacattatgctaaaaaaatttgttagccaaattatgacctaattaaatttctgggctttgtggcgggctcagaggctctcactcctccaaatggaaccatacaaaaaataaacaattttatttaaaaggtcatttggaattaatttatgttagatgtaaattggtgtttatttagttattgggatttttttatttcaaataatttctttttaaaggttttaatgcatagctttcctaattcatactaatcgggtcacacacaacgaaaaatgcggcctgcggccacacacacacacaacagatgttggccggtcacactttcatttctcaatgattatgtaatcataaatatggccacaaaatgttgctgtgctttcatttatgttgatcattctcattggagcattaaaatattttttattggcactaaaattcagcaaaaaatcctcatgagcttcaataatttcccgtttttaacttcgtattttgcgaacaaaagcaattttgtatgtatagttttaaatacgcaaatattctcattaaacttataaaaaccacaaaataagacaatttttataaatccgaaccctttaaatatgctaattcttttttaaaatcacttcgggtcagatcacaaaatcactttcatgttcatattttgcattgattaaaaccaatttgcaaaataatcaaaaatagctacctacgaaaatttttaactaattttgcgtttcatagtttcgtcaaattagtaacaaaatgacgattatttatatgtttcagaaaatgttttcccaaatttttgtttttattttatttctggcaatgtgcaaatgccaaaatgtccgggtaaataatggcaatgcccgtgtggcacaaagccaacagatgttaggtggcaatggacagaaatttttcgtcatccaacgggacacaaacgcattggatggctcagcatcccaggttcaatccagcggaatgggaggaaatttggcggtaaggcatttttagaaatatcgtaaaatttatttattttttaatttaaataaatcttaaaaatataaaaagaaaacttagtaattcaaagcttttaaattaaatggatgccgaatttagatttttctaaaattaaaaaatgcgcaaatttgtgtgaccaaaacaaaattaataattgaatattaggaaaataaactaacaattatgacttttaaatattaaaatttaaaaaaatataattaatatctatcgccagcaaaacatgatgcagcctcagcagcaacaattttcacaaaattttgcaacaccaccgcaggcacaacaaactcaacaggcggttagaanaatcttatgcttaattgcatncagcatcgtttaaaatcttanaaaggggatcgtagcattgcaacaccngnncaacgttatcccntcacaaaacagaatggccatgnccaatcangttncaaaataggcaaaatctatctaaaacaaaatacttctttt

SEQ ID NO: 15475 - DNA, 1709 bp, Heterodera glycines
tttcctatttttccagcggtccccaatacattttgtctggcattttaaaaaacaaaatcatggtagtaattgtcagtgaattagcataattagcgactgaaaatggccaaaagtaccgagaaaacagtaaagataattgatgaattaattacccctttttaaaatagactgttttctcaagcatttcgtcatttgatttgtctgatctaatcattaaatcctggagataattttgggatccttcaaaaattcattggaataatttttgcaattattttttaattctgcttccgttcgtactattttaaaatcccgagtttattgttgtgctgcccataatcctttgaaaggcctagtcgaaaaccaattaggcgtgggttaaatttctgcttttttcggataattaaatttttagtccatttttaattgggccattttcgtcagaatattcctaattagtgtaaaattccaaagccataaacaatagcaggaaaaagcgatgttcaccggcaaatttgttgcattttattttcacagtggccacccaatacatattggagtggcattttaaaacaaagtcaatgcattaattgtcagttaattagcataattagtaatcgaaaatgacaaaaaatacgttataaacttccgctttttcggataataaattatttaattgttctttatagggcacttttcgtcagatcattcattcctaattactgtgaaatgcaaatataataaataatttgatgaaaaagcgatttgcatctgtaaatttgtggattttatttttcctatttttccagcggtccccaatacattttgttgggcattttaaaaaacaaaatcatggtattaattgtcagtgaattagcataattagcgactgaaaatggccaaaaggaccgagaaaacagtaaaaataattgatgaattaattacccctttttaaaatagactgttttctcaagcatttcgtcatttgatttgtctgatttaatcattaaatcctggagataattttcgggatccttcaaaaattcattggaataatttttgcaattattttttaattctgcttccgttcgtactattttaaaatcccgagtttattgttgtgctgcccataatcctttgaaaggcctagtcgaaaaccaattaggcgtgggttaaatttctgcttttttcggataattaaatttttagtccatttttaattgggccattttcgtcagaatattcctaattagtgtaaaattccaaagccataaacaatagcaggaaaaagcgatgttcaccggcaaatttgttgcattttattttcacagtcgccacccaatacatattggagtgcattttaaaacaaagtcgagtcctcaaatgtcgggtagccttttacacctttttaatacccaaaattattttttcaaaaacttcgagcttcgaaaacttcgggttttttgggttcggcttcgagtgttaagccgagcttcgcccatcctggttgggacccacgcgtttgggcgcgggcgtttgggccccagcatgtttttccattcatgtataacttttttggtaattgtctaattgcaaatcaatagcttagaaaaagcttctaaaaatcttaagctttcgaatgaattttttctatttttccagcggtccccaatacattttgttggggcattttaaaaaacaaaatcatg

SEQ ID NO: 15476 - DNA, 2746 bp, Heterodera glycines
  unsure (1)..(2746): unsure at all n locations
ctctcattgcatattttgtttgtagacctctgagcacacttactacaacatgaccaccatcaatcacaaccaaaccgtgttcgacgcgacttacacggacgtggccaaacggatcagcgacggaggcgccgatgggaacacaaaccacgaacattcggacgaggcgtaccgaaaagcggctcgtaggttttcgaaattattttccgattttttatttacaatttttgacctttaaaatgtggtgtgtgcacacaattgtaaagtgcctaaaattggcgaacaattcactaaagaaatttaaacattccgatttcaactctttctcggcagggcgtccgtctgaagttcgaatttcccttctacggccatcggctggcgaatttaaccattgcaactggagggtttctgtacgtcggcgatcaggtcagcagctgagaatgaggggtaaggagaaggcgaatttggtccggcggtttagttttgatgaaattttgggncatttgggcccttccgccccccgtcttccccccccccccggcaactctttcaatcgctgttcacttttgcctccttttagacccattcttggcttgcggccacacagtgagtgccaatgccaattggctcttgaaactccttcctctttcttatccacacactcacaatcagatacattgcgccactgatggccaactttgatacgatggccgacaattcgagcatccaatacggcgacgacggcaaacggatggtggtcgagtggagaggggtcacactgagggacaacagagagggttagtcgggggggggggaaagtatgcggaccaaatccaataccaaaataacgggagggaattgacgggacaaggctaaactcgccgggacataacgtcctgcttgaattttttttatatattttaaaaaaataccctcatttcagccggtccttttactttccaagtgcatttgtggcgcaacggcaacatcactttcgtctacaaacaggtactccccggtccgactgatctgtgcattgtaaatgctgcaattttccgtttttaggtgcccgtccccgtgacgaacatttccggtcagttcaaccaatcggggcgctgccaaaatgtcgcacaaaaaaccctatattaaaagttttttctcccatttaataactcaaccccatccgccgcagatgctcaacacccgtgcaaattgggcatttcggatgcctatttgttcaaccacaaagtgtccacgctgtcccaggccgttccacaaaacaaacgcgtgatccacgaggtatattttcagcaaggagagtggttccacttcaaaatggaagcagttcgccccctcccctcaaaaaaacaatttttgtttttaattttgttagttttttttcgtctcgatgcaattcctaatgggttctctttcattggtttgagtttatttctcttttntagtaccaccggataaccattaatcctgaacaaatccgcccncaacaccgtcgtcatgcttaaagcattgccaagtgagtctctcactcgtatcatttgtccctaattccgttttttccaaatccatccttttccaactctcattttacttttccctcatcttcttcccaatgcgtcagcttgtctcgaggccaacagctgcgagcagtgcatagcaatgcaactgaaggcgttcaagtgttcgtggtgtaacccgaaggacagcggcaaagggccgtggaaagagggcggaacggcgacgggggaaagcgtgcgacagtcggagaagccgttctgttcaggtggggcggggtgaataaaggaaacaacaaccaatgcgcgggtttataccatacaaaaacgaagtgatggaaaaagtttcgtaaattgtttcgaattgatgggaaaagtgccattacgaaagaccaaaaaatttgcactttggtggaagttggtactgccggacaaatacgagagcaggagaaaacgttgccgggagataacgtcgccgcaaatttattaaaattttagaaaaattcaagaaaaaaaactcaattttatctaaccaattcgaaaaattttttcaagttttttttctgggaattttgcaaattttgtttttcagtaatacctaggtttcaaaaaaaacttaaaacaattttttaatgttgaaaaaatgtcgttatatcccgacgacgttttggtgtgtacccggcaatacataaaatttttggcaatttttaaaattaatcgcttcagaccaactgggactgaaccgacaacgccaggaatggattgagggcaattgccaaatgcacgaggagaaccagtactgcaaggcggacgaacccgtagccaactcttcggcgtcgtcgcccaccaccggctcatccgccgctggcacttctcatctcggagcagcggtggcccctcccaaagccgctgtggcgtccgacagcggagcattgccgaccggcacaccaacaacgacagaaaccccaccgtcgacgacagcaagcagtacaacgacgaaaggcaaggatttccaattcagtaacttgaaatattttcaaaaaaaatttttttcagccactgcgaatgaaaaacgaattgcggaggagggctccggcggtgggctggcgttcgtcaccatgttcatgctgctcggcatctccgtctccgtttggctgctgtacgcctacttcaacccccacaatgggtccggccaactgctgatcaaagtccgttcg

SEQ ID NO: 15477 - DNA, 1568 bp, Heterodera glycines
atgtcatgaaaaagggcattcatttcgagacaattccgaacgctaaacatgaatttgaacgaaaagtcgaaaattatgcaataaaagtcaaagtgtattatgatatagtatcaattttttccaaggtagttttgatcaaattttctaattttgttcgagttttaaatacgtgagcagcgattccgaaaacctctcggaatatttattaggcaattttcatgacatttttaaattttcaacatgggaagaagggaatccatctactatcattttggttcatttttacaatgatttgcatgacagaaaccatttaaatatcttacaatttttgagggtttgaggtttttttccttggatccttttagagttgttgtaaatttatccccgaatcatcaaatccatgttttcatccggaaatattttttgttaatcaacaatgtttcgctctttttaggccctttgtccgtccgcaaatccggcagcatcgtccccgcaccgtaccggtctgaacaactttctgcaaacacaggtgtaccgtcatcgcaaacgtgcccattccccgcaagactcgcattcatttgattttgtctcaaagcgtttcaaacgtttgtaaaagcatcccaactttagcccttcccctccccgtcactccccacaaaaatttttttttgttcccattttttaattgtttcaacggtttggcaaagcattgtaaaatgacatggacaaagactgactgatgtggaattgttttttacttttcataacacggtacgaatataataataatacatacatacatacattcaattagagcccgaaattaaaaaaaaaaacccccggaacccagaattccggtttatgggatggacccggacaggattttggattaaaaaacatggactccaggccctgttgttttaacatatatgaaccgaatcctacaggctcttggtcctacattcgggtccaacatttccactgaaaaggggttgaaaaaattggtgcctttaattactatgcaaattgatgagaagaaatgccagatccgcctacactaccctccccctcccctctctttcccgtgaacttgaatgtttgaagtgttaattatctctttcaatttttttttttttgtatctgctgaaaaccatttgtcttctcttcttctctagttcatttgtaacacacgcacaacaaaagtcaaagtgaaaaaatatatatgtaattattttattatgtctcaacatttttcatctgaattatttatggcaataaaaaatgtttgttttttttttttgtctgattttttcgttgaaaataattcttttttttattgccattcattgttcaccaaaagctgtattttcttataaatgttcgtttgaaattttttttattgactaaagaacaaatattatacattttttcattaatcgattagtgaatttgttaaatggtcgtagaaaactttttatttgttagttagcggacagtgccgtttctgcgccaagaattctttttgctagaccatcaaattttcataaatctgtatcattcgaacgaga

SEQ ID NO: 15478 - DNA, 2629 bp, Heterodera glycines
aattccgacttccgagttcttacatttttaggggtcccatttccggcttccaaaaaatttttgtgcctcgtgaattccatccctgatttctagtacaaatgatgtttgaccggcagagagccgcttctcagttcggcaagtcccaaggactgctccgacttggcaatcgcttcttggagctctctccgttccctctcctcctccctcttggcattgccctcattttcttcttcctccgccgcttcatcttcgtcttcctccgctattccaccaaggtttccaccaccaccaccaccaccactgtcgtcacccttttcgagcagttcggctaacagtcgtccaatttcggcactgtttaaatccgcgaccaattggacatcggccggtgaaagcaattggacaattcgttcactcaatttctgaaaatgtcgggattagaatttgaaaatgggcccagattggacatggcatttggcatgaaaccctgcttcatgggtgctcagttaaatgacactcattcagacaattccaaacacggacctctaagtgcgaaaaagaagttgaattaatttcaaaattttccatttctaaccataaatgcggaattttgacgacatatacgtgatgttattgtcgagaatgatcagttttgggatacaaatgacccattctcggccatatccccacacccatacttttggcacttcggcttacaccacgggttcgaccactcgttccacttcccagccccaaattttccacatttataaatccgcccctcccccaaaagtttttactaaatttgatatcctcattaaccccatcccacttggtctgtgccgtcaagaatgcttccgtcgaatggcaaattgatttcgttaattttaaacagcgcattcattaggttgagcagtgaccgcagcgaatggcgtccccctttgctcaacatttgttgaacattcgcaattttgtccaatgaattggccaattctctgaacagcgatcagggatcaatcaatgtattgctacactattccagaccaatttgttataattttgcgattccgaaattaggcgactgtgccaaagcgggaaagggatgaaaatcctggggattccatcccctgtcagggttgccacggggcgagaaaatgccgggattcgggtcgggaaaagggcagaagaaaattcgagacggaattcgggataagaaaaatctgcgaactcgggtcatttcggaaaaacgttggacttcaagattcgggtgacaaccctttttcacggcagcgcctctccttggcacagcgaaacatttaaaaatttttgtaaaatgccgaaaaagagggggtaattaattaattattttgcccccagcgttttcaccggtgggtgtaattgagcagtgtcccgatgttggtcagctgattgttctgctgttctccgtcaccacactttgttgcactcaaaaacactgtttcaacatgtcgcatttggacagacacacggcacgcttccttctctaactgttcaaactgattctcggccttaaacgcaagggaaaaggatcgaaatttctctaaaaaattactgaaatttttcaggtttggaaaaggcaaattttcaaaaattttccaaaattaccccgggctctgaaaatagtaaatttttccaatttaccctggctcggaaaataacaaattgccaaattttacctcattggcatgcatccccaattttggatatgagttccaagcgaaaatctcgacccaaactctcgtggaaagaccccccccccccaatttagagtgttgaattcggggccattcttggaatgcgaaaatattcaatgtatctatctatctatcaatggcttaggctgctgatgctcgagaccgaaaatatcaaagatttgaccccgagattctcgagcataacactaattgagggttagtcattcgaacttcgataaatttggcaatttcgcccagaaacaaatgcatggaatcgggcaacgcagctgaacatcggctgcaagttgatgaacccgcttgacaaggcaagagagaatggcgtacaaaaagtcgcacgaatcggattgaatacggtagcgatctgacgcgaaaaacatttttttttttggctttcggcttccattatatcaatctggtctcaattgttggtcctttgttatatttcgatttatgtcggcgttttgtcctactttctgtatatgtaggtctttagtacctagtttggtaatatatatggattcattcgtcccttctcactacaaaaggatgcctcagaatcctctaatcgtcacagggattctgaggtcttaacgatgtccaaagtaaaatctgatcaggtattcgtgatcagcgtcataaaatagccttaattcgcgcccgtttttcaatttttgttggccttggacgggcgcttcgcgcacgttttttaaatccgttgaactcatacgggcgcttcgcgcccgttttttagcttgttagccgcttcgcggccttagtcgggcgcttcgcgcccgtttttcaatttttattggccttggacgggcgattcgctcccgttttttaaactttgtttacctcaaacaggcgcttcgcgcccg

SEQ ID NO: 15479 - DNA, 749 bp, Heterodera glycines
gtggaaaaaatgccaaaaattggttgggttaattgtaccaatttgtcggcaatgattggccaacgaactactccataaaagtgccaaaaaatggattaaaatgccaacaattaaagatgaattatgcctttttgtgtcggcaatgattggccaacaaactactccattaaagtgccaaaaaatggattaaaaatgccaaaaactcgcgcagattgtggcgccaaaaatggcattaaaatgcccaaattagggggtgaatagtgccaaatttgtctgccctgattggaccggggagacctttggatgatgttgaggacgcccgtctccgccgccacacagtcaatcatcgcttttcggctgaattcaatgcgttcaatgtccagctggcgcatctgctcaagcagctgtggcatcatgatgttgaagtgctcaaacttggccttgttggtggcgccaagggtggcggcgtaattctgaaaaaagtggggaaattttagaaaaaaaatttccgaatttttaagatttattttcaacacgaaaaaggccccaccagatggttcaagaccggacgggaccgggcattcatcgggtcggggtccgtaattcggctacattttgaaagatgcacccggaccgagaccccaacaaaaaaccggacgaatttcaagccagagaaacccggtccagcggcagttttcgaatcctggtcccatatacctaacaccaagggttggttattattctatgtt

SEQ ID NO: 15480 - DNA, 2506 bp, Heterodera glycines
  unsure (1)..(2506): unsure at all n locations
attatcccaccaaacncaggctaattacaaaaatggaaatttgaatttccggtttgcatttggccaatgtccgtctccaatttgttggattacatctaccattttttatcccccaaatatccgcaaaattcccactcgtagttcttcttctgcttgaccaattcgtccgccctggcctgcatgttcttctccatcatctcgtagtcttggtacaacttcttgcgcgtcgtcctcaattgtcggcacttttccgtcagttgggggcacagttcgctgcgcaaccgttcgccgatcacctgaaaaaccccccaaaaaatcatacaaatatgacgaaaattcttacaaaatcctgggaccgtccctggacagtgaagaattttgtgccggattttccatgaatttattttgtattgacactcaaaattttgccaaattttctcccaaatccctcctgccccccccgcccacctcgtgctgtgatgccaatgcctccatctcggccagcattgtttggaatgccattgtcgtggtgtactgcttggcctcctcgctgtcctcattctttttgccccgtgaacgctttgccaaacttctgccaaaacaaaactcatttctttggcacaatttggccattttaattcggcaatttaaaattggtccaataattaattaattgaattaatcttccgattcttgcttcaatttggacgcgtattcctcctcgatgagtgcgcgttccttggcaaattggccgaaccgttccaaaaagtcaatgccacgcgaagtgtgtgccgaaacaaacggtgccttgtcctgaaacgattttaaatacatgttgatcaaatgaatttagcctaataatcgcggtttaattaatgaatttttaacggctaaaaattcgagttagatagttaaaaaatgtaaacaaaaaatatatatacgtaaaaatgtgtttaacagtaaaaaaaaaaattaattttgtttgggttaaataggaaaaatgatatgcatttgttttttttaattcattcccatccaattttaaaatattctagaaaaaatctcacctccgacatcccaaaaaagctatttataactaaaaaataattttaaattctgttgttttccgacttgctctgacccctgctgttaaaatcattaaaaaaatgaatttaaaattctcaaaattttatttgaaaaaaaaaataatggaatacatattcttcaacccttttcaaaacgaatcatctttctaccattatttttctaattttaattttctttattcacatgataaaactgttcgtgccccaaatatgtttcggcataaatgccgccgactccgttcgcagcaccagcaaaagtgcccgatgatggcacagttttgccaccattcatcgcagcaaagcccgccccattttccgctggggacgaagtaaacagtgaatagagtgccgatgccgagctgctcagctcggagctcagtgagccaatcgtcagtttatgggccgctttttgtgccaaccgttgggcccgtcggctgagcgtcgatttgccgtccgccaccaccgatgccgacgacgacgatccaccactaatgccaatgccattcagacaaatgtgtgaggcggcggttgaaatgccatttccatttctcagtccaaaaatgcttggccctccattattgaaagccgggccaacaattaaattgccaccgccgacggcattagaggaggagtacgatgatggcaaaaatgccgcttttgatgaacccttcttcagagttccttcattgttggtgccaccaacgaagccggctgtggcataaattcgcccctctcgaccatggccatcggttgtacagccaaacgaactgatcggcaaccgttggtagtccggcaatttcaccgcaataccgccgttgccgaccagtgacagccgacgctggggacgattggtgccggtgccaatgccaccaattttttccacattgttgtttgactgctggttgagcacgccagtcacactgtaatggaggccctgatcaccaacaacagaaacagcagcaatggtggacgaagacccggcgctgaagctgctctcggtgccaaaactgttccgattattgttgctgtttccattgttgttggcatcagcatttgatcccccgtcgttcattacttttcccccaccattccgcatttggtgatactgctgctgatcatgatcagcctccactttcgtctgatcaccatcactaccgttggtaccgttgttgccgtactgctgctccatgtcgtcaccgtcgatcatcccaatcagttgttgctgttgtgccaccaccgccggttgtgattttgtagctgctgcagagaaggaggcagtcactgccgtccttctcaagccccctattcctgtagctgctgaaccaccaccacaaccagcagttgttccggctccaccaatgtaagtggttgtggtgtgtgtgatcacttttgctgtacca

SEQ ID NO: 15481 - DNA, 3859 bp, Heterodera glycines
tttacatagagcagcagattgcgcgatatattctgatttggatggtccaaattctgacaaaaaattactgcttttatcataaataaatatgttaaatttgtctatttttaaactgtttttagaaaaaagtgccatattttcgcaccttctttttttaaattgactcttaaatccgaattctaggtgtttatttgagaccatgcatacgcatataggcgatataatggaatatacaatacaatggaatacagctgagaaatacatattatgctttatatcgtttcatcgcattgcatgtttgttggcaccagcatcattcttcatcccactcgtccgtcctctgcttaagtttgcatgatgatggcacttccgttcttctgctgctgctgttgctggcgatgaatggcgacattggcacattccgtggcgacatcgttgcgcaatttgcgattagcggcagcgaatgaagcattctcgggccgttttttcaccagcgaattgttgaagaacatctcgaagacgaacgaacacaccatgacgatgtcgaacacctgaaaaatccagaaattggaaaatgcagaatcaaatgggcggcaaaactcacaaaagtgaccaacggcacatttgtgtcatccgcacggaagttcatgcaagaccaataagatgtccaatagagcagcaaacacgatgaggcccaagcagagcaacaccagcaaaagacagaatagagggccatgcaatagtcgaagcacttaaaaatgaaaaacaaaattagtaaccgactcaatggaaaacaagcaaatttttgcaactcctaacccgacaaaagcaaaactgatcacaatttgatcaaaaaaagcataggatttcgactgaaaagcaatttggtcgcgtaaaagcaaaactgatcacaatttggtcaaaattccaccggatttcaactgaaaagcaatttgttcgcgtttttgtcgggctgatgtgctgtctgtgttcacgcattgaactcacttcatattctgccgcagggcgtaacatccgggcgaagccaatgccaatggtgagaagcgagcacaatgcgagcaacagttggccggaaaagaagtccacaacattgtcgaggagatttctgttcttctcagtccagaaaaaaaacgaaggctgaaaaaacaaaatggcattttatttcgatatttctgatggcattttgctcaccgtcgtaatcggaatacagtggcgtccagggcacggcaatttggcggccaattcgtccatgaattgctgctgctgttctttgattgggagaccgttggtgctgctcatgaacagttggttgtgccatttgcgctcgtccaacacagcgccgaattcgcccgtctttgagtcctttccgatcagcgtaaagcgtttgcagtggccaacagagatgtcatggaggaaggcctgaaaagcatggaaagaccgttaaaaaaaattgaaaatgagcagcagcacacctttggacagacaaatgtgccgcaaaattggtgaaatgaaagaagttgccacacgaaggccaaaccgagcacaatttgcaacagtttgaagtagacgatcgtccgcataatagaagaatttaaaaatgtgaacggacgcaatgaatgagagaaaattttgcaatgctcgcctttatatagacaagcaaaaaaattccgaaattaagggaaaaaaagttgtataaaagggcgacatttcctcacttttcctcacaattcacttcatcgccctcatattatattattattattatcgtccatcgtctacaacacttcatcacacacgaagcggacgtgcccggcgcaacaacttcaatggaggattactgtttcgacgcaacggcagcagcagcggcggagcagtctcggcgtcaatcgggagcggcatcggaccttgtgcaaggagacggcctgtcaaccggcttcctggacgcgatcatcacgaaggtcaaccgttcgcctcctcagcgcttcacggaagaggtagaaaaatttttgagtttttcaaaaattaattttcccccctttttcccccaacagatcagtgacgatgaaatccgccagctctgcaaagcggccacggacgtcttccgaatgcagccgacgctcgtcagaatccacccgccggccgtcatcgtgggcgacatccatggacaattcgcggacctgaagaagatcttctcaacgcatggcctgccgccggagcagcagtacgtcttcctgggcgactacgtcgacagagggccccaatcgatggagacgatcatcctcctcttctgctacaaggtgtggtttttgggggatggggggagggaacccccaaaaaatgaaattcatttccccccatttttcaggtgaagtacccgtccaacttcatgctgctgcgcgggaaccacgagtgcgccaacatcaacagagtgtaagtgaaaaagttttttgtgtgtttttttgtgattaatcattcccccccccccattttcagttatggcttctacgatgagatcgaccgccgttacccgcgaccgggcgctcgtcgactcttcgacctcttcaatcaagtcttcgcctggatgccattcgtcggactggtcggcgagaagatcctctgtaagttttgggggagggcaatttttggggttcaataactgttttccaactgattttcaggcatgcacggtggcatctccaatcagatccgcagcctggaccagctcagcaacttgcttcgcccgcagaccgagccactgcttcgttcgctggaaattgacctcctctgggccgacccgtcgacgagcatcacaggcgtcgccccgaacaacagaggagccggcgtcatgttcggcgcggacgtggtcgagagcgtgcgcaacctgctcggcatcgactacatcgttcgagcgcatcaagtgagttttttttggcttttcatttcacttttgctttctataatttttccccttcccttctttttcagctcgtcatggacggcgtggaatacttcgcgaatcgccacctgatcaccctgttctcggccccccgctacaccggcaagaacaacacgggcgccacgctgctgatcgcgccggacctgagccacacaatcacgcgcttcccgccggcctgaggacgacgtgacggacggacagaacgcgcacacacactaactgcacacagaaggatggtggaactgcccggagagcgatgcgtgtggagaaatcggatcatctgacccccccccattgttgtattgtattgtattgtaaacccccatttcacatgatgaactcccccaaaaactgttgtcatttcaatatttgcgtgtgtgaatgtacgtatgtatatgctatgtgtgtgtgaataacattgtaagcaaaaaaaacaaaaattcaattttcactagacaaaattcgtttttttaatatgtagaaaattttaggaaaaattttggtgacttagggaagcaacttttagtgacgaaaaatgccaaaatagtgacataattttcagccaaaaattgagcaaaaattgtggctttttgagaaattttgaggatttttgaggcttttggggaaaatcctcagaatctttaaaattttgataaattggcataatgtttggcaatttaaagaaaattacaaaatttttcccggcggcgcctatcggcaccgccggccccccttgcgccccaaaagttttttgggaaaagcgccgcaaaaaaatcaacttcgtttttcatgttcagaatcccataaaatgcttatttctaacaaaaaaaaatgctcaaggggggcatggacaatcaaaaatataacatttgaacattttaa

SEQ ID NO: 15482 - DNA, 1348 bp, Heterodera glycines
ctgtgataagtgacctcattattaatttaaataattataattttgacgttctgtttaattttttttgatcttttctaaattttggttgttttttttgtgatttttggtttggataattttgtttctcatcatcgcctccgacttttctttttattattttgcttcgattttaataaatttgtttgttttggcctcgcttaatcgttggtcttcgagtatcaatttgtgtgaagcggtggaattgaagtttttatcacttggcgctcctgcagttctgggtaagcttcagcggaaaatttggagtttttggattttggtaaaaaaaaagttgggaattgtgaaggttaaatgaaattggatattagtgactcacagattgagcactaaaatttttttttttttgatctacaacaaatctgaaagatagatccacaggttggactatcaaatttcgaaattcgcttttcacttcactcgccgtttttcgcgtttctcgccaattgttttgtttctcagcttgaacaaaacactgattcacttcaaattggttgaatattgagtgacactgccagaaagaagtcacaataaattgaattgaagcgatactctcaggaagagattgcaccacaaagagtgtggcattcaattttaagcgtaaaaagcgtgaaaaacgatgattcttcgtacacctcgtaggaatgcgaatcagcggcgtttatttggagatgaagaaaatgagcagaacagaaacaatcccgaatttttaatgcgttttccccctttcccggaaatgaatagaggaaataacgcacagattaatgggaatgcgaaccattcaggcagacaaatggacgaacaagagatacgagacaatttgttggatgtcggtgaacagcagaacgaaaatggacagcaaaacgaattaaatgatgacgacgaacgcagacttttggatcaaagtaacgggaacaggggacaaaatgtggaagaaaatttgagaaaccggggtgaaaatcggcaaaatgaattagttggtaatgttacgcctcgcagaaattttgagtttgtgacttcaactccgaatataagtccaatccgtaatgtcccacagctaaattttggcggcaatctgagaaactgggaaaggcctagggacgcgcttggtcggttcatacgcttagacggcgacaaccgccaagaagcggttaatgcgccaaaccataacgcaaatgcaaatgcccaaatttttccgcaaaatcctccagttccggtcaataaccagaacaatttggggaactaccaatggtggtgcccaaatccaacaaaatgcagtcaatcaacagcagct

SEQ ID NO: 15483 - DNA, 2086 bp, Heterodera glycines
aaatcccaccaaaatgcagtcaatcaacagcagctaggaatgaatgggatgtttgcacctccggttttgtggccacagatgccgatgccagtttttcatccgcagcctcagttttacaggggtcaaatggtaccacaatcccccatccaaaactatgcaccgtttttaaacaatcaaatgcctgcaatgcttccacaccaacaaaatatccagcatgctcaaatggctataaacgccgcacgtcagcaggtgaaccagcagccatttcaaaatgcacagcaacaggcggtcctacaccaggcgggcctgagtggacttgaatatgcgatgattttggatcgtctgccggatataaagggaaacgaaggcagcgatttgattcgcaatttctttaaaaagtacagtcaatacacgattgattggcctaacaagaagcgtatcgaatcgttggaggcaaaattaagtggccgtgctgaaagagcctataatgccgctctggccagcgaaccgttcgcttacgaaaacatcaaaagaagtattttacaacaattggaggagacggactgcagagaaatgagtgcattcaatgatttgatgaatggggtactcagaaaatccggtgaaaacctggacgatttggccgatcgaatttcgagtcttgtacgcagggcgtatccaggactaacgcgaaatctggcagatgaatactcgatcaaacatctgattagaagtttgaataaccccgaactcgcactgagtttggagcttcatcgccgtaatggaatgtcatttgatgaatttgtggcgttggcttcgcgcgcagaaacaacccaaaaagcggcaaagatacaaaacggggagcgctcaaaaccatattatgagcgaaacttccagcatacgcaccagggtgaaagaaattccgaaatgatttctaaaaatttttcgccacgccctatttgttacaattgtaacgagcccggccatatttcgagaaactgtaataaagcaggggcacagtcgaaccgaaatgcacccgcattttttccacggaatcagcaacaacaacagcttcataattcgccagctacgggagcgaaccgaattgttcaacattccaaaaatggagtaaccccagcggtacgctcacaaaactttcttaagcaaaattgcataagaatggaagaggaagttaaaaccgacgcaaccgacgcaaccgtcgcgggtgttaaactggaaaaggaagttatagagtatttgagggatgagttggagaaaagcgaaactttttgtagtggattcgaaccgaatgcaatgattggaaaaatggtgacggtggaacttggagtgatgggaacccaaaccagaggaatgcttgacgggggagcccaaatttccttaatgggtggaaagtttttctatgatttgataaccagtggtaaattggatcttcacaaaaccggatttaaaggggtttcagcccgaatttcggatgtcaatggtaaagagttggaatgtttgggaacgacttctcttccagtcgatcgaaaaggttgcaggacaacaaatgtctgcttccatattacgagtgctccttttggttttgacttgttaattggtaccaatgcattgcgttctctgggtttttgtctttatgacattcccaataaagaaatgattaattttgaggaagtgaaccatcaaaagaaaaaccagatcagtgttatttatcaaatgacattaaaaccgcatacaatgcaattcgtaacattgtcagcaggaaatgaatggaatggcaaagatgtgttaattacggctgccaatgagaaaacttttcataaattggagccaatcgtcggaacagttcaagatggaaagataatggtgtccattttgaatacatcagataaatttgtgcagatttttgaaaacgaaataattgctgaactaactcctgcacttttgatgtgggagactgaaaattcgcttgcttccgtcattgttagtgaataataataccgtttcttcgattgatgcacaaagagaataaaagaaagagaattcgtgaatttgataatcagtcgaacgg

SEQ ID NO: 15484 - DNA, 1398 bp, Heterodera glycines
  unsure (1)..(1398): unsure at all n locations
ttttcccgtttcccagcggaattcccgttaaaattgaccgttaaagccgggaatcccgttcccgttccgcgctttatctctttccgttccaggaacttttttttaccgggctctaatttatatctttggtgaggcaaactaacaaataaatatataaaatgagtgaatgagagtaagttaatttaaattttgaaattctcatgcgtatttattaacaattttctttttttttgcaattttattatcattgaattgtcaaacaaaacaattccgatcagtttattttccaacatctatataaatgtttaaatttaaagtatcaaaatgtgaatgatgaatgtaggtgaatggatgtatggatcgatcgttcgatcagaaaggatgaagacaaaattgttgttggcataaaacgaggaaaaataaaactgtgaaatataacacacacacaaacagacacacaaagaattattggaccgcttttggggtctgatcagttgatgtgtcctcctcctcctcctcttctccctcattgttagcatccttctttttgccctttttattatgccccgtttgtccagtgacgatgatgttattgttgttgtggttacgttgctttacgttcggcgacgggttggagtacaccgagtgcatcgactcgccagcagccaacgagttgaaggaggagcggcacgactgcagcgacacgacactgcccctgcccaggggagaaaagtgggggtgaatttgggggtgcaacacgttcactccctcgcattgtttcccaccagaaaaaatttaaaaaataaaactgaaaattttttaattttaagtttttgtagttttttctagaaaaaaaattgaaaaaatttatttggaaagataccttattaaattttatggaaaaatctctatgaaagttagaaaaataaaaatttacatttttttttgtgggaatgcgggggaagagggcaaatggccaacatcaatcgatgtgataccgaagtaatatatattttttttaattatcaaaacggagaaaccttttcaataaactaaaaaaagaaataaataaaaaaatttcaaaagacgaagaaaaatagttagaaattattaaaaacttaaaaatgtgaacccacttgaagtcggccgagttcaacacctcgtggtagaccatcagccggcatttgtgtgccgcggcactgctgctgctccctgcgccaccacccccgcttttgtggtgctgtttctccgcaatgttcgcggccagtgaaggcgacgttgtctccgccatttcagtcccgccggacgtgtcaagcactgttatgtttgatggcttcgctgcgagggttgtgccggtggncggcgttttcgaagcggcagtggcagccgcggcgtcgg

SEQ ID NO: 15485 - DNA, 2359 bp, Heterodera glycines
gggggggggggggggggggcagggagggggaaaaaggtttttcccaattttttgccccttggaatttttggggcccccaacccaaaaaaccgccatttcggccgggctttttttggtcccaacccaaaaaggggttccctttattcaatattaacccctggactaattgtaaaaagggaccaatcctttttatcgtttttcgagactttattcggtttttcgaaatccagtttgtgaccagggcaaaaaaagccaaaatttacaaacgaaaaagtggtttaagagtgatttgaacacttacaacatcggaatgttcccttgtaagtagtaggctttctagaaatttatgggcttttttgccaaattgtcacggctccttgaaaatgttgtacagtacacctgcatcgagtcgccttctccaaagctcagcggttgctgggccaagaagagttcaacgccaacacggaaggtcggctcgccaattattgccttaaaaataaaataaaaaagtaattaaattgtaaaaatccaaaaaagcaggggggagggaggggtatgtgtacctcccccccgtgaaatgaaaaaatttttaagaaaaaggggtaaattttgaaaattatgcacaactttcttatcaaggcggcgccaaatggtaccggctgattcccagtgaacttaatttttgaaaatttgacccaaaaatggcaaaaattgtcattttttggcgcaaaccgatacaaattcctgttttttcacccgggcgctataaattttgaaaatagcgcaaatatcaaaaaaatttgcattttttggaaataattcatattttttttgaatttgagcttttttaaattgatattgttattttttctacatgaaattgaggcgcatgcgcgccgctgctgctgcccccggcggcggaggacaacaaattggaaatttcgtccaccactcgctcaaccgggcccattacggtggcggccatactgctcgacaccgttgccgaaccgccgccactgacggccgcgccggcaccgcccgccgttgccgcattggaagaagttgccgcgtttggtggtggtgcagctgttgccgaaaaggaggcggacgagtgcttctgctgttggtgagagtggaggggaacagcgattttctgagtgattgaaaaaatgaaaaaattaaattttttttattccaaatttgcatgttttggcacatgtctaaaattttccaaaaaatatgaaataaaacgaaaaaaaaacctaaatcaatcaatatacctactctcaattttccctaaagaacgtagtttaataaaaattgtgttttaattaaaaaaaaaaatcatagaataaatatttatttttaaaaacgccggcagccgaaaaattttgaaacattttcaacccaaaaaacaaagactcccgtatattgttggtaagaaaatttcaaaaaaaaacttttttttttggaaaactttgctgcgattttttcgaaattttgtgattaactactaattgtaagctttttcaaaaaatttccagaaaatcgctgaaattttttcaaagtttttttcttgaaattttcttactaagaaattccctaagaattttttataaaaaatttcaaggtttgaaattatttaaaaaaaaatttctgggagaaacaacggtgagggaaatgaagtgcacccaaaaaataccttttccgtgcggtagatgacgaactcgcactcgccctttgtgatgtcaaagtcccaggtgagcactgacccggcatggtcaatccacacgtaaatctgggaaacgcaattggtcgagagagaatttattatttttgaaattttggtgcgcttttcattaacaaattaggcatttaaaaaaatcaaaaattttcccctcgcatcatttttttaattttacaaaattaatttttttaggttttttaggggagggggcacaaccaaaagatttctctgtgacatcatttaggtagcttaatattgactgggtggatgaataatgtctgggcagtcctaatatacagcatccagaattttttttttttttgaaaaacggttaaaattgttaaagaaaagtggcacaaaactttccaaaaagcctatcctaacccaaaaaatttttttttcagttagggcattggccccacccattcattggccattggttttgttgctagtttttttgggtttcccacctcatacggcgcgcctctgttcaccgtcacattggtgtacgcgttggtcaggcaattctccgcactctcgcgcatcagttcgtcgctggggattggcaaatactcagtcttcggcaccgtccatggcggctgtgcggtggcc

SEQ ID NO: 15486 - DNA, 926 bp, Heterodera glycines
  unsure (1)..(926): unsure at all n locations
ttccttttgacgggcacaaataatttgatggatttgcaatttacgaatttaaataatttttaaacttcacaaaatatacgcacaatctttttcaattattccataaattgttttaaaattgttagaattttgtgcctaattttactttgtacagcagcgaattctgtaaatttgtcgtccgccaccttttgcttcactcaatgaaagtgtcacaacgtccaaatgcccacaggcaaacgaattttcagctttgcccatcattccaaagcccaaggtcggcgcgggcgcagtccggaggatctttttcacttcctttcccccgaggccattcgcccaattttaaccgttttcttttatttttttctccggaggggcagaggacgggcaaagtgaccgacgacgaccgaccgaccatctgctgctttgccgccgccgtcgtccgtccgccgttgggcgtccctctcaacggctccgtccgtccttttccattcgtccagctgtccaccgcccctccaccaatttacctcaaatcttttgcatttacattttcactccaaaacataaattttcttgggcccactcacgtgtttgcttatgttctggataaaagcgtcttttgagaagagatttattttatttttgaaattaattatccatggcactaatttcaaattcaaaaaacagcggtgtttaatcccacgcgggcacataaaatgccaatcggcacgaccattattcttcgaccagcggcgaaaaggacgccaatcgaaaattcattcccaattttttgtcttttggttctcttccaccaaagtgacatagttaattcatccaaaaaagaaacaaattcaaagaaataattggtctttcatttanaagtcataacggaggaggacgaaaagcgggacgagggggggggggggggg

SEQ ID NO: 15487 - DNA, 1646 bp, Heterodera glycines
  unsure (1)..(1646): unsure at all n locations
ccccccnccccccaccgcttttcgtctccccctcccctcccaatgtttgttctccccgttccttggcgctatttttgcttctcccccctccctctaaattcgtcgttttgcgttcccatcgctttttggcgtcatttgtttgctcaccgctccgagttgggacatttttgggaacttttgctcgtcccaaagcgatggccatcgtccactcgaccaagtcgagcctttctcgacttttccatttcacatatccccatttttatcgccgcttttcgtttaaatgtttctacgcctttcgcgattacttttgctaattttctaaccatgaccaactcccgaaaatattttaaaaattaaaaagcaattgaaagtgaatgcatagacaaattattctttgtgtactgctgaaattgaacctgctgtttctgatggacttttcaatgggtggacccgaaaatagcttaaaacttcgggcaaaagtccgtttgctttgcgcaaatggctgaaacttcgtccgtcgttgaccatcgcttcccttccctcccatccgtccggttgttcccgtcgaggggcgggtgtatcttcgagaagcggtccattccaaaaacatgggcctgaagagcatcgccaccccggcggtacccaccgccgccgccccgtcacccgggaacaaaaagacgcatggacaacggacggaccgagggactatttttgtccacagggataaagccatggggggggggggcgtcgtccgctgtgtttgttgtttgtcttcagcgagtggggaaagtctgtgacactcccccggggcgacgacggggaaaacgacgacggacggacggacaaaaagtttgaaaggggaggagcctgcggaggacggctggaggaacagcaaaactgcagaatcatatccatccggtggacgaagcattcgttcgtccaaattgcgcgaagccgtgcccaaccaacggccgaagagactttgccggactgagttggccatcactcgtccgtctcccccccccccaaaaaggcaacaaaaaacaacgccttctccgccatttgatccttcgtcgcgtgtgttttatgccacgctcagttttttgctttcaattcgtgccttttcattatatattcatgggcttggaaatcccgaaaagaagtaaaagtcacgccaaaagagaaggttgaggatggattgctcttccatttttgtttaattccgtcctttttcccctttttataataaattcttttggcttttttttcgcttccgtccgctttttctttcttcgtcctgattagacaataaaaaatcgtttagcttcatccgattttttacacttttcaccccaaacgcttgttgaaaaatgtccacccattggtccgctgtttccctttgcattttcgttgccctccccaaacacacttctggaacatttgtcgtctcgcggcaaattgcccctggagaccagcaggaacagaccctcccgaaacccgtcctccccctgccatcggcaaaagggttcattgggtgttttggcctcgtaggagtctccgtgcttaaaggggccgtccccgggagggccatcagcnccgccgccgtttaaaggggcgccgtcgcctcactcttatcccgtccatcc

SEQ ID NO: 15488 - DNA, 3512 bp, Heterodera glycines
  unsure (1)..(3512): unsure at all n locations
tataatttttgaaatcgaaaaatatattacaaaacaaaaaaatttattaaatcaaatctcaaaatattatgacaataaaataaaacacaaatgaaaatttttaatttaattgacttagttcgatccccaccacagaataaaattattttcatcattttttattatttgttagagtaagtaaaagtaaaactctttttaagtttaatataatttatatttttattttttaagtaattttttatgaatcacaaccaaattaatcaaaatcggaaaagaaaagaaaaatgtgaacaaaaattatttaattgctattaatttgaacatattccgtaaataatttttaatgcatttaaattggaggatttccgcgcgaaaaagatgtttttctgtttttctcatctaaacaaggtgaaggaaaattaatcatttccggtggccactctaataaaatgtaaattaatggattaataaaaaattaatcattattttactttttcttgccaataattgctcagtagaataaaaaataataaaattttattattttttatttatttgtaagacatcagtaggatttaggtttttcttattataaaaataaaaaattgttaaaattatatttaaaaaaaataaatgccatttttcattgagaaattttgaagaaaaatgtaatttcacctattatttgttttaatatatatttgatcatccaaactaacaattagcaagaacaaagaaataaaatttgttgagggttgcttacatatttttttttttgaaaatattttgcaaagactttatttgatttttgcctcggttcgattcccatacagaataaaagtatttcttattcattttagctgtaaaattattttaaaaatttaattacaaaaattttctaaccaccgaaaaataaaaaaacaatttaaatatttctttcattttttaaacatagccaaaaaattcaattttttgtgaaaatcgtttaataaattgtgacaagaattccgaaaactgccggacccaaaatcataaattttgaaaatttgatcatttaatggacaaaatctgttaaaaacccacaactaaattttcttaattttccccggcggcgtctatcggcaccgtcgtactctctactcaacaaaattgttgtaaaaaatgtgccaggaaatagaactcatcaaaagtaaggaatttaattgaaataaaattttcaattattttaattttatttcattaacacccaaaaaatcattaaagataaagacgcaataatttaatttaaaagatacacacctttctgttaaagatataattttatctaatatttttattgaatatcttatatgttaaaatggtaaaaaaatttagttcataaaaaacatatttgattatttacttttgcataaaaaggcaaaaataaaattaaaaaatgagtttgcatgtcagggatccgaacctgtgggcttaaaaaacgaggactagctcactaccgctgcgccattagagacctgatgaaggcgcaaataaattttaatttatttattcactaaaaaactttggcacgtcataactcggcactcgagttcattccgcaaaaaataaaatcacttttcttaagaacctgtgggtgctctatccacccaccaaattttattcggaaatcaaacggacacctggggaccttcctttttttagccgagcttcgcccagccctggtgccgataggtgcagccgggatatgcaataatactgattgcaaattacaattttggaaaaaattacctaatatgtactttttattgggatttttgttttaatagaaaataaaaattatccttttggtcgttgcctttttttggatttttgaggttttttgaaattttctatcaaaatttctaaaaactaataagattagtcaaaacttattaaacatttttgttttaaacaatttatatccgagccataaattttaacttctttaaaatgttttattgttgaacatgaaaaaacaacgcgagggtttttctctaatcaataaattcttaaaaatttatattaatttcaaataaatattttattctctattttagctttacatttattttcgtaatgaatttaattttgttggttttactgcttctccattccaaaattgatcaaacacattctgctgatcatgacaacaattttgaatgccgcaatgttccaactgatcaaatgaaaccatttcaatacaaatcggaccgatgggaagagaaaatggaaatcaaaatttctggaaccaaactccaccagggaaaagaagtacaaataaaaaataagtcaagaaaaaacatagaaaaggctttaacaacaaatgcttcaaagcataattattttaaaagtggaattagtttaaatgttttaaaattcaaatgattaaatagaaaaaatttcgctgagttttaatgggatgattatttgtttttttttcatatatttgagcattggtggggccagagaaccaaaaaaatgctccgaaatcctaaatcaatttatgaatcttaaaacattaaatatttcaaaaaacaccataatgtttttgtttgtgcaattgcattttttacttttaagcatgattttaaacattaaatccagaggtttagactaggaatttatcttgaatttcattgttatttttcatttaaaattttagggattttaataattaaataatatttctttagctttacattggtttttctaccgccgaaaatgacaatttacccaaaaaccaatgtgttgtcatcaaaatttatggtgatgaactgaacgaaaaagctctctatgataatagcatcaaattttttcatctattaaaagaaaatgacccggagaatgagcacattatcaacttaatagaccagtaaatcaaaaaaaattcaaaaatatgaataattaaaaatttgttggtaataaaaatcaaaaaccgattgattttgagtttttatttgttttttataactaggaatatagttgccaaaaactgtcaaaatattagtttttaggttctaaaaagaacaccaaaatacgtgcaaatgggaaaatagttgctcaaatttagaggtgtaaaatgactaaatttattcaaaaaagcaatcaaatcagtagagactaataattattaaaataaaaaattctcgtctagaaataaataaataaattttgaagataaatttttaagaaatttcatttcttagtggtctatttttgaaaatttttcgggtcgaatctttggggtttatttttctgaaatttttagggtcggttctcaggggaattttcgttttattgcatttttgttaataaattttgagaaacaccaaaatagttttaaactttttttaggtttttaggttctanaaataaaaactagaaaatagttgctaataactcgaaaactagcttaacaacaaccaaaaaaatgtatttcgtgcgtttggggcctcgagaagctcaggaaaaaa

SEQ ID NO: 15489 - DNA, 1274 bp, Heterodera glycines
accgacgatgcaacggttgggtcgttagacgaggacgcaatgacgccggtctccgtttccttttgttgattatggaaccccgtcgacgagttttctgaacaatgccggagcaaaatgagaaaaggaacgaaaaaagtgccagcaaaaagaaaaagcgccatggacggcaggcacggctcaccgaacgcgctgctgttgacgtgcgacggcgcgaaattttccttctcttcctcgtcctgttgctggacgtcgtcgtcgctgtttgtcgtccttctcctccttcaacaccgctgctgcccggctcgacatcaatagtcatttcgatgaatgaaacgaattggtatatagctaacaacaggataataattgtgtagatcatgtaaaaaaaggaaaaaatgcccgattttaacgattttcgcttcctctggaagtaatgaaatttggtgggaaggggctgttcttttttccttaagaattttaacttgaaaaacgcggaaaaaccccataaaatttcgttgaaacatttaattcaaaattccggacgagaagttgaaaatattcggaaatgggcattggctgacggaatgcgaaaatacgcaaatgaatgaatgagtgtgggatgagcgaaatcgccgaatttcgttgcttttatactcgctgcgcatgcaccgaaacaaacgacacgcgcggagactgacaaagagacgactctttcccgcctataaaaggcgcttcccttcctcccctttcccatttatcaatcgaattccttccgcacattcatttctccgctattttatacttctgctaatggtctccatcgctgtgcttctgcgttcgcccccttcgcttctgctcgtcctttcgctgctgttccttcacaatttttgctgctccgatgctaatacaaacagcaccacgacgtaagctgaaaaaatgccctcattttttgccaaattaattttccctttccgttttattcagtcagccaccatcaacatctccgcctccgtcttctgctgttcctcccaccaatgctccgccgaatggcgcgacgccggcaccaaacggaggcagcggcgaccaaaagatcttgatctacggactgatcggatggtgggggctccatttttgaaggcccttttttaatccgcgccgtcgtatgtataaccgtttcagggccggttttgccactctcgccgctttggtcttgttttattgtgcgttctgtcgaaaaccaccggaaaaggaagaagagcccaccacaaccacca

SEQ ID NO: 15490 - DNA, 704 bp, Heterodera glycines
gtcagcattgtttaatacacggaaacgaactgaacgttccagtgcttcaattaaatatcatttaaactatttttagactaaaaatgaaaatttttaatttttcgacttcttgttcgagttcgggtccgggatttggaattggccgaaatggatgccggattcgcgatcagcgaccccgaaaacctatagattggcttcttttattctaaaatgtaaaaatttttgtatatggggcctaaactgcacaagagccgtaattttttaaaatatttgtggtttagtggttgggtcaatagcagttcgtacaatgggcagttcgtactatcggcaccgccggacccccttttcaccgggtacccgatacccgaccgggtaccctacccggtttaaaaattggtacccgacccggtacccggcttttcaataaccggtaatacccgggcccggtttttgcccaaataccagggcccggcctaccctaatttagacaaaaacacccataaaaattgactattctggcataatttataatccttaaatttggtgatttttagaccccccgcccccgtccccgggggcgagaaatttctcacccccgcccccgcgactctgacccccgcaacccgcaatcccccgcccccgcgaaaagccacccccgcccacggggtccgaaccctattttaaactattgaaatcgacagaaa

SEQ ID NO: 15491 - DNA, 2115 bp, Heterodera glycines
tcaaaaacaaaatttcgaatgcccatatcatttctctaactcatcaaattgcttagcttttgcttagaaaaagcttctccttatcatgagctttcaaatgataccaagtttttccaatttggttgggaaaaagcttcaaaaataattcccaaaattcgtcattttttaatattttggacaaaaataaataaaaatattcatgttgcacaacggactcgaaccaccaccctttgtccctttactatcttacaaaaaccacttcgccacacatgcaaatctttttggaactgggaggccaaaattgaaacggtgtgtacatcaatcctagtttcaaggaaataaagcattttccctggcatttcttttattaactatccgggaacggatttatatgtgctaaaaaaccccaaaaatatgtgctaaaaactcaaaaagggccaaaatatgaaaaaaactgtttaataaaaatgtgatttctgcaaaaagtctcttttttttatccatttctgctaattttttggcttaaatttttcttgctctcaaagacttacttatttttcggaattttcttcgctaaaattcaaactttgcctatttcgtcttattttgtttttttgtgagactaggaatttcctccccgttccgcgactttactctccctggagcatcggggagaaatcctattttaaccaccatcgcgccacagttatcaacaacggcggacggacaatgggaagtttttggacaaatgggcacgaaaatcccaaaaaggcatgaaataggcatttaaatatttttgttatgcatttttagggagtaaaacacgtaaaaattaatcaaaaaacttaattttgatcatttaaatgattcttaaattttttaacaaaaaaaattttagcaatcaatttttaagaaaatttttcaattcgtagggtgtattttctaaaaatttttgggtcgtttcttaggggtgtatttcctgggtttattgcatttttaatggaatttttcggaaaaaaacgccaaaaaggcagtataacggtaaaatgccaaaaaggcaaaaaaagaaagaaaaaagaaagatggaaaatgtgtttttaagcacaatatgtcgaaactagtgcgtagaaaaaaggcatatgcctcaaagtcggtctctagtgattagcaccagttggccaaacgatttgactcgttggcctttttctggttgaagcatatctgcgtgtgaagccgcccggcgctgcccttcataatggtgctaggtcgtttcttaaaaccgccaaaattgctaaaatgaccgaaatgttctgataaatttaaaaaagagcaaaaataaaaaaagatagaaagaaaataaagcttaaaattaattaattaattaattctcgacaaaatggacaaatatgaaaagtgaaatgagaaatgagcacaaaattaaaaaaatgatgaaagtcgaaatgaattctcaactgggcaattggaaaaaggaaaaataaaaataaacaaaaaatgaaaaaggaaaaaggaaaaaaacagcaaaagaataaattaaagcaataaaaagggaattggcaatgcgagagaattaatgccgaattgtgcagaaggcttttgggtataaatagcgcaaaatgccattcccttggcacccaattttttaaattcatttttaatccattttaaatccattttaatccatttttagtccattttaatccattttcgtccatttttagtccattttaatccatttttagtccatattttaatccatttttgtcccctgcatctccccatttttatcctttttatcccctgcccctccctccccttcccgcgcccgttttgccaattccatggcaaatttcagctgttggcacaaatgcctgttggcctttgttctcattctgatcctcccgctggacggaccaattcaggccaagaaatttggtggaggtggaggatttcgaagtgatgataagaaaagatgtgatgatgtttttccagggcattattcgatcatatctgtcccggacatttcacacccttttcgatcatttgtcctgctgctgtggatatctcatcaacaaacacttttctacctgttttatc

SEQ ID NO: 15492 - DNA, 535 bp, Heterodera glycines
taattaaaatttcaaatttggcaaaaagtgtcacttttgtcgcactaatggagccgccatctgtccattaaaaacattgtgctaataatgataaggaaggacaaaagaaggacatgcttacataaatcagtcaaggacaatttccaacagtttttttcgaccatttgtccaggacttttcaggcatttttcgagcatttgtcctggacatttaataaaattttgatcatttgtccaggacatttcaaacattttgcgatcattattaacccaggacagttcaaaacattttttggaccatttgtccaggatattttagacccttttcgatcagtcatttttctatcatttgtcctggacattcccatatatttttttcgaccatttgtccctgcccaattgtccctgccacccgccattgattgatcagaatggtcgcgtgtcgcccacaaactgttcctcaacaccctgcttcaacgcgcatggcctgacaaactcttggcccgtttcatgaagccatttgttggacacccatt

SEQ ID NO: 15493 - DNA, 1834 bp, Heterodera glycines
  unsure (1)..(1834): unsure at all n locations
ttgtcttctacgagccttaactgtgttttgaattgtttatgataagtttttggacacttccagttgaggtcctatgaaaaatactggaattgtatgaaaccaaaggggggggggctcaaatttgaatttcaattttataccgactgaaggcaaaacaaacaaataaatattttcgtcggaaagaaacatcaaattaacgagaagagatcaattgtccattcaataatctccaaaagggcgatcaatccgtcactggttctcccacatcttttcgcacgtccagcatctggtctttggagatgttaatgtccctgagcctttttgagacagtgtgtcccgcttcaccgagtccaacaaatgatactttcgctcgcctaccgtcgaaatggacgcttaaaagatttggattaaagcagctttccaaaatcttatcattcggatctgaacaagcactcttcggacttactcgggttctcgtccccagttataaaatcaaaccgaaaagcttcgaaccaaggcacttttccaaaattttccaccctcccccaattcctcggcattttccaccccttccccatttttaagcacttccccacccccccccctccactattcttttagaattttccacccctccctacctaatttgttcggcacttttccatccccttctcaaattccttcggcacttccccccccccccgcaattctttggcatttttccacccctcccccaattgtgccacctttgatgcgacaatggggcacacagccggcgtgcaaaaaacggagcatttttgaagaagtagaactttataattcaaaatgttctaaaacaaatattttaaaaatgtgtcgagagaaaactgaattaattcatgacatttaatttcttttttacacgtttaatccaattcaaatttttcataatacagatagagaaacttttttggtcgaacaaaatataattgttttacaaaaacaaaggctcactaaaaagaaaaattcgaagcaacacagctttctctagtacatccaattgcattagcttgaaaaagctcccattagtcttgagctttcgaatgatagataccgagattgttcaatttaaatgggaaaaccttcaaaaatttttcaaaaatctgtttttttttctgtttcacctttttatccttcgcttcgaaacttttaggcaatttttgtcaaatttttgatatacacggcgagtcaattttgggctccaagtacaattaagttggttttttcgtcttagtggtctgtgagttagtcaacaaaaaggggtctcaggttcaagtcctccttatgttgtgtgttaatttcaatttcttcttttaaagaagaaggcagaattatttttttattaataaaagttttcgtgtcaataaaaaatcatattcaaaacgcgttggttacgtacaacatcgacaattttatgaattttttttagcttataactctgtgaatactagagcaaataaaaccattttatgctcattttgaagggaaaattctggagaatattgtaaattttatttggtttggccttaaattgtggacttggctaaaaaagaattanaattatttaaatatttgctatgctaaaaaatttttccctatgcaccgattttcttgaaattttgcataatcccatattttggccccctctagcgattccnaagttattttgagaaacttaagnntttaactcgagatcggctcttctattnttacnaggggaaaccctccaaaaaatttaagttttgcaaagttttgggcgtctgataactaaatataaataaacttatttgcactg

SEQ ID NO: 15494 - DNA, 1520 bp, Heterodera glycines
aaaaaatcgtttttgggcataaagcggcgtgcggttgagacgatggaaacaccagcgggcaattagggtgcaactcttcagcaaaatgccacgccagtaatggcgaacattccgacaaagaatgtcacaaaaaaagtgaaaaatcgaattttttttttactttttcacatttttgttttaaagctggtgaagcgagtccgccatgaaattgaactgccgccgccagtgccgcaaacccttcaagagttggaacttcccgagcagtaccgaatctacaaacgcaccgaagaagcgcaggagcttttccttctggcggattctggaacatacaccgagaatgggcgagacggacaacagcgctgtgttttaaggggagcttttcacatattttctaaatttaagaattctgatttttggtcggctttctttcggaaattgggcttccgaaatgaagtatatttacgctgatggaactttcgcaagtgcaccgacgctcttcgcaactttacgtcattttggcgcggtacttttttgccaattttgtttttcaatcgtttttctcctaatttcagtcgtggaaaatgggtgtttccggttcttcattgtctgcttacgtgcaagtcgcagtccacgtacgaaaagatgtttgacatgatcagaaaccgctggccgacatttgcaccgaaaaacgcatccatggacttcgaacaggcgatggtcaacgccctccgcgcaaaacatccacagtgctcaatcagcttttgtctcttccacttggtgcgcaacatgaaatctcgcctaacagacgaacaaactcgcgtaagaaaaataaaaatttattgattttgaaatctcaaatttagcgtttcacaaccgacgctgcctttgcacaagctgtcaaaatgatcacttcgctggcctttgtgccgcttgaggacattacaccggcgctggcagcgctcgaagatcatcttctggatgagcttgagggcgttctcgattggttggttgagtttaattttttttcaatttcattagtaattttaaaggtttgtaatcaactacgttggacggcttcgcaacaacggcacacgcactcgccattgtttcggcccgaagaatggagcgtgtatgagcgcacaatgaacggcagcgaccgcacaaatagcttcgccgaagcgtaccatcgcacgttgcaacttgcgatcggacatggacaccccccaatatggaaatttatcaacattttgcgcgagcaccagaaaataatcgacgtggacttcgaacatttccgcgccggaaatactccgccgtcgaaagcaaagcgttaccttgaagcagatagacgatttttgaggatcctggagcgctacaatcaagaaaaagagcggccgcaaatcgaaaatgatcaccaatattgccaaaaccaaattaatccgaatttgattaatgaaatgcttagggaatttccagcaattaccaaatgaatcaatgattttcttttttatttgcattattat

SEQ ID NO: 15495 - DNA, 1422 bp, Heterodera glycines
cgccgaaatctcgtattatatcatttcctcatatctttgctgtttggcgtgttatttttagattagttttgtgctaatttaactttggtagctttttgtcgctgtttcctaattaactgaccgatcggcactcacacaaagcacaaataattaaaacattaaacattattatgtacctattcaaccgaatcatttcaggcgctaacgaattacgctcgcgtggacccatacgaagtaaatcattcactccgccagggggggggggattcggaatctctccccctcaacaaatatacttaaaatgaaaattttgcttcgacggcacccacttttttgacttttttggcattagcacccgaaatttttggacgaaaggtaaaaaggaaagccttccgattttaacctccgaattatttttttatttcgggcacaaaacttcacacgtacaaaagaatttgtttattccaaatttagttgtggattccgagacgaaacccaagtcatccgacctgaaattcgtctagccaattgcaatacgctcacttagtgccggtcaaacgatgatcccttcccccgcggattattcgtttttcaatggcaccataaagtgtcctttttgttgcctttatcatacaaacagaaattaaattcgtccgatgaaatgctctttcccccgttcattctctttccctatccaaagcataattcgcatcgttgtccccttccctctatgatttttgtgtgtaaatgtgtcctacgcccccccccccgcttcctagttaaattttggacacttttgaaattgttgtgacccctctcctccgtcatggtccaactttgcgggtattattgtcctcttattttcgacatgacttaccatacacatacaattgcttttgtcaatacaatcgcacattcttaaaatttgaaatgtccaacagcaacttccactttttgctcagatcgcccaattaactaacgaaagattctattgctgtatttgttaattaattgaaatgtttaaagtttattttcacacacgaatgatgactgatttcacttcatgtttttaaattaaaacagttgataaattcggtttctcagtatgggttttgtccaaataatttaaaaaacaagccaagtctatgtggcaaacacttagggtcaaatcaaaaaatgaaagtaggaaaccaacaaaacaacagaaggtaaaagaatcacaaaatgaatgaacacggaataatcggtaatacttgagaacctaagctacataaaaaagaagaaaaaacccattagctcatatatggtggcctcactaaaaaggggtgcaacatttgatcatattgataaacttcgaaaagtttagaatttgcaaattatgaaagaaatcaatgattgttgcaaatctgatatcatattcgt

SEQ ID NO: 15496 - DNA, 1432 bp, Heterodera glycines
  unsure (1)..(1432): unsure at all n locations
taatgatgaaatcaatgatgtgnncaaatctgatatcatattcgtgatcagaagcatganaactacgggtggggctttcataacagaaaaaggattatttttttacagagcccatctccagtattaccgactaatcagaatgaatttggttggacatgggtttcattcatttaattaaccgaaatgataaagaaattaacaatgggagcgcttcggacgtgctacgaatacccgttgcctgcggaggtggaccgctggacatcaaataaacacacaaattggccggacacttcgcccagaagctgagcactgtttgctaaatatgaattttaaaagttttcaggaggggaaacggtgggatagaatccggaagggaaagggaagttcttaaggattacacggtgtctcagcccttatattcaaccggctaatgtattgtctatgttttaatgcatttgtcaatttaatagtgcttaaactcattaatcgtgataaaattgtaaaaaatgcataatataaataaatgaaatggaaaaatctggttagtccgcccacccattcggtttttctcacccaagcgattggatggcagtgcaaaagctgagcagggattgacaaaaggcgcgccgttgttgaattcggggaacggtttcttttgttgtgtgagagatgtcgtgggaagtgaagcggacggcggttgggcgggcgattccgtctctatcctcagcaaagtctgttggaagcatttaaaacgtgaacaatgcaatggttttgtttgtgtagacctcgtaacaattgctcgggattgcctgggcaatgtccatccgttgcccaccgatgttcatcaccacgcgaccactgcgaagaaattgcaatttgccaatttgggtgccagttggcattccatcgaaactgtgctgctgtttgggcaaatttggcggattggacgcctgcgaagcattgagcagaaaatcaacagaaaaatgaatggaattgaaatttgcgaacatttaattgttgagaatcaattgccattgggtgaagtgaggtgggcggaagttggaagaacgcgacagagttggaaccttaagaaggaaaggaaaaaatgttatctgattgtgtcaactttgttaattttttacaatttttcttcgatcgaaagtataaatcttaattaaaaaataatttaacatttctatggttacttgtaccataatttttttcaaaaaaacccattgaggggtgtaaagtttcggtttctaatattgaacaaggtcataaaaactgcaaatttctttggcgatgcctataaataccgaagaagcccaaaatcccgttcaaaaaaattgaacaaaatgctcagttggtcattttgggtaaaaactctcaaaaaggttcaattatattaaaataattaatttaaatgaattag

SEQ ID NO: 15497 - DNA, 1835 bp, Heterodera glycines
ttttttcatccccccccccccaattgctcctcaggttgtgctgcgccgtttgccgcccggcatcgttcccgccgatttacacgcgcagttcgccccgttgccggccggcgagccgcacgccttttggttctgcgccgcgcccggcagcgccccggttggcggtggcgccaacggcaataccagcggggacggaacgaacgcggccacaccggtggtggaggacgacgcggacgaagtggcggcgacgctgcggcgcgcccgttgcgccttcgcacgcgcctatttggtgtttcgggaggagaaaaatgtgcgagaaaagttgtaaaaatgggataatttttaaatccaaaaatcaaatagaaaaaaaggaaaagtcggcagcttggaaaatttgtccccctattaaaagttgcatttttaaaattaatacaaaataaacatttggtgggactctttttgtttggaattttcgggggacaatttaaaacaaaaccaaaaatagcctctttctgaaaaaaaaatcaaatacaattaaaaaaaaattgcggcggggacaaatttttaaaattatttggaaattttttttttttacattttttaagcactcaacatttatagtaccaaaatgttttttgtacataaattgttttggtttttgttttaggctttgtctttcgctgaacgtttcaacggctatgtgttcgtggacagaaacggtggcaccgaaatttattttttagattttttttttttgctatttatttttaatgctaacaaaaaagtacactgaaattttccccctctttttcggcattgaatcgatggccatcgtcgaattggcgcccaaccaaacggtgccgaaacactccgccgaaatggccaagcaatgcgacgagcgggtgaacacattgacaaatggtgagaattagggggaaaagcaaaaggaacaaaattaattttttttttttcttgaacgatttaaatttactaaaaaatttaaaaaaaatttcagcagcgaatttttggggtgcttccatcaaaaagcaaaatgtttccacttacttgtaaaaaaccaatgaaacttgttttaaaacaaattttcttgtcaaaattccggtcagtcactgtcaatcatcggcccggttgaaagtcggttcctagcttttctgaacctgtttttttttgtaatggttatttcccggtccctggctactcatataattaaatttcgtcaaaatccatgctaaattaaaccaatttttctagcaaattggaggcctgccatgccctcactcgaatttctaatccgagttccagaattttctttctttttgcgttttttcccttttttttgctattaaattttgaatttccgacccaaattctaacacctcccccccccccccccatttccccggcagatgtcgcctttctgaagttcctgcggcgtcgcgaggcggccacggcggcggacgccgacggcggcggccctcggcgggtgaccgacttcgacgagttggtccgccagttggaggagaagcagcgccgtttggaggagggacaagtgcaggagacgccgctcaccgagttcatccgacagatggcactcgaaaaggtggcacctcccgaaaattttttttttaattttcaaacttatgttagaagtaatccaaaaaaaattgataagaaatttcttaacaagaaaatctccaggaaaacttttttgaaaaaattttcagagatttttttattttccaaataatcgctgaaagatttttcggaaaaaattttttcttgaccaattgctgtccgaaatttaaaagaaataaaaaaat

SEQ ID NO: 15498 - DNA, 2281 bp, Heterodera glycines
ggaatattgccaaagaaaaaaaaattcatggcgcttactttatttttcttatttttttagttttagaaaaaatccaatttcaaaaaaaatgtggggtgaccctcctcttgatcaatcataaccagtcaggctcctctcatattattccactcgaaatgcttttaggctcgtaaaccgcgccgtagttctgcgttgaaagcggccgaaatggcggcggcgggcggcacccaattgacaatgggcgcaaaggagataaaaagtaattttttattattttcaaaatcctttcaaaaaattttttttacattttttagatttattttttaaatgaaaatttttttaaataaccttctgttccgtaaagggacgggaggcccctgaaggtattgcaaaaatttaaaaaaaattgaaaatttctcgttatgaaaaaattttagcatttattaattttgcatttttaccccaattgaaaaatggaatcaaaatattttaaaaacaaaaaaagcatttttctgccaatttctcttcgcctacattttactataaatttttctgccattgacaggccgaaaaatggtagcgacggacgccgacgagggcaacgcatcgtcggcactgaagggcgcctcgcgcaccaaagtgggccctccgtttttagtttttttgaaatatttttttaaattgcgccatttttatttccgtttttcttaagacgcgcagagagcgccgccgacggaaggaacagagggaaaatagggacgaagaaagtgaggcaaaaaacgcacaaatggactataattgagaggaatgttgtcctttctatacgggagcagatcctgcgattttttccgattttttttttgttgaattttaaaaaaatcgctgaaaactttacaaaaaaactttttggcgctagtttaaaattggccaattttgaatttatcaaagagtaaaggggggacccttttatttttcaaaaaaaaatctgataaaaaaccatgaaaattttgatctacggggtttttgaggtcgctctgatcacgaatctgacaaatctattttgaccaatttctaatcccgaactcgaacaaaaatcgaaaatttgaatttttcggtttacgattttttgttcaaaattagattataggaaattggaaatttgtcaaaataattgaaagattcgtgatcagagaccccaaaaatccccaaggaataaattttttttcaaattataaaaaattttctaccattttcataaaatgaattctcgggggagggaaatgatacggggggggggggggggaatcgtgttgttcccatcgctcccgaccaattttttcaaaaaactacccattttaatttgccaaattccatttaaatggagccctcagggctttgttctcaaaagagatgcattctttaacttgtttagtggtgtcaatttagcacatttttcagagaaaaaggcgcctgggaacggcgaggacggcacaaaaacatcggcaaatgccaaagggaccaccggcgccgccattcgcataaaggtgagcacagcagaggtggaggaggatgaggaggaactgcagcaggcctatgaacagaaaaaaatttcgagcgaggaggtgaggaggcggcgattttttgctcaccgcccaagaaattttctttaccggtgccattttccaaacttacaattaggcctcggcaaaaaaaaaattgcatttagccaattaatttaaaatactaataattataggaaattcttaatttatgtgtcgagttagcaaattgggcagacccaaaaatttcggggagggcacccgaagagcttttcttttttattttttgctcttcggggcaaaaaaaaattattttccaaaatttgagggaaaaacaggaattgtagcgttttgcgccaaaaattggcaaattttcgggggcgggggggggatgcctgctctgtattaaatttttgagtttttttgatttataaaaatcaaaaaaaaaaaattttggactcgaaaccaccaaaaaattgattttttcccctttcctctgttccaaagagggatatgcttgaagggtccactgcgtttcggcgctcccgtttcggcgccagcatgtttttggccataacttttttctttgtaaaccaaatccaacattgttggtgtcgttcgaaagcttaatgggcttagaggttttttctaagctaatgcttcgcgattagacaattaccaaacaaagatggacatgaaaattgcgaaaaagtcgaaatttt

SEQ ID NO: 15499 - DNA, 1528 bp, Heterodera glycines
  unsure (1)..(1528): unsure at all n locations
ttgaaaaaaatatttaaaattgtattacaaagatttttctcttttattttcagttgcgtgttcccattattgcaatgtgcaatctacagcagaaactctcaaaaattgaaacacttcgtttggccaggtagaaaatgaatggataatttttatattaaataataaaactatttgtatattttagtatattaaataataaaactatttgtatattttagtatattaaataataaaactatttgtatattttagtatattaaataataaaactatttgtatattttagtatattaaataataaaactatttgtatattttagtatattaaataataaaactatttgtatattttagtatattaaataataaaactatttgtatattttagtatattaaataataattgcaattataatatgtatacaaataataaattacttatttttaacaaaaataagttaatggaagctctttttcaaatttttgttaacttaagagaaaataatttttgaaattgtttttgtctatttaaattttcgaataaaatccttttttccccattttttgtcattatatataattaatttaccgtattactaccacacatcacaatgtcaaattaatttccccactttttttccggattatattttacttacacaaatctcaagtgactccgttgagtagggaaggttctgctgctggtgctcctactcaatgtttgattattggacaacaataaaagcgcccaatttttggccctcaaaagtgagggccctcaatcatgggaatttctccggaaggtcgagacacacaaattttgcatgagaaaatgatgggggagggaagagcaaaaataattgggcaaatttgcaggaacaaattaaacaaaaaaggaaatacaaaaataattttttgataaacaaagatttattcgaaaaaattttaaattaaataatattaaagtaatatatttttaaaatttatttaatttttgtgtgaaaaataaatttaaattacccgaaaatagacatttcattttcaggaactacatcaaagctttgaaccaaatggcagaaaaaggcgcccaaatgatgtccaaggtggactatgcgcgaattttgtgcgaagagctgagtgccaccaccgcaaatcaaattgccacttgccttggcgttccgccaattttactccgagcgatgccaacgcaacgccaacaacaacatcaacaagagtttgacgggacggcacaatcacagaccgccaattgcactccgaccaactttaagactcaatcgngaaaaggatgttttagtgggaccattgtttgaccaccaaatgccacgaatgagcaggaccgaatgtcagcaataattntgtttttaaatttgaaagtaaaaatattcatttaattaataatttccattanattatttgcaataaaatatttttcgcaaaaaattattaattacncatcaatgagcaaatatttcattnttatcttacctttacaataatatatgataaa

SEQ ID NO: 15500 - DNA, 2010 bp, Heterodera glycines
  unsure (1)..(2010): unsure at all n locations
ttatttgctgctgatcacctaaatatgacagaaatgggcgtgttgccgctgccccaatgttgaccaggacaccgccccgccacgttgatgtaccacagctgaacagcatccactcgattggccacaatcatgcgaatgaccgtgttgaagaagtaggagccgaccagcagcccgcagatggccaccagcgagcggaacaggcgaacactgttttcggtctgagtcgttactgaacgggggcggactcaaatgggcgattctgtcattttgtgtttatgatcaggatcattgatcacatttgccaatttacaacccaggggcgttactgtattcgacttaaagtttgttcgcgttctgtattcgatttttttaaggataaaatcgaggccctaaaaagccacaaatgttagaccgaatttaagttttatgcatttcattaaaaaatgttgtacaaaatgccaaaacccttccttttaaatttcattagccttcttattttattaaaaaaaaataggcaaaaaacttaattcccttctaatgattgtgcattttagctaaatatgaaaaacattacccttttgccacaccaatagcgcgatggtcacgtacagtatgaatgtgatgatgcagacgagcatgttgtagttgtagatcaggttgaccggtgtgcacgtgtcgctgagttgacccgtgacaggcctaattaattgtaataaaatcaattaattaaatttcgaaataaattaattactctgtcggattttcaattgcatatagcaacacacgcacagccaaataaatgcccgggacacagctgagcaccgtgtgaatggcaaagtaggcggggccctcaattttattacggctaaatttgtttaatttgtattttaattgaaaattaatttaatttatagaaataaaaaaaagagagggacggagagataaagtgagaaaatagagaggggctagagactatggcaaaataagagcagagatccgagaacagactgactgttagagaacaacgtgatattgtggttaagccccgcctctgtttgggagagtaacaaattggtataaaaaaggaaaggtcgaatagtaaaaattgaaatttattattaatagcttacacaaaatttgagagaaattctctctgataaagagagattttaaagttttaattttgccaacatatcgcttacaaatcaggcaccagcacggacaacagtcggtccaccgccgtgccaatcatcgtgaaaattgcggcattgtagccgaagattgattgaagctgaaagacagcactggcaaaataggggatgaaattgcgcccgctgaatatggtgaacaggaaaatgtaatggccgctctggtgcaggaactcgaaaaaggagttcagtgccaacaaaaggtggctgcacccgtgcagcgatctgtcaaagcgaaaaaagtgtgaaaatttgattttgacacatttttggtaaattaacaaaaaatttcactaattttggggtaggttttgagtcttgtacttcaaatctataaatatttgtaggctggtagtccttattagagtccgaaaatttcaaattttctgatcccactccgggattaaaacttaattttgcgggatgatatcccaagggattgatcccacaaaatcccgtcctgttccaggcttcagactttgtgctaacgtactttcatgcaaaattatagccattctacctacaagaatgaacaatttaaaaatgaactttcttgaaacctctttacccgtaattagagggattaaaatttaatgtaaaaatcaaaaaatttaagcgcttttgataattcgattcgcattttactaattgtaagaatctttgtaaaaaatttcaagtaatcttaattgctgngaaaagtacaaaagttttgaattcttcttacaaaaaaaaccaatcaaactttttgtggaaagtgaaaattanaaaaaaatgagaaaatttaataaatttgaattataca

SEQ ID NO: 15501 - DNA, 1924 bp, Heterodera glycines
ttaatattaaggaaatttttttaataaatattaaaaattgaaagcattttaatttttaaattattaataaaaaacaacttggaaattaataatatttattttatttaaaatgaaattaatttttttacaattcagaaaaaataatgctattctttaatttaaaaaaaaataaattcaaataatttacaaaaaatcttcaaattaataaatacattagtgattaaaagaggtatacagttattagaagaggtacaactgtgattagaagagatacaactgtgattagaagaggtacaacagtgattagaagaggtacaacattgattaaaagaggtacaacaatgattaaaagaggtacaacagtgattaaaagaggtaaaaaagtgattaaaataggtacaacattgattaaaagaggtacaaaagtgattaaaagaggtacaacattgattaaaagaggtacaaaagtgattaaaataggtacaacattgattaaaagaggtacaaaagtgattaaaagaggtacaaaagtgattaaaagaggtacaacaatgatagaagaggtgcaacattattagaaggggtacaaatctgattaaaagaggtacaaaagtgatcagaagaggtacaacagtgattagaagaggtaaaaaagtgatttgaagaggtacaaaagtgatttgaagaggtacaaaagtgattaaaagagctacaaaagtgattagaagaggtacaaaagtgattaaaagaggtacaacaatgatagaagaggtgcaacattattagaaggggtacaaatctgattaaaagaggtacaaaagtgatcagaagaggtacaacagtgattagaagaggtacaaaagtgatcagaagaggtacaacagtgattaaaagaggtaaaaaagtgatcagaagaggtacaacaatgattaaaagaggtacaaaagtgattaaaagaggtacaacaatgatagaagaggtgcaacattattagaaggggtacaaatctgattaaaagaggtacaaaagtgattaaaataggtacaacattaattaaaagaggtacaaaagtgattaaaagaggtacaacagtgattaaaagaggtaaaaaagtgatcagaagaggtacaacacgattagaagtggtacaacagtgattagaagaggtacaacagcgattagaagaggtacaaccactgtcgaaaaggtacaataattgttggagaggtacaaaaattgttggcatggtacaataatggttaaaaagggtacaatcatggttttaaaattaaataattaaggaaatcgtttattaaaaagtaagaatttaaaaaatacaggagttctttaataaaagtaaataaattattattttaatttaaaacatttttcacaaaaaaataatttaatttaaattaaaaatttttattttttatggattaaacaaaactatttatatttattaaaatgaaaattaataatataatatttatttaatttgaaatgaaattaaacatgcaaaagtaatcaaaaaatgcacataaaaataatgtacaccggccggattcgaacttccccccccccctcaaaatgatgcctcagaatccccaatcacacagggattctgaggtcttaacgatgtcaaaagtaaaatgtgatcacgtattcgtgatcagcgtcataaactacccctaaagacatgtttttggaatattttcggtgaaaaaattttttcactcaaaaatcctgtcacccccctttggtaccgaatcacaaaatcacttttatttttgtatcttttttttaaaatgtgataaaaatataaaataaaatttatattatagagcaaaaaattgcggatttttgtagtattttacttttcaccaaattctgatcaacactctgatcaatgatcaaccccccc

SEQ ID NO: 15502 - DNA, 4042 bp, Heterodera glycines
  unsure (1)..(4042): unsure at all n locations
ccgtacagatcagactggggtgctcttgaaaatgcacgatgaccaagctaaattagccagataaaacagaaaaccaaacgcaaaaactgacactggcaactgtttcgtgttcaaatcaatggtatcgccttcaattctcggaaggctggttntaatcaccggctcgagcaattcacgtgcaaatcgaagcccgtccatctgcttgagaagcatgaatatgcctgccatgtgctcgttgaattttgcctaaaaaacgtcgtattttataccattaaacttccttttttgtccaaataccatcgacgatcgtgttatcgttgaaggaccgcctgactcatccggttctaccgatgatttgcactgccaacatcttataataggaactaatccgacaaaacttcatgtgaattatccaaactacctcatttcttgagaaaaaggatcgtaaatttttccaatatccattgcatcatattgtcttttacaattcgctccagtacagcgataatgtgctcttaagtaatttgtagataaaaaagttgctaaaacgtacttatgaacatcatccttctcgcgaacctccaatttttgacgaatgtgatcgattttgtacttggctacgttaatcacggccttatagttgatgaaaaggtaatttacttttcgtagctttccatcgactaaattttatttatacatataaagaacacatgttatatgcatatacataccttcttctggaacgagtcgctcttttacaattttatcaacctaaaaattaacaaaacgaaaacaaaagaaaattttaaaaaaaaacttttaatgtaatgaggaactttctcaattgtctttggtcaattttacatagatcacgcaattcgtcttctttgatgatgaccctcttttgtatatattcacagagaacgtaatattcaggcccatagaaatttttcaccagcaagatgacaagatatttgagattttcgggtatttctgttagcaccttcttatcttcctttccattatttgcagacattttgttgcttanataaatatttcacaaaaatggaccgccatttttttcaattccccccccccccccccctctgcgatggaagtcaattgggcgatgctattgggtgacaagccaactgggctatttggtcacagattaggccagtccgtcagttaccgaaacgggacttgtttgtttttttttgaatctcactttattttgccaagtttaaaattttctattttttcttcttttgttcctaacaaaagaaggtccccaggtgttttgtaagtcaaaaccattgcaacatcaagaaatggtcattcttaaagatacaacataaaagtaagttttggtaattttgaatttaagtttcaaacaaaaaattttcgggacctacatatgaaagatgattgccattggttttcttttttcatgcagtccgaataactcacttcgcttctccatccatttacaattttgagattttagagttgttttattacagctgatctaaaatatttgaatgtcttttggtaagcagaatgcatgggcacgtccccaaggtttgtttcacctgaatcctaattcctattatattttatttaaatttaggttcttctcaaccgcaacaaataaatccgaatcttttcatggcaactgcgggacaagcgttttctactcttcccgggatgcccattaattctagtttgcttgtgaatcaagctgcttttacaaacatgaacacggtattggctcaagctcagcgccaaatgcttccgcaacaacttcaatcgccacaacaacgcgtcactcccacaaatactcagccaaatcgttcccaacgtacatttattggaatcgttacaaagctaatggagacatacggctttgtcgatgaagatgtttttttccagacaaagttacaattattatcagcctcgaatgcatatttccatttagtgttataagaggatcaatgccaagagttggagatcgagtgatggttgaggcaaattataacccgtctatgccatttaaatggaatgctcggtcaattgaaaagatacaaaatgtggaataccgtcaggtatcacatttttacttccattattgaacgttatcttttaggaaacaactcaacaatatcaacctcaccaaaaccgacaggtccaacaaccgcaaaacgggacgtcgagtcgttggaatgatcgtccgccacgtgatgaatttcctcgtgaaccgcgacgtcagcctccaatgtccattcataggactcctcctcgggatgccggccgtaagttacgttaaccaaaattattacattttatttttaagaaaaacgacctctttcacgacagcgttcaccacttcctcgtaaaagtcctccacgtcgtcaagaaagcacagtttcaaaaagggagcgggaggtccgcgatgaaaccgaaacccgagagaaggaccgagagtcgactcgcgcacgttctcctcagtcgggcaagcgagacactgcttcaccacctcgacgtcggcagcgcattatcccccgttaccattgtaacgtgtcgaaacaaacaattccacagtacacgcttttttttctatttttttcgtgtaattgtcaattaagtggcgagttaaaatatgcagaattgcgaaaacgttattcgagtctttacataccgtccgactttattcgctgcaagttcagctgggttgattctgtgaaactcgagacgcctcttcaattttcgccacacccaatcaaatttcatgtgcttcataaggatgtcgatgttttgttggacgagggcaaacaattgccgttggaaaaccctccagatgctgacagtcgttttgttgtaaaggtaatctttcaaattaaattagtttatttggattgattttctctttttccggttaggttttacttatctcacatcctggacttactgcgcttcgccgaaaattgagcggacttatgccggatgggagcattgatgaatccacagaaactcaacccttatctaagagtatccaaatacttgttggtaatatttttaactgttttttttaattagtcgtttaatttcagggtatcgtggaaagggcgagtttatgtgcatcggcggcgtgtggtcaccttcgttggatggtacgaatccacttgacccgcaaagcatggtcaatactgcgattagaacgacactttctttgactgggattgatttgtcaagatgtgcaaaatggttagtcgtttggtttttcaagttttaactttctttggtaaatttctctctctctctctctgtctatgatgctctctctttctcttactctctccagcttcatttaggttcacttttgcgtttgattgttatttccgtttatttctctttttctgttcttgccacacaccctttaaacttctgatgcaggtacaagatgctgcatttgcattactttcgacccgagcgtagtcgcgttgactcgtgtgtgctgatgttgcctgataccagcaccattactgactttcagctctcagatgagcaataccaacagactgtgcagaaactccaggaccaactggcgtctaaattgtctgcaatcgatgcgcaggattttgtctcaccaaggcgggaaaatgagaaggggttaaatttggattctggcgatggtgaagctgctgcggcggaaaccggcgaaaaaataaatcaggaggagagaagcggtagtggtggaattgatcagtcgcccaaacagccggcggttggggaccagcatcagccagaaatcacaaacaccatctctgctgctgaggtgctttcatcaaagcgatttataaaagttgtcagctcgacctcaatgtgttcgggagttgccggcggggtcgaattcttgtcatagctactgcatccaaccatctttattttattataattcatgcatacatttaaatattctcatgcaattctggtctttgcgggggttcttcctctaacccagaattacaaaattagaaaaata

SEQ ID NO: 15503 - DNA, 1226 bp, Heterodera glycines
  unsure (1)..(1226): unsure at all n locations
ctttaactcaacgagaaatgagcgaaaaacacatttttttattcgaaatttttgcgttttaacgcccctatccgaccctaggaatccctattttgggtgttcgcccctaaaataagtttttatccctattttggcgtttcgccccaattttcgcccctatttcgagattttcaaatttttcatataaattcacaaatttttttacaaaaatacaatgaaaaaaaatttttttttgacgcgataacattttttggcaattcatttataaattttcaaaaatttttccactaaatatgcttttttcttgaccaaatttttgtaatttattttctttcttttcaaaatttagatttttgaaattttagttattttgtaaaaatgtattcaaaaatttcgaataaaaataattttttgtatctctaatcaatgaataaaattgtctgccttaattttaacttatttacatagaaaaaacagcatttttaataaatttcacccctacatttgaaactttttcgcctctattttgcccctatttcgcgatttttctgcccctttttaggttcctattttggactttttcgcccctaaatccgggccctagtaaaattaagaaatttaacttctattaattttttcgttttcatctgacgttttttaaattgaacaaatttaaggacttataaatattctaaacacaaattgtattaagaagccaagatttttaataatacgaatatatataaaaacttcaaatgtacttttctataaattttgaaaatctaataactctacaaattgcaccttttttgctttgtccttgttcactttgccggtttcgtcccgagtggcggcacacaaattggacaacagtcgtctgtaagtgccactggtgtcgtccacaatgtccatttgcagttccttggtgaacagtttgaagtaagcctgaggaattaaaatgtagaatttagggctataaaattattatttttaaacaaaaataatttttgatttttaaatatgcgcactttttgaatggcacgaatttgctcattgcttcttgtgaccaaaatattcgttagaacatactcgtctgtaccaaatccctggaaattactgcagaataaaaagatganaaatagagcaattgcattttctaatttaaactagggtttggaccccgtgngcgggggtagctttttcgcgggggcgggtgagccccaaaa

SEQ ID NO: 15504 - DNA, 1087 bp, Heterodera glycines
ctgcagaataaaaagatgaaaaatagagcaattgcattttctcttgagcaccaatacaatatggatattcttaggcaaattcaaaatttcctattttttgttcgcgacgcctattgacacaacagccccctactgaaaaatgctgtaaaagtcctgtaaaagaaaaaagtcacaaattttgaatttaaactagggttcggaccccgtgggcgggggtagcttttcgcgggggcgggggtgagccccaaaaacatgtcccgcccccggggacggggtccgaaccctaatttaaactgaattttggaattaaaccatgaaatttctgtcgaagttaaacaaaaaaaaaacatgaaaactcaatctattgactttaagtttgttgcatgaggggtacaagcggtaggcattaaatttgctaaatgttacttttatcgcattgtgaaggctaattgcgtcgtactcgtcccactcgtaaagcagtgctaggataagctctttgggtccttcgtttggcagctccacgctaatagactcagtgagttttttgtgaaagcgaattttgaattccttggcaatttggcggcgcttaaaaattaattggtagtcattcagcgctttttggtttcgatttagcaatatttaccgtagtgaaattggacaaaacgagaatgttcaaaatttgctcagtgtccggttgattttttgtgaaaacttgtgacaggataccatcaccttgcaccagccccgttcgaaaaatggatttgtaaattttgtcggcgtttgcactcagtagtttttttccatcttaaaatttttttaataatacctttttatttatttcatgaccaagcccatatccagaaaaaaatttacaaggttatctttcttttttgttttcgccaccaaaatttttcatgattatttccaataaaattggtaaaaagattgaccagttttcataaaatatctatctatatatgatttttttggtacttccgggttttgccacccccctgaaattttttttctctaataattttttctaggataatttttgatgctgatcatgaatatgaacctttatttt

SEQ ID NO: 15505 - DNA, 2347 bp, Heterodera glycines
ttaagccggttttgagccaaaaatgcgattctagaaaaaatgtgaagtttcgtctatttgttggaattcgggttcaaggttcgaattggtccaaatggatgtaagaatcggattctccgaccgtaaaaacccaaaaatgactttgctttgagaaaaaaattttgaattttttttggaaagggggggggcaccatcggcactgtaacctttttaaatttttcacgtaaaatttcacggtaactcacgtaaaacacgttatggctaaaaataaaggtcagattctttatcagcatcaaaaattagcctagaattattagaaaaaaaatttcagggggggggggtgacaaaacccggaagtaccgattttttttataaaaccaccgtcactgccacccaaattttgcgtatgtatgagctttgagggttcgccgaggcttcctgaatgaaatatttttattattgtaaaagtttcattattaaaaaggtccaactaatagaaaatattaaaaagcaaataaaattattacattaaaaaattattccatattttcaaacagccaaatgtttttctcagaaaaaatcgtacccgccaatttgctttgacagttagatactactgctccacatgccaaatctgccagttgaattcgacgttcacggagaatagattgacaggcaacatccaattcctggaagttcgatttgcagatgggcactcctccgtttattgttcgaagggtttcgcacatctctgagctacgaataaacacatctgagattgggatgcaaaatctgataaatatgtaaggtgcatattaaggttgtatttcacaaaaaaccatatccaattttataaatgcttaaacaaatttaattaaaagcatgaaaaagtttcatggaaaataagttaattgaaggaagtaaaatattgaagcccgcggaactgggatttcggcactaactcacgattttcgttttaactcaataattataaataagaaaacaaaaatgtctttttattatcattgaacttgccaaatatgaacaaaatccgattattttatgaaaattcaagtttttaaaacctctgctggcgctcaattggcaaaaccggatttttttgaatgctgttttgcccgctcgctttttttttcttcaagttaaattgtaagagcgggtagaaatttggcctatttttttgatcagtgccaaagtgccgattcccgggctcaaaagattttaaatgaagaaataaaaacaaactaaaactaataatttgcatgtcaattatccgaaggttgtgaaaatatagaaatacataaaaatgcgctcaaaatttatttgaaaagccttgaaaaacatgcctgcctgaacgttgcggaaggacgagttagtggtaagcattgaaaaaagtccaactgcgtaagaacgagaagaaatgtccacaacaagagccgaaccagaatctccctgagttttaattggattagtttaaattctactatttttcaataattaggataaatatgtattttaagttaaatttataggaaaaagaaaaagtaataactatatcgattttgttaaaatataatatttttcacacttattaataaataataattacgtccctgatttaaagtaaaaaaaaaaacacttcaagtccacccaatgatcggctgccggcacaaagatggtagcgttcattgaagccgctggccttttgtgctgatcggctaaaaattttttaaaataaccaccaaatttaatatttttatataaactgaatactatataatagggatggctagggccgtggtgcgacttttggggatttgcaacttggggacccgacatttggggatcccgacatatggggacccgacttttagggacccgacatttggggatcgaacgtcatttggggatccgacacttagggaacccaacatttggggacccgacattttgggattaaaaatttaattttatgtcaaaaattggacaaatttagcctgctttagccagataattccattgcattgcaagaaaaacaaaataatatttttaaaaataactctgtttccggactcaccgcaaggaagtagcatagccctgctaaccacaagacaatagaaaatcacaatatattttttatgtacagtacacccctttccaattttttttaaaaaacgcctttcccaagggccaatgggaacatacattcttcagggacattcaatgagttccagaccgctttgctgtctaattgcgtacaacaaatgccgagatcaacttttctgtttcttatctttcgagtgattttatgaggtgctttaaattaatt

SEQ ID NO: 15506 - DNA, 348 bp, Heterodera glycines
ggtagggaattggcggtagggaattggcggtaggtatttggcgggtagggaattgtcggtagggaatcggcgggtaggtttttgtcggtagggaatcggctggtagggaattggcggtagggaattggcggtaggaaatcggctggtagggaattggcggtagggaatcggctggtagggaattggccggtagggaattggcggtagggaatcggctggtagggaattggcggtaggaaatcggctggtagggaattggcggtaggaaatcggctggtagggaattggctggtagggaattgtcggtagggaatcggctggtagggaattgtcggtagggaatcggct

SEQ ID NO: 15507 - DNA, 2322 bp, Heterodera glycines
ccaagtaagttaaattgcaaatatctaaaatttgcactaacggctacgcattttgtatatgccgtctctaatatcaattttccaacatgtacgaattcgcttctataggatacatataaactgcctttttccaatgctttgccaattgttctatttgataaatgactacttaaatttcactgtttagtagaaaatggcgactgcagggcaattgctttttgatgagtcgggtcaaccttttattgttattcgcgagcaggagaaacaaaaacgtttgaccggcattcaagcgctcaaggcaactctttttaatttatttgacaaatcaagtcacttcagagtcatataatcgctgctaaacatgtggccaatacattaaaaacttctttgggtcctcggggccttgacaaaatgctcgtaagctctgatggcgaagtgacaattacgaatgacggagcgacgattatgaaagtgacttcgtttgttgttgttactctaattaactgataccactttagaatatggacgttgagcaccacgtggctaaattgatggttgagctgtcccaatcgcaggacgacgaaattggcgatggtaccacgggagtggtcggtaagtgacaaagtgcgtgctgtgctcattgtaagttttgccgaatccatgtagtgttggccggtgctctgctcgaacatgccgagtctctgctggacaaaggaattcacccgacgaaaatagccgacggattcgaattggcatgcaaaaaagccattgaaaagttggagtcaattgcgcaacaatttcccatcgatgacagagaggcgctggtcaaaagtgcgatgacttcgctcggctccaaagtgtgcgtttgtctccaagttttgagttaaaatatcattttagtgtgaacaaatgtttgcgccaactcggtgaaattgcggttgatgccgtcctttctgttgccgaccttggacaacatgacgtgaacttcgagctgatcaaagttatcggaaaagtcggcggacgcatggaggagacggcactgatcagaggagtagtcattgacaaaactttggtgagttttaaggattcattgaaaacaacgcctttcaaatgtgcagagtcacccgcaaatgccgcgtcgcattgaaaatgccaaaatcgcaattttgacgtgcccattcgaaccgccaaaaccgaagacaaaagtgagcagattttcaaaccaacacaagaattaaaattgatttcaagcacaaacttgacattgcttcaactgacgaattcaaacaattgcaacgttacgagaaggaaactttcgagaaaatgattaacgaggtaagcctttgttcccgagacaacccaggggtttggcatttcccacacgaagattaacgattttaactcatttcccaatcttttgcccatttaaaattttttgtttgttaggttaaatcatgcggagcaacgttggcattgtgccaatggggttttgatgacgaggccaaccatttgctgctgcacaaccaattgcccgcagttcgatgggttggcggaccggaaattgaagtattgggaagtaaataaccgcggctgaaaaatttttgttttcagttggttgccatcgcaacaaatggtcgcattgtccctcgctttgccgaattgactcccgagaaactcggctcggctgggctggtgcacgagctgaaattcggcacggacaacgagcaaatgctgtgtattgagcaatgcccgaacaatcgggcagtgactgttttgattcggggaggaaataaaatggcaatcagaggactaactgaagaatgaacacattcaaattatgccaaattaaggtgattgaggagacaaagcgttcgttgcacgatgcattttgtgtggttcggaatctgatcagagacaaccaaattgtgttcgggggaggggcggctgagttggcatgtgccatcgcagtggcggaagaagccgacagagtgagcaaggatctttggtcactttgccatcttttcatgtcttcttaggtcgctggcgtcgagcagtacgccttccgtgccttcgccgatgctttagagagtattccggcggctttggccgagaactcgggtcttccgccgatcgatacgctcactgagctgaaagcgaaacaaatcgaagcgcaaaacccgtggttgggcgttgattgtctgcagacgggcaccaacgacatgaaggagcagggcataatcgaaacacttctctcgaagagggagcaaatctctctggccacccaagtgggattgagaatggcatttgtaaatactcaaaaat

SEQ ID NO: 15508 - DNA, 1086 bp, Heterodera glycines
ttctcatgctcgagtcgccaatgctcgccatcagagaggagtacaccgattgggtaggcaatggctgatgacttacggacaaagtgccaattggcgtgggatttgcaccttaacaaaaaaagcccattcaaactttggcacatttaaaatgaaaacggacggactttcaactttggtcttgtaaagttggatgatttgattttgctcattccttcgaattgggcgcatctccaaaatccgctgtaactcagcggcatcggaatcgggcaaaatgcgaatgaaatgcgcaacaaattcctcctgatttgacttgtcagccatcaccgcctcaaatcaaaggaaaaggtgcaaaactaatcgctccaaatctattttttaaaaaagatggaccttcaaaaccatctccgcctttgtcatccctttgttgagaatggctgtgtattgcgtcggcggtttggtgacgacggcactttcaacggagggcaaactgagcagaaaagtctttagagagtgcgtgtccagcaaaagttgttcagcaccggcgatggaaattggacgacatttgaaaagggcgcccaaaaaacgattgaccaattgggaggctaatttcagacagaaatgggcgaaatattttcgactaaatttagaaataaaaaaaattaattaaaatgacaaaccgttcggaaaagtagtcgcgtattaggggaacggatgccctcagattttttcggatcgtcgaaacatacggtgactcatcgcccacttggtcgacatttgaccaacaaaaaagggaaaaacgtttttcattcgcttcgccgaatcccccgtcccttttttggtcactttattttgttcatcgcctgcaatgacggctcgcacatcgtttcggcgtcctgcaccaaaagcatcaacgcactgttgcaaatgctgtggaaaagatccgtctcctgaccgaagtcgccgtcctgaacaattaacaatttgtcaaataatatttataaagccggacgagcgacttgatagtattatcaaataaaataccgaaaaaatgatcaaaaaaaaactgaaatgccgatcgacaaaact

SEQ ID NO: 15509 - DNA, 2576 bp, Heterodera glycines
  unsure (1)..(2576): unsure at all n locations
tcgggctgcaaatgtcggtacacgtgtaccctaaaaacacngcacaaaaaacattattntcattcaaatagaataaaaggctttccctttttataaaatgttgccaacgattagcaattaccgctatcttttgcctcagtttgtcctgcaattgcatcgtcgtctccgcactccaatcggcggtggcgaggacacaacacgtaaaaaaggtttggtcggcgtcgagtcggacgacgctgtcgtcgcgcatcaaattctgcagaatggaggtggaggcgccgattattccgcccgcccccggcgaaacgccgggaagggcctggggcaaaaaggcggaaaggcacccgtgggcgaactgacgaaggcactgacggaacagctccaccaatttgctaaatgaaaagaacagggaaagtaggaaatttataaaatgccaaaaattaaaaaaaatacgaaaataaatttttagaatttccacctgagcaccgcatttgggtcagcgaacaatttggttgattcggtgatgattttcttcaccaaaaggaataaattggccgccgatggcaacggaatggccgtcgcgtgcgtttccctctgcggcttttcctcgccgctgcgaattcgaagtgcgcattcgtccaaaaatctcagcaattttccgcgctgttcttgcacaaaaatatccatgtgagagtcgaaaacggaccaaatgacctaaaaactgaaaactattaaagcaaaatgaggtcaggtggaagaaaccctgtcgaaattgtaattgtttttgctcggaaagcgtttggcgagcagttgctcaaacatttgcgtgtgatttatggcatgggacagcaatttccaatccaattcgcccctccggcgttccgtcattttgcacagcgaattccttagggttttcaacaaaactaagcctccaattctgtgaaatttcaatggacttccaacctcgttattgtgcaaaattccattgcgagtttccgccccatttcccattgaggggggaatattttgacgacccctcttcgctcaaattcggccaatttgtccacaaaccaccgatatctgaaagaaggctcttaaatgagcgagtaaaaaaataattttggttttttacctttcttcgattctgtccaaccaggcgacgtcttcagagtccgcgtaaaggacagtgtaaatggccaattgttggttgataaaccaattgatgaaatcgtcttgaagttttccacccaaaacgctctgaaaataaatgaaaaattggcgatttgctctaaattgtcttaccacaacccgacacatttcagaggtttgttggtcgacgtggcccgtctaaattggcatttaaaaattgaaatataacttaaataataaatttgccttaaaagccgcttttaaatcggctgccaattggacggtcaattgttcgcggattttctgcactttgtccgtcagctgtttgacgtgttcaatgtgctgatagtcctcaaataacaacagaacgttgagcacagccggcagttccgttgtaatttcattgtatcgcctttcggtgacccattgagctggaaattaaattaatttaagtgacagaaatttttgtttttcaaagccatttactgagcaaattcactccgttgagaagcaattgcaaatggtggagagtggcgatggattcggtcagatttttcttggcaacgtccaattgtcgaatgtcttttgtcagttcgtgcacggaagtctcagaacaaagcgttctgtcacgaatttcctgcactttttgctccaattccgttattgttgtctgggcctaaaattggaaatagttagtttttgtattgctgaataattgtcaaaatgactgaatggacctgcagcaaagcgttgtttgcctcaagggcacatcgcccgtgttcagcgacagcctcggacagttcacggtcgtaattggcctgaacttttaaatgcggaaatgtacatatagaaatttttttataaaaaaagttacaatttcttcgtcaattttctttacaaacgaatccaaatggacaagtgattgttcggtagggaaaatggtgtttatgtaagtcgtcagatcaaagtcgggacgaagcatttcagagtcatcgacttgggccaaaaaagaacggacctcaattccaattttcattcaaagttcgaattgattgattgagtctatgggacactcactttggaagaatagacgggaaattcttcaaaggactgaacatcatcaacagtttttctcgaattcgacgccatttccgattgcgagtcgatgtcaacgctgctaatgctgctggccattggacaacgaaggattaacaaaatttaaagggctgacaatgagagagaacggagtcacaacacagcaacacaaacggcagagaagttgtttaattggaaagacgacaaatttaattccaacatttattcaaatataatgggcaaaaaaatgagcactttattatataaatgagaaataataattgggaagttaattaattaaaacgccanattaccataactttttttgcgac

SEQ ID NO: 15510 - DNA, 1101 bp, Heterodera glycines
ataaatttttggaaaaatttgtctgaacgtttaatgtgagaccgcatttttatccaataataaggacgaaaaaagaataaatgcaagattaggagaattgacaaaaaaaaacaaagaaaggtccatggggagaaaaaatttgtcgagaaagttaattaaactagacaatttgggatgtgcattatcaactagaagaaatgaataggattacataatgccaacacaacacaatttaaatcaattacaaagagtgccggtttgtctgaggggcaaagagaaaaggaaaagccatgttctataaatgaaaaaggaaaaaatgaaataaattgagtggagtgatgatggtgatcagatgatgatggatgaatttcggactacggtcgatcgtttgcccccgccccttctccaaggttcactcggtgcgctgtcgtttgaatccgccgctgtttccgccgctgtcaccaccgctcgtccccgggccggggcccatccgcgcggcttccgccccatacgccgggtcggccagcagaaaggcaatggcgccggccaaatgctttgtgtactggtccgcctcgtgcaacccttgtgagagaaaattgggtcaaaaccacaaaaagtggtaatttttggtaaaaatctgttagtaaatcacataactaaatttttcggtaccgtcggaccccccgtattctcaaaatttttggaaaaagcgcgccgcaaaaaagcggatttgaaaagaaaaaggtcatcaaaataggcggtcgacctcctcccctccttagcaaaaattttggtaaaagtggagtcatttttcaaaaaacttttttttcaaagtcatgaaaatatgtttttgaagcactggtggctttcagtttgtttccgtgtttttaaacaagaattattttttttaaaaggggggacccactcaacttttaccaaagtttttgtcggtcccccacccccacctttttaatgtttggaaaaacttacggtcagccaaacgcttgctgcttttcttctcgcggtccaactctgaaaaattgcataatttaatcaaataatttattttggcttaaatggtcattttttccatcccccccc

SEQ ID NO: 15511 - DNA, 1790 bp, Heterodera glycines
  unsure (1)..(1790): unsure at all n locations
aaaatttcctaaaaaaaattgattacattgatcccttaaatttgtggtttttttttaaattttaaaattttcattacgcaaccttgtcaatttgtaagatcattgatggctttttggttctgcgcacgtagcgaatgccattttggttcagcttcagtcgaaaaccttctctgctccatgccgttcgatcttcatttgacacaaaaatttgtgaaaaatatttcttcgtaagggacgacgattgggaaagtgttgaggcaacaccacttttacgcaaactcatacggtacctttacatgggattgggctacggtcatttgtgtcaaagagttacaacagaagtttattttaattattacaaatcctatttaataaatttaaattaataaattatctgatgttatattttaatttctcaaaaattgaaaaaaatctattttttatttgtttaaatttataatgaaaaaaatcgctttattttttttcagcattgctcggcattttttatgccgtcccggggggggggggggtgcgccaggaccaatttttcgtacgaaggcccccaattttcaccgcaacgacttttttctattctgaacacttttctgacgacctttttttgctattcaaatcatctttttttgcggtgcgtttttccaaaaaaacttcgtgggaagagggtgtggcggtccggcggtgccgacaggcgccgccgggaaaagtttttgaattttgtatgcgttttgctagggaaattgttcaaattttaactttttcccccttcgtttgaaaacgtatctgacctgctggtcataaaagtactggttttgctcgtccaattccttcgcttccattttgccttgttcgtccgccatcgacgcttcgttttgctgactattggcgtcgaaatattgagtctaaatttttaaatgtttctttcgtggattttaaaaaaaagaaaattaccaaatcgtgcgtccattggtttttgtcctctttgagctgttcgatttgttgttgttggtcagcaagctgtacaaagaaaaaacattcaacaaaagttagaatgttatataaatgattttttgagagatttttctgaaaaattctactgatttgataacactttttttaaattctttaaatttttccaatgagcctaaaattgtaaattcagtcatttttggacaaatttccccgggggagtctatcggcaccgtgcgacccacctgtctcccacagttaaaaccatgtttcaatttggtttcaaaacaacattacaatttgcaaactcaccgctgtctccaaatctgccttttcctcgccgagtttggcatgctggtccttcagcctggcgtgctcctcctcccacttggtctgctcctttttcagttttccaatttcttcgtccgcctttgttcgctcccgcttgagtctgatgatgtcttcgtccgtcttcgtcctgtcgcgcttcagttttccaatgtcctcctccaacttggccacgcctcgttccaatttggctttttcggctgtgaagttggcgatgtcgtccctgaggtcgtccctctcctgcgtgcggttcttcaacatcagaagcgctgcgccgcgttgtgcttcctctttctgcttttcctggaaagcttttgggctttctttgtgccttggccttggcccctcccccttcccgtttgtttcttggtgctgcttaaaaggtcgggtggntgtggggggggggggctgtgtcccctggaaggggaagaaatcgctaattttcgaaaagaaaagca

SEQ ID NO: 15512 - DNA, 2508 bp, Heterodera glycines
ttgcttcatcaatttgtaagtttccacaattcatttgtcattcttgtctgctcacccgttcaatttaatttttgttttttctcctttaaaactttcaactatttaacaaaaaaatttcaggccaattgctgttgatggaagtgccaaaaggcggaaacaaagctcttcgacgtgccaacctcgattcggcccaatcaattgacggcaacattgggaacaagcgccgacgaacggtttgcccaagacttttcgggggggggggttagagacatgccaccaaatgcctaaggcctttggggcttctaatacaatttaaaattatttggcagctttactgtgccctaatatttctaggaagatccaaattggcattcttggtattatttgggagcaccaatttacaaacaattttggtcataattttttaaacaccatgaaattttttttgaaatttttctggctaatagaggaggaataagaaaatgtttaatttggacactttttagaaaaattacaataccttaaatctgtcaaatttttgacactcttactgaaatgtccattttaatttttccaattttagcgcaacgagggcaatcagcaacaaaacccgcaaccgcccgagttcccaccagtcattttggccgcacatcactcgcaaccacaacatcaattactgaatgtgagtttttcatggttgcatatttcaaccgattttgttaagcgtaaaaatatggaaaattttaaaagtttttctccctttttagcagggacattcgacaggcgcctttccatttgttgaccctcagcaacagcaacaattgacgccgcagccattgggcacgccggcccgggtttcagtgacggtgagggttttttagggaatcccccccccttttttcacgtttcgaccccttccccttttaagtatacgaagccgtttccgatgctggagcaacaacagccgcagcgcacccaaaatttgcaacaaggcgatgaagcggcgattatagagcgcgtccgtcagcgacagctcgcagaactcgctgcaatggaagcagctcgacccatcccggacgatctgcagtactgtgccccgtacaatgcctatgggctgaccagcatcgggtggcttttgatgggatggcgagaacagatggtcataaggtcagaaaaaggggcatttaccggggaacggaaattgagacagattggacacccgaaaattatgtccaatttaggctgtccagttttcggtgtcaattttgccagattatatttcgctctctcttccagcagtctgatcggcgtggtcacccaaagcggccccatggggggtgacaaggccaaattcaagggccgaaagctgattctacaatttgacaaggatgcatctcagcttctcaccgtcaaggaatgggagagggacgacggccggcccagcgagttggccagagcgcaagccagagaccgagtgcatttgcagcgattgaacgtcgtccaacagaagggtgccattgcaacaacaaacgaaaacactttcattttcactctaaccttcggccagttttcaaccatgaccatcatttcgcatgcggggaacggtatgggggggggagggggccggaagtggtcgtgcctttgactactaaagtttcccgatccccccaatttagagtgggccgcaaacgcaaccgtaccgcacaacttttttggcattgttagcaatcgcgccggtaagagctcaatgaattttttttgcactacaatttcccccaccccaaaaaacagatggaaccgggagtgccaatgtccaacagcaacaatcacaacagcatcaacagggaacatcggcggcgctgcatgcgcaagtgggccaaaatgaagaagaagaagatgatgaagaccttttgctgtgcattgaaaatggccaggaattgtccggcggtgatcggcaccagccacaccagcgcacctcgaccccggtgagctgagctgcccgggggcgagcaaccgatgttgttgttgttgatttggaatgttttaatgaaataataaataattgtatgtatttatgtgtgtatgtgtgtgtgtcggtgatcaattaatagttttctgctagggcagctccagagtgatcagtgagtggctgaaccgctcacgagtgattattttatgtttggatcatacgcgtgtgatcatttagtcggctggaccgctcgcgagcggtcacattatggtggggccgcacgcgagtgatcattggtcgcctggaccgcccgcgagcagtcattttatgttctaatcacacgcgtgtgatcgtttggcgcctggaccgctcgcaagcggtcacattatgttcggagcgcacgcgtgtgaatttgttgactgtatctctcgcgagcggtctctttatggtggggcgcatgcgtatgatcgtttgtcgcgcaagcgagcggtcgctttaaggggggggcgcacgcgtgtgataatctgttgactggaccg

SEQ ID NO: 15513 - DNA, 1324 bp, Heterodera glycines
gggggcgagcacccgatgttgttgttgatttggaatgttttaaatgaaataataaataattgtatgtatttatgtgtgtatgtgtgtgtgtcggtgatcaattaatagttttgtgctagggcagctccagagtgatcagtgagtggctgaaccgctcgcgagtgattattttatgtttggatcatacgcgtaatgatgatttagtcggctggaccgctcgcgagcggtcacattatggtggggccgcacgcgagtgatcattggtcgcctggaccgcccgcgagcagtcattttatgttctaatcacacgcgtgtgatcgtttggagcctggaccgtccgcgagcggtcacattatgttctgatcacaagcgtgtgatctgatgtcgcctggaccgcccgcgagcggtcactttatgttctgatcacacgcgtgtgatcgtttggcgcctggaccgcttgcaagcggtcacattatgttcggagcgcacgcgtgtgaatttgttgactgtatctctcgcgagcggtctctttatggtggggcgcatgcgtatgatcgtttgtcgcgcaagcgagcggtcgctttatggtggggggcgcacgcgtgtgataatctgttgactggaccgcccgcgagcgatcaccgatcatttgtcggctggagcgctcgcgagcgttcacattatgtgggggtcgtacgcgtgtgtgtgtgtgtgtgtgtgggtgtcccgatttccgaaaaagtttggaccccaggaattccgattttcgatttccgaaaatttttggggctcggaatgccatccctaatgtgtatgtgtgtgtgtgtgtgggtgcctgagcatacgcgagcggtctctaatgttcgggtcgcgctcgtgggatttttatttttcattcttaagccgcggcgaagcgcacggctccgtgcgcccggctatcgtccgctgttccgagtcgtcttccaccattcgtcgaccaccgggaaccgcgtggcggaacgacgcaagcagcaacgtcgctcaaaacgacgttgtcgacagcgactggagcggcagcgcctgcgtgccgaacggcagcctttctggcggttgctggaccaacagtgggccgacgaagcgcatcacagagagctggtggaagacgactggctgctgtacggcgaccagctggcgaccgcaagcgacgtgatcctggccgacggccgcccactggacgattggcttcgtcacgacgagaccgtcgccgattggacaccgctcgaccattcggagctcaaacgactgtccgacggtgtgcatcggacggcgggtgtcggagccgaag

SEQ ID NO: 15514 - DNA, 3096 bp, Heterodera glycines
  unsure (1)..(3096): unsure at all n locations
cctcaccatgttttcatgaatgacagtcatatgaagacaatctaaaagaaaggacaaacgaatggccattcattcaattcattcattaatccgttcattcattcattggctttaatcccttttttgatcaattccctcgttcaaaagctatttgttatcaatggattgaatccctaatccattccctattcattatccgcttttcgttctgtgaccgtttccgttcgtgtcctgtgcatttgggtccgcccttttggcacggaggaggcgataacagtcgaattggtttgtgcacgcggcaaacgccagcggatactcgccgaaatacatccgtctgattgggcggtgtccgttttcgatttcccgatccccctcccacgcccattttgttttaccccgcgtattccgtcttgagattcagttcgacgtattcgtgttccaaggaatccgtccgactgcccttaacaaattgtaaattgtttggccattgaaaatggaataaattgccaactttttggtcgtcgggacagaaaaaagcaccgaagcatctgagcaaaggcaattaaagaataattgtcctaacaaatcagtgaccatagcatttggtgccgagagtgtaattccatcgcttaccgttggttcacatccgctccatgctgcaacaaatagttacacaaagaagggtcctcgttgacaattgcttggtgcagaggcgagagacctttgcaaatggtcattactaattacggtgattaatgtacagtgtttttgatggactgtaataatggctaacactcactgttagttaatcagatccattatttattcttcgatttttgattgtttgttgctttatttttgcccattttcgtacatacagtaaccaatatgttttggtgtgtaccgtaataatcctcggaaagcatcacgtcgttcaccaacttggggaactcgttcagcagtcggatggccaactccgtgtggatgggcccaccctgcatcagacaacagccaaccaaattctcgcccatttgccctaattggtcggcttttcctttgctttctgcttttcctccccacctctctcctcaattttccacacaatctctcggtacttcgcgtcaccttttaaatttgaaaatttttccaaatgattgtccctctttctcttttctcacctttcccgccccttcccccgtcaagcagtttcaatgcttaatcaaaataccaatgattcttccatccccgaattgcccctggcatttcgttgcctttcttcaaatccccctggttttgattggcgttttgattgaagtcgtccaaaatgttcggtccgctttttccctttccttttttgcgggaaaaagcgccaagccgttcattccgttctttgttgcgcattttgaccagttctgccaccgattccaatttgcccttccccgaattgtacatcgcctgtttgatcgttgtctgacaaatacgtgaaaagggatcaatccgatcagtcaaaaccatcgatcggcccaatcaatgggtcgattgtccaaatcccacctcgaagtatccatccacgatggaatagtcgccgcctttccgagcatatcgcatccatttgatcagctctccgcccccatgcatgtccacaagctttcaaatatgtttaagttagcattgctacactttccgtcctccaatttgccccttttcatttgctttgtctgtcgcccttttgtcctctcacttggtataacttttggtgtttgtcggtgcccatttgtgggtgtccaattccactcgttgccatttcgtgtatttacactattcagctttattatatcctagtcaaactcagtttggtgttaattggatgatcaatacttttatcattttagtttcttttttatcgaacaaacaaaacttaatattttatattatgcattcgaaggccgattcgaaatccaagacattggttggactgaatggaggaaaactcaaccaatacaatccattctcgacatcattttcattctcgactcattgtcagcaaaatattttatgggggatttgttgggcatataaaaaaaatatttaatattcacacacaaattcaatttgattgttggcattcccacggacacgcgatggataaatgggaatggttcataggacaaccgtcggtttcattggcggcacatttttgccaagtcaatgaataaatcgaataaagcctaagcaattgagaaaagagaaagcgcaattggaacaaaaaagaaaagcacctggcaaaatgaagagaaaaattagttggaccaacggccaaaaaacgacaatcacagcatttttgaccattttaaaacaccataaagcagtcacatcaaataacagcctttaaattaaactttaattaggatgccaataacgaagagggagggatcagttcaaaacatcgacaaagaaagaaaaagaaaaatgcatttaaatctcgaatgacactctttttagcgattaattttatttgaacacattttcttttctgaatgacattgtaaaaaaaaaggaatgatgacaggcacaaggaaataaagtaaaaaatccacaaaaaataaggcgagtacgctctcttcatctgctgaccgtattatgtacattgtccggttcgaaagggtcgtcttccaatgcgcccacgaaataccaaaagcaattttcatgtgacagtgttgtgattcgttgtggcacacatgacacccacaaggcgagatgcctgccttggaaattgtctgaaattgaaggaaattacaatttgacaaaagccaattagcagaaaaatcacattgggaataggcatcgttgtcaacaaaaatattgccccacacggtgttcaccagcatcccgcttctgcctttgagcattcgccgttttacttttttgagctttcctggcgaaaaatggacgggcacttttacctgttgaaagggggggggggcgtattcgccgataaaagcatcatgattgttcaattaccataacagtttcgtatgtttccgtttcttcgtattgaacatgaccacgaatggngcttttactaatccgatctcg

SEQ ID NO: 15515 - DNA, 2644 bp, Heterodera glycines
atttgtttgaattcataaaattcgaaattttatggcataaagtcaatttttttaatttgacccaatatttaatctatttgggcagagtaaaaaatgcataaaagaataatattaaatttataagattgttaaaatattaatgtttgtagatcaaatgtataaaataagaataaaaaaaatccaataattaaatgaaaaacaattagtttagaattaaatattaataaaaatttatatttatattactgaatgtttttaagtttttttctggagcaggccttcgccaaattatatatggactacatagggataaaaaaaaaattcttcaaaaaaaaaaactagtaaaattacaaaacacctttatggctccgatcacggtggaaattcgaattaatctatataagtatatcctaatcgaaaatataaacaaaagaacttttatttattattcatttaaattgactcatatttaagtgattgtgaattttcaaatattctaataaatttcataggcccaaaaagcgaaaatagaaaaaaatttcaaacgtacaaaattgctgaaattaaaaataatgttcatgttctgtaccataaatgttaaaaaatattttacatataaaatattatatattttaaaaatttactccagaaatcaagtacgaagtaaaattacatccagaatatctcatggaacatacgataaaatttacggcaatgatagcaagtttaaattcatattattaatttaacaaaagcaaaataaatataaaaaagaaatactttttgaataaaaaagttaattcaactattaactgaaataaattcaacaattattgttttaaatattttttaaaaacagagataaaatatcaaaatatttaaaaaaaattaaattcaatttggtatggtttaataaactttcgaaaaatgataggaattgtaataagaaagacttataatacaaaaatcaaatagtatgatgatctatacaattttaaataatcggaaaaagctaatcgaatgggttttaatcaaatatttaacctaactttgcaaaaacataagctttatctataagcctgaaaattctctataaagtctaaaagattttcgagctgttcaaaactggaaaaaatatttaataaaaatttggcaaaatagttaaaaaattcaaattttgtataattttcttgtcttttctctcacgaaaatccattctcttaggggtgtatatttaaccccgaccccgagtcggggttaagggtcgggttcggggttggaagtgtcggggtcggaatcggggttaaccccgaaaaatggccaaaaaggtcggggtttggggtcggggtcgcaaccctatttagaatcaataaaaaatgaagcatttgcttagaaaaagattttccttttcaaatttttattttagataacaaatttgtcagtttaattgggaatgaagcgagttatggttgttcaaaattactatatgtatggtttaaatgcaattgttttatttattttggttttttttttgaatatcctctcgtacgaaaaaggccgtacgaaaacgggccggcccccatagtgtatccatcttgccctcaaaatgggccaacgcgtcaggccaatggccaactgcgtcttagtagtaaaagggccaactgcgtctggccaactgcgtctggccaactgcgtctggccaactgcgtctggccaactgcgtctggccaactgcgtctgaccatctgcgtcttagtagtaaaagggccaactgcgtctcagttgattaaatagcaaaattttttacagaaaatttaaaaaaaaataaaaataaaatagtcaatacaacaaagtagggttgcgtccccgaccccgccccgaccccgaaatttttggccattttcggggaaaccccgactccgaaccccgacgcttccaaacccgacaaccccgaaccccgacccttaaccccgatcggggtcggggttaaatatacaccccttagagaaatgaatttttgtggggaaaaggcaaaaaagttataagaaatttgaattttttttaaccattttgccaaattttattaaataaagtaaatttatttgaaatgtagtgtagtagtagtgcatcacacttaaattactttctgtcatagttcgatacctgttgacgttttcactttaatttattttttttgtgattactatagttttttaaacaaaatcccataaaaattggtcatcattggcataatttattgacaaattagatccaatcttcctttcgttgaaattaaaaaatttaattttacttgactaaatcatgaaaagttaatatctttcaaaatattttttacaaaatacaaaataaaataaaatttcagggaaattcataaatttttggtgaaaaactattagaaaatagaccttaaatttcaaaattcgccaggcgctgcctatcggcatcgccggcccctcaaaaaaccaatttttccttaaaaaattttggctcaaaatcgaaaaaaatttatcattttttggacaaattctgttaacagacctatccaaattttcaaaaaaaattttccggcggcgcctatcggcaccgccggacccctttctcctaaaagtctttagaaaaagag

SEQ ID NO: 15516 - DNA, 3046 bp, Heterodera glycines
cggatgaaataaaatagaaatggtgaaaatcttcgccccacccgaggtgagggcgcatggctctgctgttttcaaaaaactatgcccgaacagataaaactaagattgaaaccagccaaaattcaaatgaaaatgtccatacataactgattttttcattttgaagaaaacaacaaaataacaccaaattgatcattccaacgaaaaaagagcaattatatgagcaacacaataattccataattcaattatgtcgatcacttcttaacaaatacgtttgatcaccacagaacaattctataaacgtcaaaatagcctcaaattcattgtccaatttcgcaattcaaattgatcgaccacttcacagcaattcattcattcacttctgttgctgaacactcgggccgggagcgggtttgagaagcctaaaaagcaatacataaattggacttttgatgaaaaaaaaaatcattctcttacccatcgccgacatcggctggatcataaatacccacgtcaattcggtttttctgattcgaaattcgccagccaatcgcctcctcttcccattttgtccattcgctcgcgtcacgctcaatcggacaacggatcaacaaaacgttttcgccatccgcagttattttcagcgtcaattcttccccaattctgttgatcaattcaaatggctcaacgaagcacaacggtatgcaaatgacaacgatgaaattggcatgagatgaagcattggcaaaagcctaaaacatgaaaatttaaaaataaaattaatcattgattggcacgcaccgttttgaactgaacaattttcagcttccaaaatctttcccgaccaatagagcatttcaacacctttggcacatcatttggatgcggcgtgaaaagccattttgccaatgctttttcatccgacgccgaggcactgtcgtcggcaggaaattcggtgaagaaatcgtcagtggcataaaggcacagaacgcgaagtgttggacaggaattgagaattgaggaatttgatttgcgcaaaccacacaaaattctctctgataacagcatcgcaccaacgttgagcattggccaaatgttgtccacaacagacttcaaaattgcgggattgttagagtcgatggtcaaattaattggacaggcggcgaaaagtggacgcaaactgtcaagaaaagcgatggcattgagattgataaagcttaaaatgggatggggaaatgttgtctaagttttttacataatcgcccaacttaccatacgtcaattcgctgaaatccgtcaaaatttatgggcaattgaatttgcggaattggcatcggttgcccatgcagattaacaatttgcatttcaatttcggcattttgtccaatttttcttacaattttaaaatggggcagaatttccatagcaaattattaagacagttttcgacggtttatgtatatttgcttaacaaaaattgaaaaattatgtgaaattagcattccgactctattcccgtgtttaagcgtccaatcagtgatcatccttaatttcttaggccaaaacttttttctcatttggtcaatgcccacatttttgggtatcaattgaaagcttggagtttagccaagtttttgtatagctaaattcagggctaaagccaacagacaaaaaacaatttgtgaaaaggttcaaatttggatggcacgcgtctgaattggggtggggaggggtaaaagcaaagttttcaaatttggatggcacgcgcttaagtttgggaggagggggggggggggggcggcaaaagcaaagcttcaacatttggaaggcaagcgtctgaattgtaagcacaatatttttgtagaaaaaatgtgatattcattgacattttctttgttttttatacgaatttttgaaggaaaaaagtcgggatttaataaatttgctttgcaaataaagaaaaagaattctgcgctaatattttagtataaaaatgccttttttctttttctcttactcatttatgcaattctctcatttctccctataatttccggtcattttgatgccgagaatgtcttcagaaattctgttttggattccctcgttttgatgctttcccaattgttttttcattttgtgccatcattctttggttctttttcaccatgtcaaaaaacgacgagccctcacaaaaaagaaatgtaaataaataaataaatattaataaaattcataaaaattcttaaatttttcagcttcatctctttcaattgttggcttttggtgttcaattttcttgcgccttctcagctcggcctcggaattgcactggtcagccgctgctttgactgaatcgtcgacgaagatttcaacacacgcaaatggagattggagaaacaaattgctaattcaatgggaagcaaatgcaaattgtcaaatccgatcgaaatccgttgccaatcccgcaaaatccgttgccaatccctcaaaatccgttgccgaataaagtcatcggattcagaagcacacagacaccgtaaaaattgtttaatttgaaatgtttcttccacattttctactttcagttacattgtcctcacatttcttcgccattttcacgttctttcgccgccgtttgtacagtggctttggacattatcactgaagacattcccattttgaattgtgttttgctcaatatttggtcaatgctcaacaattttgtccatatctttgcgttgtctttttcgatgccgacattctgcccgttttttgtgtcagatgacagtgccaatgcgtcggatggccaaatggctgttcacactttgtccggatggcgtgccgaagtggctcaaatgctttgtgaattcaccggtggctcaatgggctttaacgatggaactgctcaaagcagtgattatcacgcggtgatcattcattttttgtgttttgttttttctttgtccaatttttaggcattttcaattgcttcttctccagttacttttttgcattttgttttcactttcggctgtcttct

SEQ ID NO: 15517 - DNA, 976 bp, Heterodera glycines
agtcggcggggcccagatggcggggcccagtcgacccccaccgtagggaattaggcagcttaaaaaaaaacaaaatacagtatcgttctcccctcgggatttttttcgaaaatttccaaagccatttgagttttcagatcaccatgaaggattggtctgatcatgttggtccaattattgtttgtaaaatttttgttcagacttttgtaccggataaaatgagattattcatatttggtacgggataactttttaaaatttatctaacaataagattgatccatttcatctttttgcgcattaaaaacgcacacataatgaggataatttatgcatttgaatcatttgtctattcttaatccccgaataactgtcaaaatccacgtttttaaaggttcgggattctttataatataaattgggcaagaagtcagaaatttgtgctgcaaattacatagttgccaaattgcaaaaaaacataaacattttcctattttttaattaggaatttacatatttattaatttgtttgtttgtgcataaatcaggggccgtaatttgaccatgatggttggtgggttgcgaaggcgcagcaaaagaacatggttgatggttacttaaccatgttaccatggttaaacttttctaatcatcaaatccactcgaaaacctaggttaattataacactagaaagtgaattttcatagctgctcttttaatcatggacggactgacctccactgagccattgaccctcacaagtttaaaaaataaaaaagatacaaaaaattacaaaaaagatattaaattttacatttttttggccctcagagctcgaaggtcataccccgtaaacctttctcggcgcaatatcgagacttttcggcgccaatccaattagtcgattttagtcctttgttttctctcaaattcaaaggacaaaagtttttttggaatattgaaaaggaaattaaa

SEQ ID NO: 15518 - DNA, 1088 bp, Heterodera glycines
ctcttcctcttccacctccactgggtccaaaacaactccgtccgcctcctctgattgcctatccactcccgagagtttggaaagggattttcacgcttggctaaaggtcagttcttcttcattaaatacatgaatggaatataccacgtttgatcaagcttcattcactcatcagttctttcttcttttcagtcatattcgttcatttcttctcgtccgccactcttcttcctttattcttttttattcttaaattggattgctctctctctctccctctctctctcattatattttcatggcaattctttatacagagagaaagaaattaaaaagtgagagcggaggagagagaagagagtgtgggggaaagtgaagggggaagagagagggaggatgggagggggaagggaggggggcggctgaaagggggcgttaaagacattaattaggcggccttttggggtgcagtaaatgtgcaaaaaactatttttatgcgaagaaactaaaggaaagttttggagtgaatgataaaacacagcacaattggggaaattaaaacggaagattcggaaagaacgattggacaagccaatcatcagtcatcaaatcaaattctttctttccgtcgatgcgatccctccgacccccgggggaggaacgatcggacaaaggaaattcatctcattttagggagagctcagcagaagtgaacggcccttctgtgcccggccttccgactgcttttctgcccaatcgccgcctccgtccgcaatgtttctgactccgttgggcaatgtgaagaacgaattggtcgtctgtcccaccgatttcggcggagatttcgtctttggaatggaactcgaaccatccaacagcgacttttgcgcgtcaactgccgcctttgccccttcgatctcaatgaatggccctttcccgccgatgcaaacacaaatgattagaatgccaatgccatctttatcagcttcaatcacggtaaatcggctcacagtccatgagacggggattgtatttccatggccagcaggaagaccagcagatggcctatttgctgtcctccgccggac

SEQ ID NO: 15519 - DNA, 1503 bp, Heterodera glycines
  unsure (1)..(1503): unsure at all n locations
attgaatgattggtagccaattctaagcccggcaccctttgagaagggaccaaccaactcggccgcacttactccccgttacttcccttgtccatggtggaacggcaaaagattgtgcaactgtttcacgaagggtggaagatttgtgatatttccaagtaaatgctcattcgaatcgcatccgatgcatttgcgtttttggcagatatttgtgtgtcacgcacagttgcgtctccaaaattctccagcggttggtcccatttcgcaaacattcagcaaaaaaatgcacagattccgcgcgaccggttcagtccgcccgaaggatgccaaagaaggccgccaggagtcgcctttggtcgcggccattagggactaccggcagagacttggcattatgcggcagtcggagattcgggagcagctgatcagagacggactttgccgtcgcgaaaacgcgccctcccgctcgtccataaatcagtgggagacaaaatcgaactgaaaaacggcaccaatcaaatgctttaagtattttgcggacaaaacttagcggcttagaagcgccaacaattgggaagagaagcagcaatcagacgacagaaaatgccaatgggaaaaggcaaacggatggaaggggcgaaaatgacggaacggcggctaacgcagcgacggcacgcgtttattacgaagaatgaatgaatgatcaccacgtcgttcactcactttgtcagccctttggaaatggccgacttttccttctttttttcattttttgtaaatttccaaattcatttcccttttaattccgtttaatttttattaggtttcttctatttttgttcttgtcaattctgaatttgtttcacttcaacactaaattcaattcactgccaacaaatgaaagcataaataattgtgatatcgatgaatttcaaatcgcataatttatttcatttcacttttcttcgattccctgctgaattaataaattctgtttagttaaaaaaaacgcatttttagcttggtgaagagaacatttttaaaaacttgatataaagcctaaaagcaataactttaaattcaattaaatttgttttttctatttttcctgaactccaagtggcctgaaacgcacgaataacatattatttccgagttattagggcctacttatgtttttatttttggagtctaaaagcctaaaaaaattgaaaaatctatttgtgcctattttggcgtcatgtcataactagggacgtaattttagtgaagaaaaatcccgaaatagttaactaaaatagtgagtaaaaatgccaaaatagtgaagaaatagtgacaaaaagtccgaaatagtgacgaatagtgacataattttcagccaaaaattaagcaaaaataatttttattcactggttgcagttgcaaatgagtaggactgggatttttaagaccanaaaaacccaaataaagtgacctaaaaaaatttttaaaattaaaaatttt

SEQ ID NO: 15520 - DNA, 2909 bp, Heterodera glycines
  unsure (1)..(2909): unsure at all n locations
acccnctctcgtcataacaattggtattcggataatacatattcccttttacaattatgaaataaaaaaacaataaataaacaacaacaaaaaaattaattatttaattaattagatgaaagcatcacgctcttccattgtttcggttttgccaaattgtaatggaactttggcccaaagttcgcctcaatttcttcaccactgcacaacaaagaaaggaatgggaacaattcagcaagaccatcaacaaatggagaatgatcaaccaaatcgtaggaagctgtgatcagaaaattaaggaattacttgtggttttggaataggtcaaagggatttgcagattttttgtgtctttggattaaaaataacaacaaaaattggcatttttgtgtaataatttttatttattattatttacaaacccaaaagccatccatttttggtgaagaaaatctgccgggtggccaaattaatgccacaaccgacagtatcttcactaccaaaggaatagtcctctttttgaattttccattcgccattaacggtaaaatcgcctccgcttaaatatgcataagtgcccaagtcattagcaattgctccttccaatttatcctgctgtttgatggcaaatccgaaggtaagccacccgtaagggttactaaaataaatttaaaaagaatagcaaataaataaattaacaattttaaaaaggtttctttcacgtacaaatttataaaaaaatccccaactttttataaaatttaattttcaagttttataaaaagttgaggttttttttaagtttgttaattaacgagctttttgaaattttgcatacagttaatatataaatctgttacggaatttcaaagtaaaaaatctcagaagaattcttgcacaacaaaattggatgggtagcgaagacagtgcaatctctgcctaaattaaactaatgataataaatttaaattttaaaaaaattcatatttataaattaaaatttaaaaaaaaattacaatctgttccctcataacaataaattgccaactgattgttagtgatgattttgatgttatagtgacaagcgttggcatcccaacgattttggcggaagtttcgaagcgccttaaaattaaaattagtcataatttatattttaaattcgcatttcaaatataataaaaatcattcactaataatttttcttttttcttcccattattcattcaccattttccgctgattcttttccaatgcattggtctttttcttctgttcattttgcaactgttccatttggtcgttataaactaaaaaattcattaattaattgaatatatttaaaatcagtaataataattataataataatgttacggtatgtacagtaatccttatccaattttcccttacccttttgcttttgcttttccatttccattttgctaatcttcgcctgtaatgtctcaatttgctccatgagctttttctcgtgctctgcttggaatgccttctgctggaattaaaggtatttttgccaaatgaaatatgttgactaaactctaaaattagggccaaatatttttcatgaattttcaaaaataatttttgccgtaaataaattaaagagaaaataagaatatttcactctcaccgtgtccaattttttccccaatttctcctccaatttgtcctgcttttccttcatttctttgtgttcatttttcagttttcgattattttcctcttcggaatcgcatttcacttgaagcaccttaaaaaggaatttaaatttagctatttaaatgcataaaatttcaaatcgcttgaattcgcttcacttttaaatgcttcaactcggttctccgtttagggagtccgaaatttcgggttcgaatgcctaagtttcaattctttttttaaattacgtttttctgtaattcctccaacttgtccatgtactgcttctccttcttctccaattgttcctccttcttctccaattgtttctccttctcgtccatttttgcctgcattttctcaatttcatttttcattttcccattctccgcttcgatcttctccagcagtgcattcgtttcctgctgcttcaacttttcttgaagtcccttctaaaaaggatttaataattaaaacatttaattattttttcaatattaattagcaactccatgtaaaaactcacattcttgagctccaaacatctgccgactgctgtggctggtgttaacataccgtaaatccgctatttgaaggcccctctctggtagaaggccccctccaattaaaggcccctttttggaggggttgaacaatagaaggcccgggccttcaaatagcggatttacggtatttattggggtcactcaatatatttacggcaaaatgatactcaaaaattggagaagagcaaaaaatggcatagttgactcatttacccattcattttttgtcatttctagattattgttactttttttattaataatgagcaaaatggtgacctaaaaagaatggctccaagtgagaggttttacataaaaatgcaatagtaaatgattttcaaaatgaaagttccacatccaggtaaagtagcttcaaaaaagaaaatccctttatttgtccaaagtcagcaccaattagtgaaaaggctcgggattttaaatggactgagaaatgagttaaattttaaaaaatgaagcaaaaattgaagcaacgaaaataccgaaaaactaattaaactccattagaaaaattattattttatttttttgacaatttttgttttgcttttggcatttgctttatttttggaacaaaattaagcttttagttaaatataaaattaataaattaatattattttaattgatttatttgttttctat

SEQ ID NO: 15521 - DNA, 3019 bp, Heterodera glycines
  unsure (1)..(3019): unsure at all n locations
tccctccattctctcccactccctccattctctccccccaccaagggactccctcattntntntntntgnnantccctccattctctcccactccctcgacggcactccctccattctctcccactccctccattctctcccaccccctcgacggcactccctccattctctcccactccctccattctctcccactccctcgacggcactccctctattctcccccctttctacggcattccctaccattctctcccactccctcgacggcactccctctattctcccccctttctacggcactccctccattctctcccactccctccattctctcccaccccctcgacggcactccctccattctctcctctctcccactccctccattctctcccactccctcgacggcactccctccattctctcccactccctccattctctcccactccctcgacggcactccctctattctcccccctttctacggcattccctaccattctctcccactccctcgacggcactccctctattctcccccctttctacggcactccctccattctctcccactccctccattctctcccaccccctcgacggcactccctctattctcccccctttctacggcactccctccattctctcccaccccctcgacggcactccctctattctcccccctttctacggcactccctccattctctcccaccccctcgacggcactccatctattctcccccctttctacggcactcactccctctcttcttccccccccccaccgtcgttggggttgccctcccccaattttactaatttctcaaatgtccttcacttttcctctctttggcccatttaagtcttatgcttcacttacgatggtaatcgttgcttttttcttttctttatcatcggctgaatgtgttttatgaatgggaatgtttaaattagcgccacattttccgccttttcccatttgtctgtcactctttccctttctctgtactcctcgttttcctttctctctctctctctctattatgtctctctctctctcttatgtctctctctctccttccctttctttttccctctttttctctttctcctcttttcccattctttctctctgcacccctttccttaagcatttctcgcttttccttttgctttttccctattgttgcagagcaacttaacaagaaaaacaaaaatgcccgcattgaatagagaattttattcgctgccattttctcccacacattcaatgccaacaaatggtggaagaagcgggcaaaggacggcacaacaaacggaccaaccgccgactaattccccccccccccctcccccgcaaatacaaaagttggactgagggcataagccaattttgccaattcccccctcccccgctgttgccgccgtttctctccctccgctcacaatgcgcgtgcgtcccccgcgggtccgtctgtccggccttggcaaagaaagacccgctggacgaatgaatgaatgggaagcattcgtctgccgggcgctgagagaatgggcgggcggcagaagaggcggagggattcactcactcccatttaaatgccccggccgggccgttgtaagcattggctcttgggaatgaggcgaagctgagggggagaggaggggggggggggatagagcctagcggagcaaaggggcggggggggggggagttgctcttcaggcgaagctcctcaacggtcctggcaaaaaaatgggggggaaaactaagaaaagttgcgcattcatttaaaggtcggagcaagaaattccaccccgcgtcattcccaccttgaaaaaaacaataattttttagaaaaaaatctgtttgaaatttttttggctttttttcaaaaatttctctagaaaatcgcatgaaatttaaaattttcggggtgaagagggggtgggaaagaaacgacagaggggagagggagaaggcaaatgaactacgcctttaaatgtttatgaaattgtgcgggctccgttccacgcccgttcccgtgtagattttccaattttcagagggtgcccccgttttccatagataattttttaattttttggattttttccgaggggatataattattctaggggctgaaaatgggttgatcaacagcttttttcaggtttcagtttggtgctgcccattggtgtcccctgctggtccgtccgtccgtctccctaccacgaacgcccgggccgatcggacgggtccaacgcgccgttctttccccaattttcgggacggtcgaagaactcggccagcgcgtacaccttcttcttgcggcgtacttccgcctcaacgtcatccttaatgggcattgagagagagaggatgcgaaaaggacagaaacaaaagcacaaaaatgggtcgaatggacaaattttgaacattttcgagtgggagaatgccaaaggaatggcaagttggcattgccaacttagcagagtcaatggacagagaactgggcaaaaaaaaccaacaactttttagctagtaattttacaccaaaattgtcaatttttagtttttaaaaaaaataaatacaatgcaaaatagtgccacggcatggatgccaaaaaccggcaaatgctgagttttccagtcaatttcaggaaaggattaaaagtggcgccttaacacagattttgatatctttttgcacctttttcttcgtagacacattgtccttgcgcacatccatcgggtccacgattttgatattgtccatcgtggcgaacgaacgccgccgggggaccgcggacagagcgaagagggaaagggcggcagcggaggaggaggggggaacaacaacaacaaatctgagggggaggaaaaggatggcaaaaacggcattttatagggggggggagtcgatgacaaaaaagtcttttaatttgaaaaaattgaagcctgaccgagccaaatttgtaagctaacgcaatgtttattttgta

SEQ ID NO: 15522 - DNA, 665 bp, Heterodera glycines
  unsure (1)..(665): unsure at all n locations
aacgacaactatcaagtggatggtgcgggggggaaggggggggngggaaatgtgtgtcgcattctcgggatgaatcggtctttcatttgtgcagaccgaggtgcgcaatgggaaggaactcggcttcaccgttttccacgactgcgctttgccgccggacgatttcgtgtcgaactgtcgcatcactttcgatcacctcaaactgatgggtgtcaacgacatttgggccgacttagagccccatggccaactccatctccaaatcgaactgcagggcaaaacggccgaggaagaattcacgggcaaagagccgcgggtgttccaggaacggtcgggcgcttttatggaccgccagaggaggggggccatgcgacggaaaatccacgaagttttggggtagggagaaaaacggaggaggatttgatgaatttgggttggtattcagtcacaagttcatggcactttttctgccacaaccgaccttttgtgcccactgcaaagacttcatttggggcatcgtaggcaagcagggataccagtgccaaatctgtacggttgtcgtgcacaaacggtgccatttgggcgtcgtgtggaaaagtcccggcagcaaaacggacgcttttgacgaagaaacgtgaagaggcggctctgatgtacgctcactg

SEQ ID NO: 15523 - DNA, 2974 bp, Heterodera glycines
ctcgagagccctccgccgctccgcccgcggcgcttcctcccacccggctgactttcttctctttgtttcgcttcggtggcgtcgaccccacgcccaccggatgactttcgtacaaccgacggtaattgtcactgcgaatgtaattccaaaaagactcaacgctaaattttgaatttttcggttgtattttctgtccctgtgccattattcgttcacccgctttgccaatcgccgccttgggcaccgcgagtgagcgcatctttcaatggcacgatccaccttaaattggaaaagataattgggcaaatcaaaaaataatttaatgttccaatgcccgcaaatactgacgggttgttttccactcgaagtgttttggcattttcgtcgttcgggtcaatcagatcaagttggcccagttcgggcggaatcacttgaagccgatttccctataaaaatctgcccagttcggataaaatgatctcggctactccacccccatttttgcctgaatatgcagctctttcagcttttgcaatgtgcccatttgtcgtggcaaatcaatgagatcattttcacgcagtaccaacacttggagattggtctgaagaaggaagggacaaatttttcagagggatgatcagttgaaactttttaccaaatggccaatatcctccgggaacgactcaaagtcattgtcccctgaaatcggatttttttatcgttcattagagattacgccagtccaacccaaataaagtgcccgaagcgttggcatgaagaaaaaatttccaggaagactttgctcgcgtaaattgttgtacgttaagtcgagcaattccaattttgcgaaggagccgaagccgcgggggagtttgtaaagacggttcatcccaaaatcagaaggaaggcaaattaattaatgagggggggggggggagggactgacccgacattgagcaatttgaggtttggaagtgcggaaattgtcactggcaattccttaaaaagcagaaaaatggccataaatatgaaaagggtaaagcgaatgggataaaagacgacctctatgtggttgttccacaggttgagctgctcgagattgaccagatcagaactgagacaaattaaaataattatacggaaaccgccggaggcaaaactcacatatttgcagggatcgaagtcaatttgttgtggctgagagtcaacctcgtcacccgactgttctcaactgaatttacaaaatcattttttaatgaccgttttcggatctcacaattcaaacggagctgtccgaagttgtgaatgcctcggtccacacagtcaatttccgtgttatcctccgcgggcgccgactgcgaatggggcggatgagcggaccgatcgtttttcggcattctgtcgttcgtcgaaatgtccttgcgatttggctgtaatggccacaagcaaatggccaaaggcaattgttgtttatgatgggaagggatgagcagaaaatcgatgaaatgaataagcgaaaagcatcgatcctttcactttctctaaggaaatgcgacagcagcagaaaagggaaccttaaaactgcagaaaaaacaaaggaaaaaacatgcaaaaaaaggaatccctttcgatcgtttatttttgacatttagaaaaaaatatttacaaacaaaattacaataaaattaagataaaatggaacggtagtttttagatttaaagtaatgcatttgtaaaaaacattttcaattttttcaacgtgtaggattttggtggttgaaattcttcaattttgtttccaatgcgcttatgtaagtctccaaagcagtcactgccgattccatccgacgacttgcttcgtctgaaggacaatgaaagtacgggcaaaacccaacaaatgagcaaattaaccgatttcatcaatttgttcgagaaacggacgcaattcttcgtatttaagctggagttgagccagtcgttcagaaatgacactggtcacctgtcccatgtcttaaatagctaattatcatcgtcaattattgttctgttcggaattggtttcgcctgaatatcgttgcgcagtcgcttcgttcatttcctccaacaatttgtagtcatcgattgtgccctgaatttgtccttgtacgtaagaatagagccgatcagaagcaatttgcgcaagacgtttcacttcgtcggtggaggcatcggccgttgtcggatttgtggtcggagaaagagggcactcactgcccgtggaggtacgctcattgatttccattctatgcaaaatgaaatttaatttgtttaaagttcttttaaaatgccagatacagtcttagtgttgccacttaaacattcgagtgtgccaagtcagacgatcaaaatgacaagagataaatttcagtacacgtgattgaaagaacaatcgaatgccaatatccaataaatataaaagcaaaagcataatatatttgccgaataatcaaaacacaaaaagtacgtatgaactcaaaacaaaacaacaaaaggctgatgaaagatgaagtacacgtcaaaaccctgttttggaacaaaaacattgagagatctgagaatgtttggaccgtaagcgtatttaacaacaaaatgataaagatcaattaattatgtttcattcatccgccagcaaactgcgcaccaaatcattgatgaactgagtgcaaatgtgaagcgcaacgcgaaatgcaacgaggcgttcctcaggcgacaatttcattttgtcaccattcgccactccgatgacatcagaaagagcatttttaagaagggctgactcgcgagtactgtaataaaaaacggaagatttataaaagaattaatgtggcgaattgaagcatacgaaagcgggagagactgcggctgagtgagacactcggagacccaatcgtcaatgggcagcaccaaacggcggtacactctgcgaaagatcaaa

SEQ ID NO: 15524 - DNA, 2904 bp, Heterodera glycines
aaaacgcgtctaaattcgttcctttcctccgccgctctagttttaaaaaaggaaaaatggccgtttattccgtccaaatcggtctttcgactcgaaaatgaaagtgttcagtgaaaaagggggtggggggggggggggacgtggcattgaaagtaacggactgaaagaggggagaaacgaagtgatcgaaggttatttgagtcccccttttgcctttctcatttttattttcctcattttttccttttttcccagcaaattcggctttaccatgtcggagtgctcgtcagaggcaaagagttccattacggcatcaaaatcggcgtgttcgcttgcgagccgaaaaacagcggcaagaatttccatgtgcgccatttcaatttgttccgttggggcatcgaatttatgtgcgtttttctctgccttttccgtttcgattcccttaatttgccaaggcgtcacgtggacatcgttctgaagaagtatccgctgtacaccaacatgagcacggagcagctgatcgaagtgatggaggagttgcgaccctgttacaaatgggctgattacaatttgttcaaccacaattgcatggacgtaagcggaagaaaacgctaattaattaattaatggggatacatttaattaaacggttttaagtttgccatggattttatccgacgcatttcggcggtgaatttgccatccggcaaatttttttcttggacccaagaaatccgacagccgctcattttattgccgatcagaaaaatatgcgaaactgagacattcaaacggacagtcaaatcactgaagagaaaagaggagaaagagcagggaaaaggtggagggacagagaaagaaaggaaaagggagcgaaaaaggacaaagaaagcaaagagaaagtcggagaagcagaggaaggagagggacaacgccggggagggagggcagcagacgaaagagcggacggaaagcgcaggcgaaagccccgcggaaaggtgggaaatggggtaattgtgggaatcgaacttaaacgaggtcgaatccatccatatccaaagttcgtttctgttcgaaccctttcttccatttgtttcccccaccaattttgtgccaaattttgttcatttgtcactttttagtgccattgaaaatgcccaaaacatttcgttaaggaagaaaagttctgccgcagaacaacagcaaatacacattgagcaccgcggtgccctgggcttgtatattacaactatcagaatattgccaatgacggaagagatgggacagaaggacgaataacgaaggacgaatgaccaaatgcgaaggacggacaaacgaccaaccccccccccggccgggaaaatgccatttaccattcattggtggcacacttttggccttcggaatggcatctctccccaattggtgctgttttatttgtctcatattttgttccttcaaattattcattcatttcaattaggctcagttttctttttattttccccattttaattaaatttctttcaaatatgtatttctgtgattgccttttttcttttcctttcatttcgcttttcaaattttgccaaattttaatgtttgatttgttgtgcattttgtgctttttctctccgtttttttctcattttgatgggaagtgttaattattagtaataattaacttcttaattaatttgaaagtttggaatgaaaaaaattccgcacataaaacgaacaaataaatgcggagagagaggagaaacattttaaccattccaaaggttgaaacggcggacattcgccgaatgaaaaataaacacgcggcggagaatgagcgatttgttttcttgaaataaatgaaaaaattcagaggcgatagaattctgaggaattaatttggtgaacaaacaatcagacgagcagaagagaaactgggcagaaattagggggacgaaatgggaagaattgggaaggaagggaagggatgaagagggacgaggaggacgaaggaattgggaaggaagggaagggatggaggacggaagaattgggaaggaagggaagggatggaggacggaagaattgggaaggaagggaagattattttaaaggttcatgtacaattacaccggaaggccgacgttcaatggggctttgacagtgcctcggttcgcatcggatgaatggagtgtgcatcaacggacgttggatggaggagacagaaccaacaattacgcagaagcataccatagaaaacttcaacgggcatttgattgtacacatccaactgtcttccgcttcatcaacacaattcgatgtgagcaaaagtctattaatgcagaaatctcacgatgcatcgctggtgaactccctcctcaaaaggcgcccaaatatcgtgccgctgatgcgagaattctcgactcttgcagagctacaatgccatcaacaataaccaggctcaccaaaatgatcacaattaccatgcccttatcaatgttaacccctataacatcatcaattttctccttggtatttctcggaattatgagatgcgcccgtaatatttgcaatgttttgttatttttttgttgttaacacattgataaatctgttatggtgtaattttaaagaattttcgagaaacaaatcagaattggatcaatgtaggacaaaaacgagcttgccagactaaaacgaccctctgactaaaccggccctctgactaaaccggccctctgactaaaccggccctctgactaaaccgaccctctgactaaaccggccctctgactaaaccggccctctgactaaaccgaccctctgactaaaccggccctctgactaaaccgaccctctgactaaaccgaccctctgactaaaccggccggactaaaccgaccc

SEQ ID NO: 15525 - DNA, 1419 bp, Heterodera glycines
aaaaaaaaattcagaaaattcaccactaagaattgaaaatattttcaaaaaatgatcccaaaatttaatatatattttttcttaataaaaatttttggtttaaaatgttgtccttatttaataatttcatttacaattgaaatatttaagtttttacttgttttacacagcggcccaattttgggctctcagtgcaaataggtttattatttatttagtaatcagaacgccaaaactttgcaaaacttaaaatttttttgggattttcccttgtaaaattaggagccgatctcgagttaaaaacttaagttccataaaataaacttggaatcgctagaggaggtcaaaatattggtaaaatttaattctccagaattttcccttcaaaatgagcataaaatggttttatttgctctagtattcaccaagttataagctaaaaaaatttcataaaattgtcgatgctgtacgtaaccaacgctttttgaatatgattttttattgacacgaaaacttttattaataaaaaaataattctgccttctttaaaagaagaaattgaaattaacacacaacataggggaggacttgaacctgggaccccccttttggtgactaactcacagaccactaagacgaaaaatccagcataattgtacttggagcccaaaattgggccgctgtgtttaataccaaaaaagcgttaataaaaaaaaaaaaaattttttttttgcctatttttgtgcctattttaaggtttttgtgcctatttgcgatttttttatgcctttttaggtgtctatttcgcgattttttgtgcctaaaaaggaagccctataaattattaatttaattgcttcggtgggggacggtttagtctggccgttttagtcagagggtcggtttagtcagggggacgttttagtctggcttgctggttttgtcctacacggcttttattgtgattttttttcgaaaaatctttaaatttaatattaaaacatatttaacaattatttccaaaaaaaaactaaccagattaagcgcgcatttcatagttgccagaaatatcacccctaacattgctgtcgctctcactctctccctctgccacacgtccggcttgttaatatgaggcctattctttgtctcagttactggagtttagagcactgtccctgagacagcagaaatatatggcacattattaaagaaagaatccgcttttgttgtcattttgcagcaaattttgttttgtcttatcgtccgtccgcttttctctaatttggcttttgctgctgctttccattttttattttatgcttttaataacaaacaacaaaacaaaaaaaaagtgtgcccgcaaccctccagggcaaaactggcttccgcacgcccaggaacacccagacacgggtg

SEQ ID NO: 15526 - DNA, 1077 bp, Heterodera glycines
catcacggcaccgaagcaaatggttggacagaaaaaacaattggataatcaaacaaattctggcagagttatttctactttttctgttgctgaacatgggaggcacaataacgaatgtggagaagcaatttgttattctgaccaaacgacaacaaaacaaaagtcaagcagtctaatgcaacagcattattttgagaccaatggttccaaggaaatcacaaccaaacaacgactacagaggttgaggagaaaaagcacatcttcacgcaagaacatgtcactgtcgcaccgatacactgcccccttttcatcgagcaaaggatgtgccgggtttattgttccacccgtttttccaaagacgtgttccttgtacgatgaaagtttcagcgggggagtgtttgttgaccatcaagaagacagacttttggttgaggcagttgatcggattcgaaaacggaatttctcatgcaaggagaaagaacacgacggatgcttgcagaaacaacagacatctgctgacgcttcccaaataaacggcgattttattaatgaaaattcggacatcgacagtggaaattcttcgatcacagaaggtcgccaatcgcctatatgttctgaatttactcagaattttggtcgaacagaggcgactcaatttaaaaaggctgcagaaaattcggatgttgccagtgacgccaattggaaagacaccaatcaacgggacggcttcctaagaaaaaactgccgattattgcattttgtcaagaagaaaggcagtgaatcgttggacaacgaacatatgcaaaatgacgaccgagagaacgacaaattgccagcacaaaggcagtgggaaactgacacaacaaaacgaaagtcatggagagccagactcctccggacattgtcagtggggagcccatccgtcggaagagtcatgaaagacaaagaaaagcaaagaggtaattaattaggttcatttctcaatcaacgctcctcaatgaaacgctacgcaatgtgtgcatcaatagaaataaagattttcaacatttagtataaatcgtccaaaaattctctact

SEQ ID NO: 15527 - DNA, 2827 bp, Heterodera glycines
  unsure (1)..(2827): unsure at all n locations
tttgatagtcgtaaatttaactaaaatagatattccatctcccagtgggngaaaagccgactagncacttcgcgaatttctaccgggaacgggaggnggngacggnccgcgaacncngncgncgncnnncgcnggacganncanngcaaccctcggaaatgcctctgcccgaaggngcgctgcactcgcaactgctggacgagtttatgatcagacaggtggccacggaaacgaaattagaaataaaacaatgcatttttactttatatccagataatcgatattctgccgccacgagcagagggttatccttgggttcagatttacaattccgaaaagcacggcttctctttgactacgctttacaggtatagtcaaggacactctcatcagaaatggatatgaggtgacaagtggcggaggggggaattcgtcaaccactttcaaattgctcagggggagagaatcttttcactcccagtgattaattgacaatttgtccatattactattgtattgcttccatataaaaaaatgcgttcaggaggatggcggaatgggatgaggaaatgtcccccgtccttctggtggttagggacgtgaacggacatgtttttggggcggtgtccagcggcgctttgaagccgtgtgaccattactacggcaccggcgactcgtcccttttgtttcggttcaccggcgaattccctcacacgcggtgaggctttctttgcggattcgcttaagactgctcttctctttctcaacagggagttgagaacattcacttggaccggggaaaaccaattcttcgtgaatgccacccgcgaatcgctttcatttggggcgggtggtgggcacttcggcctttggttggacgctgacctgaaccacggccgatcacaaaagtatgtcacaacgaacggctagtgaaattgatctttggaattattcctttctcagatgtgctacctttgacaatgaaccattggctggtggtcaggaggaagacttcgttgtgcagttcgttgaagtgttcggcttttgtatgacataaagccgccatcgacttgttatttgtgtttttttccaatgggtgtgatttttattatttgctttttattctggccgttcatttatgtctattaactctaatgattcttaattagtgagtttctttgaaccatgcctgactgacccgaataaatatttatttttattcttccatccttaatggggaaccattgaattttctttttttctgatgattcacacccaaatgattccgcactccttttcccaaatttcctctaaattgtttctcatttgtcaacatttactatcatttttccattttataccaatggttttatgacaaaacgaaataaacaaatcaaaatcaattaaatattaaaccagcataatcagaagggatgagaataaaacaccgagaaaagtttatgaaagattcaaaaaagattgattggtgctgccagaagttgacagggtcaaaacaaattcgaatttgtcaccaaaatcgatgactgtcattgactaattgatatgtaaaattgtgagtttttgattagacgagaaaaaattaataaaacaaatggaaaagggaaagggcgttttacaatcagagcattgatcacaaattgggacaaattgtccttaccgtcgtttaacagtttaaagttggtatattgcacatgtacagacaacaaatctggacgacgaaattatcatcgaacggagtcaaaacatttgctggaattctctttgctgctgaacggccgtgaaggcggacaaaggcaaagtgagcagcgacgggttgggctcgctgaagtccgtccctgggtttgtgccgttctgttgctgttgcagcagaatcgccgcgagcagagaagggtcggtctgttgccggaggggagcgtcccatcggtcgcttgggctgttgagaagtgccggccccgcgtcgtcgttccctacggttgctcgcagttgcgtttgttggccatgctgtcccaccaacatggcctgttgccggtcgttccgttgttgttcctggaccattttggagatgatttgcaggaggatcgccttttgttgactgtcattctctgacggattcgccatcggaggaaaagtcgtcgcaccatcggtcgcttgtagcaacagaagttgggcgagtatggggtcagccagcagaacattgcgatgccaaggggcgagcgcatctgcggaacaaaacatcggcggaaggaacagatgagccgaaggacggactagcagctcgagaggagtggagagagaagcgaacggagcgcaaggagaagcggagagcagcgaacggccgagcagctgctgcagagagtcgaacgaggagggcatcggtggggaacagctgctgggagaaggggcgaagagttgcggcaccgattgacggggggttggtcgtcaaaattggcgaattgctttctgatgcttggctgggcaacaactgaaaagccgtggagagttaacaaatgcccatctctcccccattttatgagaatgggatgacctgttcactaccgacgggtgtgtcggcatttcgccgcggggttccgcttaactgcgcgctcagcgaatcccgcgacgtcgcccttccctcacggacagcaatctgatgaaaatctgtcttatccaacggattcgtgccttcgtagtcactgcatgtcatcgcttcgatttgggcgggcaaagatgccgttgacttcttccgtggcggctccctctcgtcttcgtcccctccgtcgtccatttcttccagtattttgtcctg

SEQ ID NO: 15528 - DNA, 2077 bp, Heterodera glycines
  unsure (1)..(2077): unsure at all n locations
gccccagcgggggatcatgtgtccattcacannaagtgttatgcacactaatcaccatgtacctcttctaatcactgttgtacctcttttaatcactgtngtacctcttctaatgactgtgtaccctcttctaatcacttttgtacctcttctacaaatttgntacctcttctaatcactgttgtacctcttctaatcactgttttacctcttttaatcactattgcacctcttctaatcacagttgtatctcttctaactcttatggggatagtcccatccccttaaacatttaaaaaaaaagtttcagaatgccaatttattttttatgcaaacaataagattatgtaatataaatctcagatattttttgtgtcaaattgggatatgcttttttctgttacttttagttagttaatcaatagcgttgacaaactacttcgaatattatttaattaatcaaacaaatctttagattttcatgacacctatttttgataaaattattaaaaattttgataagacatgtaagcttattcatttttgtagtttatacatttttacttacagacaaaattcctaaaaaaatgtcaaaatctgcgagttttgaggttatttaatcattcagtagatatatatttaaattataaaatataggaatggtgccatgagcgcagaacattgaatgatgggggcaagtcaaacgtaaagatcccgaatgagaatgcattaagcgaggagatgacaaaaacaaaaaaacattctggcaaattcggcgtttccagcaaaaagatttcagttactgcagaaaaggtgtacttatatgtacacttccttcaaatgatcccccgctggggcaggtccttggcccgtgaaagggatgggtaccatccctatagccgttggtatagggatgggtaccatccctatagccgttggcatacggatgggtaccatcactatagccgttggcatacggatgggtaccatccctatagccgttggcatacggatgggtaccatccctatagccgttggcatacggataggtaccatccctatagccgttagcatagggatgggtaccatcactatagccgttggcatagggatgggtaccatcactggcgtgttattcgcctggtactgaagtgtactttttgagcacacttcagttttgcggatttttgggctatttttattttattaaatatcttttcagaactgagtagtgaatttttttctgaaaattcgaaaatttccagaatttctggaataactttttttatattcttcatagaaataccaaataaagggcaaaaatttctccgcttggggatgttgtccatcctcctagcaaacggtatggggatggtggccatccccctagcaaacggtttggggatggtggccatcctcctagcaaacggtatggggatggtggccatccctctagcaaacggtatggggatggaggacatccccataatttttgaaatgggaatggagaacgtcattagataatctgtctctattatctttcaaataaatccaaaagaacgaattcaaaagaatgaatttttgtgtttaactaattgcaacatttgtaaaaattgtctaaattgcttaattttttgattgtcatgcatttttaaggattatttaatttctttagttaaaaaattacacaataaagtccaaatttcttaattatagaatttatgaaaaaataattatatggtaattatcctttcacaaaaatttatgtatttaatgcgaaaatttttacagaagggatccattttaatagctaaaaaaaatttatgcgtggaaaaaatttaaattatgtaaaaggataaattatttttcaattttttaatgccatttttgtatagccatagcaatttttttgataagattttttggcacaatttttttcaagctttcaactaacccaaattctcagattattattaatagttttttatttacctaaagttaaaaggataaaatatttttttctaatggctttttttctataacagtagacgtttttagacagctttttggtacgaaa

SEQ ID NO: 15529 - DNA, 979 bp, Heterodera glycines
acctaaaagaaagcagattcaagctaacaaattgagaatcaaagcctaataattactgtacatgggtatcactgtacaattggggaaagtgacgacaaagcgtcaaatttcctgattctgttggtcattcattcgttcgttcgttggtcaattaccatcccaaaatgtgctattaatatttggtaattattaggtcaaatttcactcactttcacaaacaaaaacgattaacaaaaaatttattaattcgatttggaaaaataagaaattaaaataacaaaattaaatgccaattttgcagccgaaatattccacacaaatgccgcgcaactgaaaaagtgccgaaaacgatttcaaaaatgaaaaggcaaaagtaaacggacggaccgcgtgcacaaactgtttgctgcccgccttcggccatcgctccgtccgttcgaccgttttaccaatgcatttgctaacagtgacggcggattcttcctcagcgaaaagcaacattttggccacagttttttggtcgatctttgccaaggcaaaattacgactgaaaagggtggaaaatggaagaacggaagaaaacggacaaaacaatgggacgacacagcacgaacggcactcacctgttcctgaagggggggggaagacaattaaaagtgggaaattttaattagcaattaaattcaaatgccaacgacacttttaaatgtgccaaaatgacggacaaaggaatgaatcattttttagtccagaataagcatccaagcatttaaaaatttattttggcgttgctctgaaaatgccattccaatcgatcgttttatggatgcttccattttggcacattaatttgtctgattttggcaaagccgactcactctcgccacagcacaaagtggcagtttttggtcagcttggtgaatccctgtccagtcggacagcacaaatagaggtcatcttcgccgccttgcattgcttt

SEQ ID NO: 15530 - DNA, 3273 bp, Heterodera glycines
ggcggcggcggcggcgtaatttgtccattgccaacgactgaccgaccgccgaaaggccatccgatgagagagcggaacaaatggaaacggaagaggacaaagaaaggcacttgcaaaggacgaatgatggcaaaacgagggagggggaagcgaacgcgagggaatgccattgtggtgcaatgcaaattttggggaggggagggaaggggggggggggggcccccccccactaatccgaacaaagcgaaagatcggcaaattttgcccaatttcaaaaaggaaaaaattcgaggaacagcgaaaaaacctaaaagaaagtagattcaagctaccaaatcgagataaaaagccaaataattactgtaccatgggtattactgtacaattggggaaagtgacgacaaagcgtcaaatttcctgattctgttggtccattcattcgttcgttcgttggtcaattaccatcccaaaatgtgctattaatatttggtaattattaggtcaaatttcactcactttcacacacaaaaacgattaacaaaaaatttattaattcgatttggaaaaataagaaattaaaataacaaaattaaatgccaattttgcagccgaaatattccacacaaatgccgcgcaactgaaaaagtgccgaaaacgatttcaaaaatgaaaaggcaaaaataaacggacggaccgcgtgcacaaactgtttgctgcccgccttcggccatcgctccgtccgttcgaccgttttaccaatgcatttgctaacagtgacggcggattcttcctcagcgaaaagcaacattttggccacagttttttggtcgatctttgccaaggcaaaattacgactgaaaagggtggaaaatggaagaacggaagaaaacggacaaaacaatgggacgacacggcacgaacggcactcacctgttgctgaaggggggggggggaagacaattaaaagtgggaaattttaattagcaattaaatgccaaatgccaacgacacttttaaatgtgtcaaaatgacggacaaaggaatgaatcattttttagtccagaataagcatccaagcatttaaaaatttattttggcgttgctctgaaaatgtcattccaatcgatcgttttatggatgcttccattttggcacattaatttgtctgattttggcaaaagccgactcactctcgccacagcacaagttggcagtttttggccagcttggtgaattcctgttccaagtcggacaacacaaaatagaggtcatcttcgcctcctttgcatttgctttcagcaattttcggcttttcctccttttctctgttcctcaaatttatgtccgtttttcgtgatgccaatttcggtccctccgattttgtgcctatttttcgtattcctttcgtctccgccaagtccttttttggtggtgccaactttccacaattgccaattccgcatgtttttcgtcgtgccaattttggcccatgcagcttcattgtgccaatttcgcctgtttttcgccgtgccaatttcagctcgtcctccaatgggttatgaatgtgttcgtatcgatcaaaaagtgccatcttctctttcaaatataagcccctataagggcactgcttcttctcacatttcaaccatatctttttctctgaagttccgtttcttttcataagcccaaaactcttctgatgttcaatcagacttccctcttttgcaactgtcgccaaaaaatgccaataatttcctgtccgcggctcgacgaatgtttgggcggcattttttgacatctaagactcaaaaatggggagattatttggactagtagaacgttcaaagccattctcggatttagccatggcaagcgttctttgtgtcccaacgagtgccgaaaaacattattagccgtttaatttgcccacctcgccctcctcctgcgccattagttgtcgtgactccttcatagtttccccttccctcttcgttgtcccgtcttccgcgtccccttccgtaatgccttcgtccgcttccgcgtccttctcaattctaccattttccgcttccgtttcatcgctttttatccccttgcctcgtctgttttcgcttccatctcctccttctgtctgcttgttctggtcagccctccgtgcctaaatcggcacaaacaatgccgcaaaagtttgtcggccttcaacagggggacacagatgacaaagttgggcagcgacttttgtccggcacacaacagcaaagattaatccacattgttaaccgaatttcgcatcaattaatggtaattccctctctatcttcccactttctccctttactccaactctcatccccctctatttctctctctctccccccttttctcagccatttctcatttcctcattctctcccaatgtctgtgccgaaagtgtcagaatgccgcatcacctcaccggcgttgtcccttccccgttttccatctctctgcttttacttacagtttttcttttttgtgccaaattcgcctttttctcagtgattgatgccaatgtattcgtctgatcactaagccctcgtcgttgttctgtcttctctgatcgctttctattgctttcttccacgtcgttcgttccgtccgttcgctgggcgttttcgctttttccattttctaagtgattgtcaacattttttgttggtcccttctcttaatgagttaacgcatgcgattgtttaattgtatttccgctcattaatttgctattcattagtactaattgctcccctccacctccattttgtctcattacgcccaatttacggctgttgtgcaccttttccattgccattcccctccggcgttgtgtggttgtgctggttccgctcgtacacttcccccgtggcgatgtccaatttgattttgtatgggcacttttcggcactttcaaaccaataccttcggcacatccttcggcactttcctccgacggcattgtgaagcgattgcccattcagcccattttgccgacaaaattcaatgaatttctctccgttgtccacgcgcatcaaaaaggtccacgtgattcgccgctttttgcggttgttcacttttggcacttccatttcaatggacgacattttgaaaaattgcaataaattataaagtattttgatttttttaaatttttattctttgtattaaatgaaaaattctgatgcaaaattcgcgataaaatgtcaaaaataaaagaggaaaagagagagggaacacaaa

SEQ ID NO: 15531 - DNA, 2205 bp, Heterodera glycines
tggacacaaaaaaaaataattattttttccattaaaaaacctgaagactgaaagggcagaaaaggaaagtgccatttcacgctaatgaattacgcatttaaaataagaaaaaatgaagtaaaaactgtgatttcaattttattttgaatataaaattatttatgaaacaaaaatcaatcagtgcccgcaaaacaaaactttgacgcattggccattctcagagaagggtcaatgaaagaaagtgatggcctttcccatcactttgagcattttgtgtcagtcattcgaagcattttcattcatttccatcgtccaatttgtgatgggagacgaaggaatgacagaaaaaagaacactatgatgagagtgattcatcagagagaggggaggggaggagagattgagcattttatggccaaaatggccaaaaaatgaatgaaacgattgtttgtgcttgaccaaaagcggaaaaggaacgaaacttcgtttagcgttggacggacactttactatgaaaaaatggacaaattaaagcaaaccaaaaaaaaaaattgttgaaaaattggagaaattaaatataaaatttgaaagggttctttatttgaagaaaaaggaaaataatatattttaatatttattaatttttctttgatataataattattctatttgaattttattacgataaaaaaggaattaagaaaattgaaaaaataaaaataaaaaaagtaaaaaggaatgaataagtaagtgaatgtctttcgctggttgctaaatgaatgaataattttggatttggaatttctcgcgttcattcgctgctcatccccaacagagtgaagtgattggcgggcgtttaatggtgatagaagagaaagaggagaaagtccgcaaaaaaagaataatttattcattcattgcataaacaacaaaaaaaaaagatgaagcatccaccaccccatcatcatcatcatcatcagcagcagaagcgaacgaagcaaaagccaaaagcagcaaatggtgcaattttttggtgatttagccaaaaaactgagaatttcgcttttccatttcgaggcaaaaaatggaaataaaataaaaaaaattgaaatttaaaaaaagaacgtttttataaccctaatttgttaaaaataatttgttggtacgatgcaatttgaccgcgacttttgtgtccccaatatataagaaatttaataaaaatctttcttttcaatgatttatgatgggaatgcaatgtcgcgctaaaggtcataaaactcataaattattgaatcattttgcaagaatattttatttacaattgttttaaaaatattcaaaaataggataaaatgaaaaaactatgcataattaattataattaaataataaaaaaatatctttgcatattgcaaatagtcgaaaaaagaaatttacgatgcccaaaagggctgctgatgatgcgcaaatagcggagatgtaattggggaagaaaaagtggtgctaataattgcgcgaactagtttagcatttgtgaagaagtgttatgtgacacgcaaaaagggcaaaatgagtgaataaatcattgagagaaatgggctaatgttctgggaaggtgttccgatcattcttcaaaaattgcttatataaaatggctttagcggcaaaatcacttttgttgagactgatcagtttaatataagcaaaagaaagatagaaacagtcgcaacgccaaaattagacttttttttaaagtattgacaaattaaacccacgcaaatacaaattgcagctctcgccaagggttgaaaaatatttttttgtggcagcaaatccaccggattaatctttcaaaatcccgacgcaatatcttcaaaaatcccataagctaatggagttttttccccgagacagtaaaagtttggagatagcgtgtaaaagtgataggaatagggaaacaaagaaaacaatgagcaaaaatggaggttattttaagattaaattttataattttatttaaattagttttttcccgccggtgcttgatcgacctccgtccggcaaatcgggcggggggggggggggggggaaattgaaagaaagtcgcaagctgaatgaatgaatgggaaaacggcgaatggggggggggggggattgaataaaagttgaacagagcaggatttgacacgacacgacaaagacgcg

SEQ ID NO: 15532 - DNA, 887 bp, Heterodera glycines
ttttaaaaaaattcctaaaaaaagcaaaagggatattatatttttttaatttaaaaggatttttaagaattttgaaaaatcaaaaggtaataggtatggagttgtccttttgtctaccagtggacagattggtgaaagacaccacctgctgtaaaaaatttggagagtgttagcgatatggagaaaattggtcaaaattcgcagaataatatcaattagtagggatgtcaattttatgtaaatacatttttttcctggattctccatgctctaaatagcaggaaaaacacttttttttgtgtttgcgaacaaaagtacatattttggttttttcttacacatttcggggttttttttttacatatttatgcacatattttgactactttttgtatatatttttgacatcccaatcaattaggtatctatgtatgtataaaattttaaaaaaatagaaaatcttttttcgaatccaaaaaatgaataggtaatcaaagaacgttcataatcccttttgaaaattaatttagtctcagtgcttcacaaagaataatataaaggaggttataaacacataaacctacaaaatatgtacaacatttgtctcaaaattgtgaccaaaggctgtaaataaatttttcatgcgtttggcccattttcgccggcacggcactttcatttgcgagccaaaaggtgaatgaaactcacaaaacatgcacaaatggatgggcatgcaaaacacaaactgacaaaacacagcaaagatttgttgtggtagaggatagtttttttatccgtttaaataattaaatcgcaatatttaaagtcatgaatttcgtcaatgttggcactacggacggaccgagcttcttttgaagtccttcggg

SEQ ID NO: 15533 - DNA, 2583 bp, Heterodera glycines
cattctgggaactatttgtttcatttgctgttataaagtcaagcagaagcaaaggcactaaaataaataaaagaaatcacattaattcaatttctcaaaaaagatactttcgcgccaattttaattttaccatcggaattattttgtttatggccggcggattcaacagccaaatcaatcgcgtgaggctcatttccggaggccggagactcgggagagaacggagcggtgaaactctcgtcaaatggacccaaaagagcgacggggacgagtccggaggaaacggcgttgtcacagagactgaagacccattttggtgaaaaagtcgtcgtcgtccttcacctgaaaccgtcctgccggagtgccttcaccaccactgcgtcgccccttctcagaaccatcgacgcgctttcccagtcgctttggacacgtcgcaattgctgcgtcaacttttgagcatggcaaatcttcgtctggtttcaaaatcgtttatgcattattattcgtccaattttcaccagtgcgtcccgctctttcgtcgtttggggtcgtcgtttatgcgtttttggctgtttattttgcgcttccctttcatttgagaaatgagtgcttttcgttcctcggaaagaaagatgaagcgacttttctgcgaaaattaaactcaatcttttcccaatttggcacaatgattgacttttttgcaatggattcgacccggacgaaagatgcgctgcaattttgttcagctcagccaatgtgtggcgatgggacgcggacagatgagcgcggaaaggaagggcggcgctgaaacagtcacgcaccttctgaaatggaaaaaagcacaaaatttcagtgttgaaaatagggcttatatttttcgaaaaggcgaatttacctccggtcgttctctggcaaaccattcgtccatccggcacaaaaaagcctcgtcaagcttattgactcgttggattagctcacgaacacgctaaattcgtatttaatcgcaagttggcctttccgcctgaccgtgttaattgagccgatgacacgtggcagctgcgctttgatttgattgttaagcgcttcgaattcggcacgccgcatttccacctcatcggactgaattaaaaagacgaattttcgatttacgctttttgaagacatttttgtgtgtcgcttttgctgtttcgtaatctgctaatttgtcgaaacgtttgtgcaccaatttggcgaggtcactgcgcacaagtttctttccctctgtgatcacttcttggtcaaatgtctgcaaatggcgtcgacaaagctcatccaaatgccgaaacataacagcaaaagccttcacaacattttcgtcttgcgcatgacaaatccctgcaaaagtaagacgaatgctttttcaaccttgtgatcggaggtcgatgacccaagagcagctctttcctgctaatctcgccgtttcacccccccccccatattttataatgatggcattcgtttacatttaactgtttttttcatttatatgttctcgtttgcctttataagtgtcttcgtgccgtttaacggactgttcgatgtgttttttgtacagttgggcacagtaaaggaatttgcacagtcttcgctccgcttcctccaacagttgcacgaggtagtcgaactccgtgtaccgtgccgtgttcagtccgatggaacggttgatgcgatatttcagccggttgctcttcttcaccagcgagtgcatgttaattcgcaagagacggtcggccaacgacagctgttcttggctgcgatatttgcgaactgaaaagattggcttacacgaagcaaattcgacggaaagcgcttgttaactgagttcctttcgccgtttgcattcattcatacgagacgccaaagtcccaaattgtcggagcgactccatcaatttgggatggtccgggtgatggatgggcgtattctaaaaggcaaactgaggaacggtgactggcggtgcggcacgactttcagcaactcgccaacgtaaagggggtacttcagacaccgttggattggacgtgacactgcggtaggcacgtcgaaaacgctggagcccttttgacgcatggccaacaaacacttttgaagggcattttgtagtgattcatcctcctcctaagagagagagagatgagacaaaaaaagaagggaaaatacattttccacgatgacacttatttgctcaacataacggaaatggtaggcataagcaactgaaggtattcaaaatcagtgtaattttattcactttttacacggaccaaagaagcgttctttcaattccatgaaagcatttccaaaatgttggtcgacagaaggaagttctaacaaaagacaaagaattggatgaaaacaacgagttcttttttcccttacctttctgtgccataattgtcgagattagtgtctgcgagagttgtttgagtggcgcataaccattggtcagcgcttttttgtcctccgcgctcaattcggcactttctttgatggactaataattgaaagtaattcgttaaataacctttgaaaataaaagcaaaa

SEQ ID NO: 15534 - DNA, 2603 bp, Heterodera glycines
ttttaagctaagacgggcgcttcgcgcccatttctaaattttgttgggctgcttcgcgacctcagacgggcgcttcgcgcccgttttttaaattttgaagagttcgacgggcacttaaatttttgtaaagtttgttaggcagtttagcggcctgggtcgggcacttcgcgcccgttttataaattttgttgggcaaccaaggtggaagaggtacaacagttattagaagaggtataacagtgattagaagaggtacaacagtgatttttaagggtgaacatccaaaataagcatttctaagttcgaataagtacgttaaaacgcaaaattttcgaacaaaacataagtttttcgtgcatttctcgtcgagttaaatctgcagaaaacataagcaaaaatttaaaaatccgggccctaatcattactgaccaaaattactatatctatcggaacatataaagcatatagaaatggtaacagaccagatcattacaccaaaacagcagtgaagagccagcaaatgtaggaggagggcggagagccgagtcggttacaggctattcaaacacatcatcataagcatcaccaacaccttgtggctctgctgttcccctgtgctgttccgacccgacaccgtccatcaccaccaccatcagcgacaatcatcaatttaatcgttctgctgtattgtgcttgcttgctagtggtgtaaattgacagggtggtagtgatggagcggggcggggatcataaaaaagccgcgccacctccaatttttttactggagggaaaaagcgccgctaattgaggttgggccctcccccgcagggaggacacccaccgattttggaacagaacaatgattggttgtgaaaagtgcgcaaaaaatgagggtgtgaaataactatgcatcaaaaggtgctaggttcgatccacaaaaaacagcgacccacaaaaaaactcagtgtgggcgatccagaaaaaacttagtgatttgattgttcatattccggaagcctatcgcattactttcggggcaccaaaagtgcctgattcggaacccggaccggcccggttaataacaattttttgtctagtttttcaagtgctatctcccagaccgggtccggttcttaatctgttcacttggagcccatcagggtcggacacatctgtcggaggacctcagcctcgcccccgacccctgtcgatggccaaccaaagctaagcgtgccggtaccagcggtttttttgtacagctcgatgagctctacaaaacggtatcaatggcgtctggctgtgtctattacaaatggagaaaagtggcgagaagcgatgtgaaaaattgaaaaatgacttgcatgccgccgtacattagggttaagcggacggcacaccgtgattttgtgaattgaataattaaatttatttaattaattttatcaatcactgagtttttgtggatcgcccatactgagttttttgtgatcgactcagcacggtatcaaaaaaggaagaagaaaagcaagcaattgaatggaaataaaaaaatattaaatattggcgaatgtgggtatattttctacgaaacgaacactttttgtcatgttaattttttcattttaattgtctctgttagctaataacaaagttttggagaactagaatcgaaattttggggttctaatgcacattatgagtccaatcgacctttatgagtccaatcaattaacaatcccgggtttttatacaataactttgttcatgttcgaacaaatcctatctttttggtatcattcgaaagcacaaagtttaacgaaactaaaatatataaaatcgcagcgttcaggcaattaccaaaaaagatttgattaattaattaattgctgattattttcgtttgtaactttcttgaaatgttaggctgcaccgcgcttacaaaatgtggggtaacaatagagcttccagtgttgctcgagagatttgtctgggtgtttcaccaagtgtcgtatcttcgggtcaagccttggtctcgggaaatttcagtctcgagcatcactaattacttgtcaaagtttttatcatttcatggctcaacaaatttcatgtttattatatttctgttgtttttttgaagtcgaaaaattactgatattcttcaaatttataccaacaacatctattttcatataatttcactttgcatggaaaaaactgcaaaaattaaattaattataaaaagataagcaggattaaattaatttgcttactctatgaaagaaattcacaagaaaaatgactccggcgaagagaaaaggcgtgaaaattttaaaaaaataatgaatgctaaattttatattaacttatgggttgcagaactaatttttcaaaagattggtttggcttggtttcagcctcttaaaaattgtcagaattgcggggttagtgtccgttgcccaatgtattatttatataaaaaccagtgccctatgtgcactgaaagtaactgattttaatttatttttttaattgaaatagcttcgctatttaacactgttctctagagggcgctacgcgccaaaaactttcaatatgaccttata

SEQ ID NO: 15535 - DNA, 2889 bp, Heterodera glycines
  unsure (1)..(2889): unsure at all n locations
attaaaattaaaacgtgttttttgggcatntaagaaaaattccttaaaatcctcaanaattgcgaaatatgtatgaaattatataacataccacctaatattatatgatttcgatggtattatttaaactttatcacgagtagggttgtcaaaataacagggtttggcgtgctgatgcctttttaatatattgttcaaaaaacggaatgtttttttttcgatatatgcaatatgcagcgtttattttgttttattatttggagttgttttcgaattatacgatgtcaaaaattttcacttgcggttgttttaatatttagaaaattattttaattagagatcgacctggacctggatccatgcctggatttttcctggatccaggtccaggtccaggccatttttcggcaacctggatttttcctggacctggattttcctggatttttgtccaggaaatcaaggtccaggtcaaatgtgaaaaaaatccatgtccaggtccaggcaaaacacgaaaaaacctggattttcctggacaaaattttagaatttattttttcaagtggccgatgttttttcaagttttaaaaacagattaaataaatttaaaaacacattattattattaattagatatttttagaggtttataagcaattaattgattttttcaaacctttttttgatttttaaagtgagtttcaaaaaatccaggtccaggtccaggccatttttcggcaacctggatttttcctggacctggattttcctggatttttgtccaggaaatcaaggtccaggtcaaatgtgaaaaaaatccatgtccaggtccaggcaaaacacgaaaaaacctggattttcctggacaaaattttagaatttattttttcaagtggccgatgttttttcaagttttaaaaacagattaaataaatttaaaaacacattattattattaattagatatttttagaggtttataagcaattaattgattttttcaaacctttttttgatttttaaagtgagtttcaaaaaatccaggtccaggtccaggccatttttcggcaacctggatttttcctggacctggattttcctggatttttgtccaggaaatcaaggtccaggtcaaatgtgaaaaaaatccaggtcgaggcaaaacacgaaaaaacctggattttcctggacaaaattttagaatttattttttcaagtgaccgatgttttttcaagtttttaaaacagattaaatagattcaaaactcattattattgtaaattagatatttttagatgttcccaagcaattaattgattttttcaaacctttttttgattttaaaatgagtttcaaaaaatccaggtccaggcttttttcaaaatgtcgatctctagttatcatagcaggtcattttattttgtcgcaccacgaaaaaatttaaattttttttaccaaaatctaaaaaaattaagaatatccatgaaggaagagatagaaagtgcgcagcgtgagttggaagtagcacaagggcgaattcggcgcctggaagatcaaatttacgagctgaatgaggtggtgatgtcatgcggacagctttttccccgaatcatttcttttgaaattttcttaagaaaaagtttttaagaatatgacgctaaagatggcgtcaaaattaaaaaatcttccgatttaaaaaaagacatcttacatacaattgacttaaaaaaaattaatttaatttgttttgcaggcaaagcgattgctggaagaaaaggagcacgagctacaaacattgaacactgaattggcatcagagagagctgtaaaaaacatttttcaatcaaaatacagactttgttggacacggaaaattttccgtgactcgaaatagggaccagattttttttgggccgttaggttttaaaaagagaataggtttctggtattgctagcagacttctccgatggaatttgatttttttttatttatcaagatgagcaaggaggaacgggcaagactgctcactgaaattgcactgcaagaatcgcgcgtttcagaaaagcgattcgaagttaaggtgtggtgttaatttggctaatttgtcaatcattatttgccccatttcgggcatagcataataatcatgaacaaaaccattaaaaaatttctggaggcgcacctgaagtttctttttttttcttccggtccaaaattttttgtcaatcaaggaaattttggcattttggcgccgcagggaaatattttttgaactttaatgctatttgttaagcaaatgtttaaaactcacccattttgcaccccctcccagaaaattgttattattcgaaagagcttaacaaatatttttattagcatgctaagttttaaaaaattggtttcagataaaaaataaaagttgccaaaaacatacgaaaaaatcgatcccaaattttcgcacgcattttttttttttgttccaaaatgttaacccataaaattttatgatttgattctgaaaatttcaaaaaaatgaattttttccaaaaacacagaacaaaacggaggagatgaacaaactgaaggcggaggttgaaagtgggaatggccatttgccgaccgaattcaatgacccggacgatctgacagcccacattggtggggattttttaattaataaatgaatttattaaattttttacattgcttttttataatagtttttattttgttgatcgcgaaaaaatttatgggctctagattgttttattaattttaaaaaatttatccatttttgtcgattttttctgattgattttgggggtcaggataaaaaaaaagccgaattatcgaatagcaaacaaacatgctctacacgaaaaagtaa

SEQ ID NO: 15536 - DNA, 823 bp, Heterodera glycines
gggggggggggggtgatcgatgacaaaatgggagataatcagtgttggttaaattaatgggatgaccaccgtgaagaaagaacagcgtcagggagggcaaatgaccggcacgaaaacagttttgacacttccaaccgcaggaaattcatcgatggaccaaagcaaaacccatggatttcagttttacaaaatatttatgttttacagaattcaaaagaataaaagaatttttgacaaagtttcgtacgaggaaggcgacatgatcccggtcatttccatcacatcactgactaccatataaattaattaattaataataattatataaaaaaattagggaagtgtcatttgtcggatggaggtcatttggttattgtcatcatcagcataatcattgttttgttgtgttcggtcggcccatcaaacgattggcggttggacaatgagcggcggggacgaaacgtttgtcggtcgaagtgcgggcgaatggacgccgagaaagaggggctggtggaggtgcaacggattgtcgaagaactgctggtcgttgctggcgctgtcctcagcgggcgtcgtgatgaccacgtgcgaacgacggggactgaagcgaccgtcgaggagagaacgcgcggagggcacggggaactctttgaatgtttggccgagacgcctaaagaaaaaaagttcggaatttggcgagcaatgccaaaagtaaccaagcaatgactttcccaacttacgaagccgtggcgggaaaacgtcggaagagtagcagaccgacgagcgagaggaggacgagcagaagggtcaggacgagcagaag

SEQ ID NO: 15537 - DNA, 1235 bp, Heterodera glycines
tttattccccccccccccccccccggcattcgtttgtcccatattctcgccccttcccttccgctgcccctcccccatttttcttttgcacttctacggaaaatggattttgcctgggaggaaggaagtgaggagaaagaaaatggcaatgaaaaccgaactttgctactgcggctgctgctaccaccgcactgtgcgttttgcccaatgaattggccgtgggtaatttgtgatgggcgggagggaatgaaaactgaggtaaaagttgcttaaaaagcattaggaattgtcttactcagtttttttcgacgaagaaatgtgccgagaaaaggggcattgctttaactaataaatcatttgctttgttttttgtttggtttatgtggtaacgaattgcgtgtgaataaaaggctaaaaaggggggggggggcaaacactccgcccaattccgaagaatggccgcggctgatcgtcgttcatatttatgcaaatgcccaaaacaccgacaaaaggattaacgggtccaaattggttttcctattttaataacgacgaattcatttccaatggacaagccaaaatatgcagtgaataaattaacataataaatgaattaagggaaaggcaaatcaatggaattaactaatgagagaccgaaattgcaaaaggacaaagcaatgaaaagacacgcccaattaaggaaagtttatttgtgtttgatcagaatttgccattgaattgacggaggaaaaggacagagagagagagagagacatgagaagggaatggaaatgcaattaagcgacgggaattgccgggggcattgggctgggcacggcataagcaatccttcgggcgatgccccccccacttctccctctttcatcaagtgtttgctttgtgtgccgtattcacccctcccccgcagtattacacggcactaaggcagtcaaatctcatgtgttaacaagagggccaaaaatggaaagaacaaactgcttaggcactcatatcaaataattttagagctaataattgctcgagtatataaaacattcaaacataagtaagatggcaaaaaagaaatgagactgaagcttaagttgattattatgtttttgataattaaccaaaaaacagaattagacatccaacattttatttgagactaaccggacagaaatgttacgacaataacagactctattattatagaccgtcaaacaaccattgcc

SEQ ID NO: 15538 - DNA, 1277 bp, Heterodera glycines
  unsure (1)..(1277): unsure at all n locations
ccgttgagagttggcncagtcttcgtagcagtcgaatcaatcaccttaacaaaccaattgacatacagtaacaaaccacatcgctattatacaattcacttacatggcattgcaagcaccgttgcttgaaaatcttctttcctctctcgtaatcgccttccggaattgcctctggcatatttgaccttcgaaagattgatgaagcgtgtataccctgtttcaagttggttaagctgattgaaaaaacaatacgctattaaaaaagctgtcgccgtggtttgtgaaaccgaatataaacattttcaaagaaaacccgggtaacacaacaactttaatcaacaaatcggaaatacaagtcgtctcatttctttctctacacaaaatgagttctcggacgctgtgtcgtgaaaggagtcatctaaatgagaaataaaagtaaaaaataggtgtaatggcattggctaacattgcgtcgcttggaattcacacggtgaggaagcggaaatttgatcttggagttctgaaattgcttcaccccggcacgcttgcagtccgccacactgatggtttgcactttgatgatctgaatgcgatccgcttgagcgcggtgacgagcgcccatgtcgcgatagcactgcgtaacagcacccgcttcacaaacatcgcgatactcgcggtacatgttgtggtgtccagtacgagaatcgtagcggagccaaatgccaaagttcttcacggagccaggctttttctcgaagaccttaattttcgcatttggtttatgttaaacgtaagtgattgcgcggatcaatcattacaacattttcagttatttttaaatatttttcagtcttaaaacggacgacgcccaactcgttttggacgctctctttttttacaattacatcgagaagttagatatctcatacacattaacaagttaaaacaaaaacgaattgacaaacgaattgagtttttatcccttttccttcatacctcttgacatgaaataatttctccgtgtgtttttttaacacgacgcaacatgctagtgaagtaccagaagcgggacttagcaacgacgtggttgctggcaaaaataaccatttcatgcagtgtcggatttgagtcatttgcagttgggagtttacgtccaacaacgatgtactttcttaactgaaaagacaggatttccacaaagaccaaattttaaaaattacagtttctccggatgctttgattggcattgtttaaaacttggctaaattagaaaattg

SEQ ID NO: 15539 - DNA, 2396 bp, Heterodera glycines
  unsure (1)..(2396): unsure at all n locations
ttttctggccatttcgcgcagcacgccatatctttgtttaaaacgaatatatttttctagcatcttgcaggctattagagaacacttagacctanttttgcggcgccacaaatgtcttcgcggccaaaaaagggccccccccccccacaaaatgtggtagaaaaaaatcaaaaacatgcaaaaagtgctatgaaattgagttggactctctgatccgaatttttccggatttagtaatatgtactcaccgatgcacgttcaaatgaacgaaatcattgaatgttactcgtttagcttggattagtacttattggcacctacctatgtactcgaaatcgaccctcatgcaagaaaatttaaaatttgccgattttcaagattaactacatattttcgaaatttttcgtctctaatatcgcaattataacttttttttctttgttgaccaaatccaataaagttggtatcattcgaaagctcttaacaagctctatcggcttcccaaaaaacataaagatttaccgacatgtaaaaaagttataaattaaaatatgcaaattctgactttttttggttttattgttgcaacttttttatacataagttgttcaatcgcttagaaataccttaccaaaagcttctaaacatgtagaacttttgaatgatgccaaatttgaccaacaaagaaaaaatttgtgatattttatgcttgggtcagacgcaactgacccctactggggggaaacaccttaactactttatttccaaattcactagacaatcgttccattgaaataataaattgttcaacaaaaataaccaataaaataattgtgtatacatattatacactggtggaaaaaagtctttgaacaaaaatgcaatttttgtaaattggtttataaattgaaataaatgaaaaatcatggcggaaaaaagtctttgaacacatttaaaaaactatttcaaaaggctcttaaaaatctgaaataattcctgctaagacgcatttttattcggagtaaaaacgaaaaggacgaaggtgtctaaaaaagaaaagaccattgtttttacgggaaccggccattttggcgcaagactctatatcattttgatttcacagcaaaattaaataatcttggtatttttgcaggctaataaagaacatttagacctattgattaatatcaacattattttatttggtcgaattaaaaaaagttatgaatctttaaacttgtctgcgccaaaatgaccccgacccgttttttacaccactgcccagtcccagtattttatttattatataaatgcgaattttggatgaatttctgtttttgcgttctttttgctctctcatttttcccaactctctctttttaagttacataacaacagagttttgcattgccttttgtgacacaccaatcaattggaaaaacggcaaattgagccacaaaaatgaatcgacggtaagaaaggaatttaaaaaattgcaaattttcatttttccctatttcccatgtttcagttggatttgtgcggatgtttggatggacattctcccatcttttaatcgtccccaactcggactcaaaatggcattgctttccgaccgtttcgatgttttggtggacaaacatttcgatggaaaaagcgaattgccaatttggagttacatcataattttcaaggaccaagaatttggaccaaaaccaatgctatttgttgtttcgaaatatgtaatctcattgccggatcatccgttgccaaacaaaatccgctttaaggaccttcggattgagtaatttaaaaaattatacagaaaccaattaatgtggttggtcattttttcccttttcaggtacattgaccattctgtgctcgcatttatccgttccaacaaacaaatttgggacagaatgggcaccaaatttgagttgaaagtgtattcatacgaaacggatcaaatttgggatgttttggcccgagaaatttggccaatttttgcgccaaacattcgccattttggctttcactgtggcgatcatttggacaatttgcttcgtttggtttcaccgacacttctcactgattgcgaccaattgaattcaatcgattccggttatctgtcttccagtgcgatcgctgttgatgggccaaatgcaatttctgcttggcaggcgttggccaaatggttacacacgccgacaaaaaatggacaaccgaaggaattgcgttgcgatgatttttcaaagtccatcaactatttcaaggaggtgaccgaccataatttcattaaactactaattaattgattgccttttgttttgtttaggcatttctccatgccaccacttctgtcagttacaaaattcgatttaatttatttttgg

SEQ ID NO: 15540 - DNA, 1880 bp, Heterodera glycines
agtttagcttagaactgatgcttctaggatattttttctaaaattttcattatattttttccccatttttaatatttttttagataaggctggagaaaacatgaaaaccgaaccaaaatttggtattaaaggaattgtagtctagaaaacgaaaaaaagttagttgtttgataaaatttcaatttattttcaatgggtcaagcccagtgtcagacaaaattgctcataacgccaaatatttaaattggcgtaaatttttgcgtgtttacaccggaacccgtcagttcggccccaacacgtttcgcccccagcgggatttcgcttataacttttttctttgtcatccaaatccaacattgttggtatcattcgaaagcccttcagatgctctattagcctgcaaatttccaaaaaaattcgtcaattttgaacaaatttatggccaaaaaagttggaaaatctggttttttgagttcttcaggccataatttttttgaacctttacaaaatttttcaagattttgcaggctagtagaggacacttaggggtctcgaatgataccaacaatgttggaccgaacaaatttggtatttaaaaaaagtttttggaagggagaatctttttctaagcaattctatatataattttcgtaatgtatgtcacaagaggagagagagagaaagagaagaggagagagagagagagagaaaagaggagagagagagagagaaagaggagagggagaaagaaagagaggaggagagagagagaaaggaggagggagtgaagaggagagagatagaaagaggagagagagagagaaagaaaagaggagggagagaagaggagagagatagaaaagagcgtggtgagtcgaagtgcaaaaagtccgagtgtggcgaagtgcaaaaagtccgagtgtggcgaagtgcaaaaagtccgagtgtggcgaagtgcaaaaagtccgagtgtgggcgaagtgcaaaaagtccgaatgagtgatgatcagaagaggcgggtcatttcagtaccgaagatttattctaatgattaattattatttaaatttataattgaatgataagctaataataaaaaatatatttggctctatttcagtttacaagaccacaaaaaaagacacgatcatgttatattttgataaatttcatgcaccataactttttctagaagcacccaaattaaaccttgctaccatttgatagccctaagaatcttctattttcctgtgaaattcaaaaaatttcgttgagtttcaaagaagttgtggtcaaaaaggtttaccaaatcaatttttgtaatttacaagccacaactttttttgaaacacaaccaaatttattgaaattttaaaggcaaatagaggacactcagggctatcaaaagatgccaagattgtttaatttggatgcttctagaaaaagttatggcgctgatcaaaaattgatcatttttatggtgatcaaatattcaaccaagtatatctttttatgtaaaagccgtagccccattattcaaaagtcaaatcagtagagaattttgtgctcttttcagtgggcttgcccattttttctagaaaagatttcccaaccccctagggatttcgaaaatttccccgattttcagtgtattttgggtgtcccggtcactaggaaggaatgatctgatcaagttggtgtaagagacttttttgatcagcaccaaaagttgtgcgagcatgaattatttcaagtttttaaatgaactataagatagtttttcaggtttgagtcaagacttttttggggcactgtatttctctcgcaaaaatgtaatttgtttgggaaatattaaatataaagctaaattataattaggg

SEQ ID NO: 15541 - DNA, 1201 bp, Heterodera glycines
ttgtagtattttatttttccagaatatcttttcagacccgagttatgaattttttctgaaaatttcgatttttccagaatttctggaataacttttttcatattgatgttagaaaacataaataaatcccataaaattctcctgatttttctctatttttaaagctttatttgctcaaaattggtcaacccttaggctagatatgaatttttcaatattcgcccaaaatcccgagggccaaaaaattgccaaaaaataaagaatttttaaaaaattccaaaaattatgaaacttaaaatagacatcatattcgtactcagcaccttattttaccccagaaaaatatttttcacccccattttcgtcagaaaaaaaatttccgaaaatttctagggggcctagctcgaaaatttttgaaattttccggccatataatacactattcgatagcattttaaaagctctacaattttgctctaaggcaatttttcgctaaaaccaacccctgacgagttatgggcccgggactcaaatgtcccgcttaggccaaaaattttttctatttccggaaaaaaatcgaaattttttcaaaaaaaataccattcgatagagctcgaaaaactatgttttggaagtggtcttcgttttcccgggaaaattcgttaaaaattcttaaaattcaaaaacccaaaaaccgttttttaggcctagctcgaaaaattttgaaaattttcgaaattttaaaacttggttggatagcctttcaaatactacacatttttgctcagaaacaatttttcgttcaaagcaacccctggcgagttattcgcctggtactgaagtgtacacttttgggtaaaaaaaattagccaaggctacagccttgggcgcccaacgtagggcttaggttttgctggcaaagttgtcggggatagtctgacttaaaatcctaccagcaagagctaagcgatcccggtccaaagaaaaaatttcgtagaagaaaaactgcaagaaaaagtgagaaatccgtccctgggactcagtcgtccgcgctaaatttttttctatagttttcccagatgcgcctcaaaaagttgtaagacccttccactactttcagggcgctcccggccttcggccgggagaaaatggttttagcaacgaaactccttgtcaatataacatatatagtaattaaaat

SEQ ID NO: 15542 - DNA, 2718 bp, Heterodera glycines
  unsure (1)..(2718): unsure at all n locations
tcaccaaaataattgaacgcgctggaaagtatttgcctgagttgtgtcntggaagaaatcaaatggcataaaattctcaaccaattgacaaaaatgccaaatttgcagcatatttcattgtgtggcaaaggggatgttatgctggaacttcaacacatcataagcattgctcaatgttttccaaatttgttgtcgttgaacctttggaagtgtttgaaggtgggactgaataaaagaaaataaaattgaattcgccttcaattagcaaagaattttcggcaattctttgaatttaataaacttatttttgtaatattccaacaaaagttttttaattccaaaacttttcagttcgaaaatggcttaaatccttcacagaattcgtcacatgccctttccgaactcctctcaaagtgtgctgcaatcgaatacttgtcactttgtcgtgccacgaacattggcacaattctttttgagccgacgcttttgccctcaaaattggcatttcttgaaacggacgacacttttgaccttcaagcgatgttcaaagttgctaataaaattgaattgttcaattaatgctgttcattttcgcagattgccaatgaacagtgccgtaacattcgctgtctttcactgcaaattttgaagccaacaattccgtcgttggattttgttcacgaagacacattgaaaaggtgcatttggatatctcttaatttacattatttttttatccataatttgattttcacgtttttgctaacatgggatttttttttttgtatccgatttcttttttttcagacttgttcacctcgagcttgactttcataagacaccgcaagcaccttttttcgagaattttgtcaaaacatccttgggttttcttgctaatctgagaatattacgacttgctaaagtcacgggtgaggtaatgaataattaattgtttgggttttataattactattaaatttctgttccgtccacaggctttgctggcggtgattgaccgttgtccaaatcttcaagacctcggatattccgcttataatattgacattttggctgcctttttgtctctttcgcgactgaaaaatttgcgctttttggtcattcgccattatggcaaagttcttcagcaaatttctactcaaaaatgtgttaaatgttccgagaattgcgatgagacatttgttggccgttcgcttaaacaaattgcgcaaaatgagaaattggaggtggaaatattcactcacaatacactaatgagcaattcatttgacatcattaaaaataatttggaataatttcagttcctttctttgaactttcccatttctgttggtttaatgtgcaaattggtgagagagtgcaaggcaagtttttcttcacaaatgttttattttttattaagtgtccattctcaatccgaaattctgggtcttttttttgtttaaacggctctcggacaattcatcataatcgaccaaagcgacaaagaatcttttccataaaaaacaccaccggctctaatgttccgcaaaaaatttttgtcaagtgcacagaattttcagcggagcttcggcaccctcccaaaattaaatcatttcagaaaattaataccaattcgaatctacgcttagaattcatatcctgaatttttctagattaaacatcaaaaatgtttaaattttaagttctataatagaaacgattctttgtattttgttatgtttgctttttggccactcttcaaaatccccatttctttttcagtgtttgaattctttgttctgtccaattgtgcgttaccaaccgttggcttcgctttgccaatgtttgaccgaattgaaccagcagatgaacagcagcagcgaaagagtggacgacgttcagcagcgaaagcgcacattgaatatcagcgtcaactttcaaaaatcccgcacaatgtcccacccgttcatccgttttttgcacacgccagactttggaagcgatgtcgtccgacaaaactttgaacaactgtttaccaaaatgccgtaagttatttttagttggctggtattttatttatttttttacatttctgcattttaatcgacaatttgcatactgttttaagttgcgtttattccatacacattcattcgggatcccgtcggggttttcccgggaacctgatcatgagcctgatttgtttttgtaaatcgggacgtgatcccggtaaagccgggatttgagttccggtaatcctatcctggcctgattcccagtccagaatcccaatttttaaaagtccgggctctaatttgttcggataataaactgctgaatgcttacaactttttcaggagttttctttgcgaacagccggaaacaattgacgattattatgatgaggatgaggatgaggaggaaatggaacaaaatgactgatcccagctttacctcttaactttattcaattttttttctttttgtttttgtttgttgacttttcaatctgcattcctcgctttaataggtatgttatttttgtgtgtttccctcattttcaataaatagcttcctcggcttaatgaatgaattttcagctgaaaagtatagtaaacgccacaaaaaaactgctaatacagaagtcaaacgagcaatttggggcaggaatgcctttcttgtacggtggtaatcgaccaattttggaacggaacatac

SEQ ID NO: 15543 - DNA, 5176 bp, Heterodera glycines
tgttcctacccgtccgtcgtagtttctgatcagcactcgttcaccaattgtgatttgctgtggccttgcctttctgtcatattgttccttcatttttcgctgggcttttgcatattcatcagctgcagcgtgccacgcgtgtcttatggcaacgaccagcttctgtttaaattcattacggtccgaaatcgctatcggatcacgaactttcggatcaatgatctgatcaacacagaaaattgggtcacgcccaaacataagaaaaaatggagtctcacccgttgaagcatgcactgacgtgttgtagcaaaaattggcagcatccaaaaattcatcgaagtcgggctgagtcttcgaaatgtatttggccaagatgttgtgaaatgtccgaaaagtgcgttcagttgacgcattgccttgactccaatgaggacaggcatactttttgtcaatgtaaagcatggagcaaaattccttaaaaaattcggaagtaaaggcagaggcattatcggtgatcaattcaacacaaccgccgtattttaagtaacaattggtgagaaaagcgtgggcaattgtttgtgcttttgtgtcggggaccgggacggaaatcacgtatttggtgaaccaacaaacgatatttaaaatgtgtttgttccctttttgggtgactggaaaggggccggccaagtccagcccaactttggcaaaaagtgtgttggctggcactatgagcatctcttcccggtacgcgggtgttggattgtgtctcaattggcaggtgacacacaatttgacccaagttaaaacgtcagagtacattttgggccaaaaatattttttacatttggcaatcgttttcctgtaattcaaatgaccaccacccaaaagagacgagtgaaatgattcaaaaatgagtccacgtaacgaaattgggacataaattcttgggggggaacccttgtcctcaaaataaagaattcccgaaattaatttgtaattggcagtgcctacagcaaataattctttttctttctcatccaaatcagctggaaattccccatccctgacaaacgaaatgtaggccgcggcttcaggatcagctgcttgttcttccaacaaattaacttcgtaagtgtttccatcctcgtgtcggatggtcaaagtatgcaaaaatgggtccgcgaccaccctggaatgtgctgccaaagcgagacagaccggaaattcgataatgtcctcgagttcatccacattgtatatttccgacaagggcttgtcctcagcggcacgagaaagtgcatcagccaaagtgttggcttttcctgccacgtggacaattttgacctgataattttgtaattcaatgagccatcgtgccaattgctgattggtttcagatttttttagcaaaaacgcgaggggtttgtgatctgtgtgaagttcaatgtccgacatgaaaatgaacggtctaaattcccttaaagcataaataatggcactcatttcaacttgaactgctggccacttcctttcagcagcagagagggttctgctgcaataggaaatggcagaaaatgtgcccgtcacgtcatccttttgcattaaaactcctccctgtccagtcgatgaggcgtcagtgaaaatgtgaaatgctttgtcgtaatctggaaaaattaaactcggggcttgcgtaagtaattcttttatcttgtcgaaagcgttttgctgttccctgccccattcgaatttattgccttgcctcgtaagcttcagcaatggctctacgaccattgcaaagttctcaatgtgccgtctgtaaaagcctgcctgtcctagcactctctttacttccttaacatttaaaggcacaggcatttctttgagaatttcgattcgacttaagcttggcttaaaaccttcagctgttaaaacaaatccaagaaaattcatctcatttgaggcaaaaatgcatttcttcgggctaagtttcagattataaagccgaaaacgctccaaaactttccttaccgccgttaggtgttctgaaaagttcggactttttgtgaaaatgagcacatcatcaacgtaggccaatgaagtatcctccaatccagacaaaacgatagccatggccctcgaaaatgctgcagttgcatttttcagcccaaatggcatcgtaatcatttggtacactttgtcttcagttataattccacattttcttgacgtttcttcactcaatttaatttgaaaatagccactggccaagtctagagagctgtaaaattggcaatttccaaccctttccatgatgctatcaaggcgtgggagagggtacttgtcgggcaccgtaacttcgttaagtttgcgaaagtctaaacaaggacgaattccaccgtccttcttctgtacaatgacaattggagttacccatggggtgtcagactcaaccatgactcctgcttctaaaagctgattaatgtgcttcttcaattcctctttgtatttgtacggcattcgtcttggcgcagatgctattggttcctcagttgtggttgtgatgtgatgttcagcggctgtgaaaagtccaagatcgtacctgaatttgctaaaaacatctgaaaattcttcgattaatgccttcagcttttccaaatctttgtctttgaccatggccctagaaaagtcgactacaaatgttgggtcaatttccattttctttcgttcagaatttaacgtaagaatttcttttgtgctattttccttcaaaaatccatttcggtcacataacaattcattggcaaatgccaaatgtgttcctttccaaatccatttcggttccatggtagggtttaccactgccactttaatttgtttctggcccgcaggcgagacactattaatgactgtcaatcccttcttaataagacttatgtcaggtcgatcaatgcaaaatgaattttttgggtttggggatgattcgattgaagcatcgaccaatatttgggagtcggccggaatgagtgtgtttttctctgccgacacgcgcaaatcgttcagtaaaagaattgaacgatagcacaatttggattcgttgtccccaacaaaaaatttcccgtttaaatgatcgaattttattgggggcaatttttcaaagacatcccaaccaacaattacactgtagtcccgggccacagtaaattcggaatcatccacaaaataaattaatgaacggactgtgtacccagcaatgttcaaattcacctgagcatattccttgaggcgaatgacatggcctgaggcactcattgcctccagatcagatgaaaatgttcgacaattgagttcatccgcaactgatcgtggtgcaacagtcaaactggcgccagtgtccattaagcagcggacgggtgtggaattaatcaatgtctgcaccacggcgtgatgcggcgaaatcgcattcagatttgggagcattggaaggtctgaattccgttttgagcagagcagtactgaaatagtgataaaaatcagaaatggaatgataagcagataaatcattgatggagaagtgaattgaattgaaatttggttattcacatcgggatttgcaaaagcattgggaagaaaaattactaaaagtccaatgagtacttttggcgcccgaaaactgaagcgagtcctttttaccggtctctttcgttttcctgcgattttgtgtgcctgggtttgggcgggttcaatgagcttaacgggactgagctcaatttcgttaccaaattctacagatgcattcagatccatcatgttgaggtgtgctggagatttcacaattttctgcgttttgtttccaccaaaagtcatgcgtcgtgtttttcctctgccaacgtattcatctttaatcattaatccaaaccggatcaaaaagtctgcaaaaacaataattatcatcatggacatgacaatttttccaatttgttcccaattcccaaacattttgttgcgaatggactcactcacctgctcccattgttcagacaaagtctttgtgactatagcgtcctcacttttgatttggaatgtgagttcgctttctcttgccaaattggcgtcgtaaaattggccaataaagtcagacacattcactagggcaaggtgaagaaaggaatggcgagcataagttggtgccaatgacagattaaggctgaaaccgtcaatgcgattggcattcacctgtttgacctgagcatcgatttgatcaacttcataaagagaaccacgcacaaaaatgagctgtttgcggtattctgagcatggtgccagtctcgcgtcggagctcaaaatcattgtccttgggtcaataaatgccattcttttgttgtccttcactcggaatttaattggaattttgtcaaagcattcgaattcggagtccgctgagttcccaattttggcaaattcgtagtcatgtgcttgcaattcgatgcatggccacactttaatcaattcgggcccggccacctttgccaccagtttaccagattggaataattttctggcaaaagttgttggatctgagagaagtgccgtcgctgcccatcttctcgtctccaacatataatcacaaatcgatttaattgtctgagaaaaggaaagagtcagcatttctcttacttgttcatccaaatagcccaatttggagttcatttccgattcggtgacccaactttcaagtgatctcgtctttctgcttctctttgaggattcgttgctatcgtcggaaggcaagtcttgtacagcaaatccttcctccgattttatcaaattcagaccacatgagttgactttctttgtgttgttcaaaaatgtcaaacgaaaactgacttcatcagaaatccaaatattgtcaagttgtagtcctttccatgtgccaattttcgaaaattcacaggcccgggtagtgttggtgtcccacataagcaatgtcttgtcttccatttcacattggcctgccttgaattggcaattgttcactgacccaaggggacttagcataattgtgctaccatgttgtgacatgattttagtcataaaaagataacaatattcagttgagacagtcgaccaactaaatgagacagttaaccacattcggggtgacaaatccaatttctta

SEQ ID NO: 15544 - DNA, 1267 bp, Heterodera glycines
ttccagtacgggtttgtccgtgaaaatttgaaaaatattccaaaatccctatttcttttttctatccttgtggactgagtcggcccttgaaattatatatcagggaacccaacactttcttggaattttccagtacgggtttgtccgtgaaaatttgaaaaatatttccaaaatccctatttcttttttctatccttgtggactgagtcggcccttgaaattatatatcagggaacccaatactttcttggaattttccagtacgggtttgtccgtgaaaatttgaaaaatatttccaaaatccctatttcttttttctatccttgtggactgagtcggcccttgaaattatatatcagggaacccaatacttccttggaattttccagtacgggtttgtccgtgaaaatttgaaaaatatttccaaaaatcccattttcttttttctatccttgtggactgattcggcccttgaaattatatagcagtgaacccaatacttccttggaattttccagtacgggtttgtccgtgaaaatttgaaaaatatttccaaaatccctatttcttttttctatccttgtggactgagtcggcccttgaaattatatatcagggaacccaatacttccttggaattttccagtacgggtttgtccgtgaaaatttgaaaaatatttccaaaaatcccaatttcttttttctatccttgtggactgagtcggcccttgaaattatatatcagtgaacccaatactttcttggaattttccagtacgggtttgtccgtgaaaatttgaaaaatatttccaaaatccctatttcttttttcgatccttgtggactgagtcggcccttgaaattatatagcagtgaacccaatacttccttggagttttccagaacgggtttgtccgggaaaatttgaaaaatatttccaaaaatcccaattatttttttcgatccttgtagactgagtcgacccttgaaattatatatcagagaacccaatactttcttggaattttccagtacgggtttgtccgtgaaaatttgaaaaatatttccaaaaatccctatttcttttttctatccttgtggactgagtcggcccttgaaattatatatcagggaacccaatactttcttggaattttcagtatgggtttgtccgtgaaaatttgaaaaatattttcaaaaatccaaatctcttttttcgatccttgtggactgagtcggcccttgaaaatatatagcagtgaaccca

SEQ ID NO: 15545 - DNA, 3950 bp, Heterodera glycines
  unsure (1)..(3950): unsure at all n locations
cgcttccccctcctccacccctcggggtggggggggggatgaaacggtccaacaaacgctattcgcccgcaggggcacattggcggaacggtcgcgccccattcaacacggcaaacactcgacaaaacagcgcgcggttgccggcactgttggttgttgttgttttgtcggacggtggggagggtatgtatggaaaaaaagaagtgccataacggcgcgcggcagcaacggggacaccaaaccaaaaaatttccttggatttggcgcgcaatttttgaattgttatgtatccagggatagaattccgaggctcgtaaaattttggaccggaatttctaagtcgaaaaagatcgtaaaccggaactaaaaccggttaatccctaagaaattcaaacattttgcacaaatggcagacaacaatttattgtaatatgtgtaaaatagtaaaatgttgtatatattgtagaacaatttaacaaaaacacaaaacaggaggatgacgataattttcaatcaaacactggatggaaattgtgatctgtgtggagcaaaaatggatgaaaatttgttgcgcgcgggcgtaattatcaaaagaatttggaccatttgaaaccagcgccccctttgtcttcgccgccgccaccattagtgcccttcttttttgtgcctgctgctggcatttcttccggctcttccgcttggtcatttgctgctgcgcctcctcctttgccgccaccactgtccaacccgtccacggtgccgcgccgtcccgcttccaacttggcaaactccagcatcagtgtacgttgacgagccgttagatgcctgtggtgttaaggaacatgaggcgccgcaaaaatcagttgacaacggacgatcaaatcaaaccattccatttttataggatggagagtggataggaaggggcatcttttagctggtggtcccgaattttcagccccaggggtcaatgaaaaatagtgaggaaatcaaatatgtccaaatcatcatcaagagccactccaaatttacgcaaaaaaaaaaaaaactcacttcggcacattcactttgatgttgagtatttggtcaccatagcccggctgctccaggcgtttaattcctttgcccttgagcaccatttgcgcatgggaagacgtgccggccggtatgtgcacccgtgttttgccatcgttgttggtggatatgcttggcacgtcaattgtgccgccaagcgttgcctgcacaatgagagaaagtttacacatcataaaaaacgagcaagtgctccccccactaggacttaacttgcaagggaacaacccgaactgtaactccgaaagtttaaaacagggaatggggtcttaagcgtacaaattaccaattttgtgggtacatatttgatttcttgataggagcaatggaaatcgactatgatctctctcccccaccctcctttaccatttgcatgaaaattcgaatacctgtgccaaactaatctccacttcagtgaaaatgtgctccttctcacgccggtgctgagatgaaggtgccacattgaccaccacatacacagttgactgtatgaaacgaaaagttaaaagagaaaaaaatttcccggcatttttgcaaaattgttcgacatttccaccaccccccccccccgaaaaaaacgaactgactcgtgagacttgggtgcgcagcacttggccattgtcaatgccggccggaatgtccaaatggaagttcttgttctgcacactttggccatgtccctcacattccaagcatggatttttgttgtaggcaccttggccaccgcaacgagagctaaaaagaaaaaataaatgcatgaaatgaaagggtatgagtataaagtcgtaaaaaagcgatggcaaaatgtctgacctttatgacaataaataaaaaccccaaatttaaatccgaaatttggacataagcgcaaaggcatggacacgatagaaacatagacaaaacgaaccaagttgtctgtacgaagtagccttgagtgtgctgtgtgatcatacccgtcccattgcagtacggacaagacacctgaacagaatacaaacataaaaaagttttattgaaaagttggcgagataacaaaaccttcttaaaccctggctgaacaccgctgccgttgcatttccaacaggaatccactaaaaaatatcatggttaatattaaaaaaagagagatttatttctgctaattgtgacaccgaccgacggcacattaatttccttaaaacggtgacacaaaaaaatcggtaaagggtgtttgtaagtttacaaaaaaaaatcgtagttttttttgtgggggggggggggtgagtgggaaaacaagctgttgccgttaaacaatgataaacaacaaaacacagtaccaacgttgatgcgcacttccttgcgaacaccgcgtgctgcctcctcgaaggtgacgttgaccaccacttcctgtgctgcgtcaaaaccgtgctgcgtttcgccaaaggaacggcggccggagccaaacgcgccggcattgccgaacgggtcgaagtcgcggaaaatgtcacggaacctgtatagaaaataaaatttagccaaaaaaccaaaattttcggctttttggccaacttttgtaaatatagcaacaaaaaaatttttgtttttgctaatatttatataatgtattcattttcttaaaattttgcttttataatttatattatacaataatataatggtatcactcacacttgctccgccgatttgcccgagtggaactcccagccaaagtcgcgggcactttgtggacctccggggctgccagaggccgcgccgggctgcggaccgccggccccaaaacggtcatattcagcgcgtcgtttcgggtccccaagaacctgaatttctcaagtcatttttgttgattttttttcaacttcaatgccaaacatttttcaattaacctagcattttttttgttgtttattttaccaccgactcccaaaaaaactaaggatttcgatgccatttatcattgtattccaaaatgattacctcatacgcttcagagagttcctggaatttttcactggcgcccttcgctttgttgacgtcagggtggtatttttttgccatctaaaattcttttgtttttatgttgaccaaagccattcatggagtcgaaaaatgcatacctcgtaatatgcttttttgatatccgactccttggccgtcttggataggcccaatattttgtagtaatccttgggcaaaaatgtgctgaaatgaaacgacctccgtggaaaaaggcagacataacggagcattttacgaactaaaagctaaattatgtatggaaatttatcagtgtatcgtttcagtaatcgagataattattatataaatataaaatgtagaatgaaaaccaataaaattgtacgaagcattggtatgaagaaactttaaaagcgttaaaattttgcaattcctttggatgattgatctgatcatacatgtgcaacgggattggacgtagcttggtttcaattacggaaatcctaaactaccacccgtaatgaaaaaaattgtatcaaatttatatggatgcattttccgacttacagtttgggtggttcccttgtgagacaccccttgcacatgtgtatgtaatatatatatatgtatatatgattgacaataaaaaaaagtgcaaatgtgaaatgagatgatcaaattaaaaacaaaattgtcgatgggtcgtccattccgttcacatggcgtcaaagtgaaagcgatgcgtctgtgcttgtcgctcctttttgtcctgttgccgctcccggaaatgcaggaaggtgatcatcaccaacaacaggccacagcaggtggccatcacaaccataaaaaggnggggggggatagaaattagaattggtgataca

SEQ ID NO: 15546 - DNA, 1288 bp, Heterodera glycines
aaattctcaaaattacaaaaaaatatggtatcaaaatcgaaaaaaaataaataaaacataattaacaaaaataaaattgaaataaactgaaaaaaaaaatattaaaaaaaacaaagaaaaaaccaaaactattttaaatttttgttattttttttatcttttatgatatttctttatgggtttctgtcttttaagaaattttgcgtcaaaatcttaattaaaccgaaaatggcaaaaaatagacttccaaataaaaaaaacatgaaaaaaatctcgagattcctctgtaagaaaaattcaagccaacacataaattaattaaaatttcaattaaaatttcaaaaactattgtacaatgtgtgattgattataattgtaaactttttgtcttcaacaaaatttagtaataaataataaacaaacaaataaacagaacgagggcctcctccccccccccgaccacggccattcgccgacgggaaaaaaatttgagaaaatgggaggccgaggggggcgagggggaagaagacccaatgggggactgaagaaatgaaataaaaataaaacgtattttatagggagggggaggaaaaaacaatcaattgatgcgtgggatacaatacgtaaagcaaattgatttagaaaattcgagaaaatcatcggggaaattgaaatttcatagaagagagagagagagagcgcaagagagcgaatgttgtggatttgggctgggagatgagaggaaaagcaatcaatttccgtgttggctatttagaaaatgcgagaaaaatggggaaataaattgattaaataaaattacatgccaaaaaatgtgtcgagatttttgccattgtttgcgtgcccacgaaaccttggcgcgcctggcaaaatcccggtttccattaaaatatgacaaaactcaaaaaagcactgaaaatctaatggaaaatctgtcaaatttaatattttttatgaattttttgtcgaaagtccgaattttaatggattgacctcaagttggttttttttgaatgaatttttgtcgggtcgatttttcccctcaaaaataagggccatttttgtcaaaagaaaagtgattggtagtggtgatctggtgataagtaaccactaattctatttggcgaataaactgaagaagacaaaattaactgaaattttggaatattttaatgctttaaaacttgtccaacaatcacaaataattagtcaaaatttgaacctctcacaaaaaaaaaaaattaatttttcaaaaatggcaaaaaatgat

SEQ ID NO: 15547 - DNA, 2609 bp, Heterodera glycines
ttttgcaggctactagaggacagttagggactatccaatgataccaggattgttgcatttggttgccaatgaaaaaagttatagccaaaaatccgctggggcccaaacgtgccggggcccaactgagcgagtccgtccaaattaataataatttgaattcgatgggtctcgagtcacaaagagagaattctcctctcgagaaagcaaaatttggtctcacggaacactgaaaactcctacacatcctttccctatttttccagaaaatttttagagaaaaaaaactggagttcaattcatacgtgcgagagtctcgggttctctcgtcaactcatgaaatttctcggcaatttgtgtctcggcctcaagagaaatttttgcactgttatggatcaaaatttcattttgttaaaagtttttggaaatttctctcgggtttcttcgctagggtcaaggaatttctctctgctcgacgaattttttgtctaaataatttcggtgaaaaccgaggctcataaatatgaagggatggaccaataacaaaaaaacatcacatgcaaaatgcactttgattttgtgcactttctgctgagttttgttgttgtgtgcgcatgacgcaatgaattggatgaatgaagcgaatgaatggactttttgtgcaaatacaaaaaacaaaaaattgtgtggacggactcctgctgctgctggtgggatatgaaaagggaagaatttgggtatccaaagctcgagatccattaattttctgatcaacaacggtaggaccagcagaagcgaaaaacagtaaaatgaaacatttttggcaaattttttatttccacaaaatgaagcaataagtttcttttgtaaccaatagcactacagtaagtgttctcattagtctgtaaaattccaacaaaaaaacttatgaaccaaaagaagttaaaaacccggttttgggtttcgactatttttggctatatttttattgaaatttaacgaaattttttggggtttttctttggttgcttttgggcaaagttataagcaaattttgggtttttgtgttatattttttgggtttttttttttttacaatttcaatgtgaatttagatacatttaaattacaattccgaaaaattttttcattcattttttgatcggtgatgtgtgaatcttttaaaccccccaaaaaagtatgtaacttttgtgggttttatgtatttgttggaaagtgagtgcccaaatttgggagggaccaaagttcgtgtcacaactcagccatgaaaaatctcgttttattcattggcggaccaataaaataaaaaattgcctttattatttaacatgaacaaaaaggcattaaatggaggaaattagtttctaaatgcgatcaaccgacaataaaaatcatttccaaatttactgatggattaattcttaaaaatattttaatttaaaaaaaaattgttttttgaaaatcgcttttcaaaaatgaaaattaattccataatttcaatacataatattagcaaggggtcaacaattgcgctcttaatccttttttatactatgagaaactcagataaaacgatcaactaatattgatcactcgatttccattccaaaaatgattcccccaatctgatcaatcgatcggtaagcggctccaaattgattggtcccaccgatccttagaagaacagagaaattcattcttcaaccgaaacagaggcatcgttttcctcgtcaacaccaccagcggcatttccgctaaaattttgtgccgccgcgttttgcgacgattgcgcgccgtctccgccgctgctgctgtccacgcggaagcatggcagctggggcaaacggagttggggcgtttggccaatgcttggctaaataaatttaaaaaattgtcaaatccattaatctctctcccccacaatgccaaatccgccgcggaacggtgcctgcaccgcctgtgccatttgctgttggaattcctccgttgcgcgcgcaacctgcgcatgataattgcccatctgttgctcctccgccggtgtcatgcgtcgcgagtggcctttcccgtcactgatgatgccattctttgaatgcgtttaattatgtatggattatcgaattaattccaaacccctcaaggcacggaaaacagcctagcaaattttaagaaaatttggagaccaaaaacaggcaaaatgcaaaaaaaagatgaacaggacatccgatcactgaattcattcagtagtggtgctcaaaagtctcggtatggcccggcaaaagtctcgcattttttgaggggacgagggcattagcatcagtcgtttccgggaaatttctgatagactttatcacgagaactccaccaagctctgcagtatgatatgcacaatttttgtgccagcaacgaccttttttttttttgctattcaaaccacctttttttgcggcgtgttttttccaaaaaaactttgtggaaaggggtgggccggcggtgcgataggcatcgcagggaaaattttttaaaattttctatgggtttcgctacagaaattgctcaaattttaactatttcccccttcgttatgacccccc

SEQ ID NO: 15548 - DNA, 2021 bp, Heterodera glycines
  unsure (1)..(2021): unsure at all n locations
cttccatgttatttctcttttctnctgtcagtctcttttcacattattatttttttctttctttctcttccatcttatttctgttttcctatttctctgccctccctctgtctcttctgtttgcatttgggcgttcgtctgtgttttgaatacagtttgaatgggccaccgccaccgactggtgcaacaaatgtcggcgattgatttgcaaaatgtgctcggctcggatggttctccccgccgccggcgggggataggggcaaaatatgtaatcggctgattgacttttcttttatctttttcgctaattgcacagagcaattaacgcgatattttccatcaaaaagttgctcccatttttgggttttccctttgcacaaaaattttcaataatttgtaatctcaccaatgaaaaataattaattacatggagcaatttgtgactgaccctccaaatttcttacgccacaaaaaatcagaaatatctatataggtatgtatgtgtttggaaaaagttatttgtatgtgtcaaattttgcttaattcccggtcctccggggtactggtcccggtttttgaaaagcctaggtctcggtcccggacgaaaatcgaggtcctcaggtcccggtcccggttttgccaaaaaaaaaattccaggtcccgtgacaccctactagtttaaacttctgctacatacgtctattcaattgtatgttggccagttggaccttgaaattctcaaaaaagtgaaaaaaaataaaaattttgaccaaaaaggggtgaatttaatttaacatacaattaaatacatatatagtacctttttttttagcttttttatacaaattaattatgacagcaaattttttttttgtgaaatttatctgaacaaataataaaaatgtacacataaaatagtgtaattattctaattttggatccattttattcgctgtgctttccttcctttccctttttaattagtatatctaaatggttaacaaaaatagacaagccttccttcatttcaatggatacaaagatgcttatcgatgtggacaaacaattcaaacacaaagcgcttttaaagttggatgaatctttccgcaaatacaaacataaaactaaccgatttattttttgataaaatactatcattatttaaaaaaatatttgaattaattttcattcaattaagaaaagtctttgttaattaatttaatttaaaattaattattaaaaaatttttttaaaaatttgaattaatttgggctaataggtaaattaattttccctttttgcatgtttaggcttttaaaaaaaatatattaaatttctacgacaacataagccgttaaacttgggcaatttgacaaggcaacaaataaaatgacccaatgtaatgaattatgttcggaattgctccaaaatggaagtccaaataattacaacagcagcaacactaccaattgtgacaacgatgccgattcggcaaattcgctagcaacaggcacaaaattagtcgccgcggggcgaaatttttcaaataaaaaagtgcccgtgtcatccccaaaatgtgtgccgaccactgctgaaaatgtcatcaaacgaccgccacttttctacgattcgaaacggcgtcgggttgacaaattctaccaaaaacagagcagcttggtggaatactttgaacaagacagcaaacagattcaggttcagaaatggccaaaacctgtctcactattttacattggctgaataattaatgaattcggacctgaaagcagtgccaatctcataaaaatgagaaaaatatggcaaatgcataaaaacaaaggaattttttttaaactgtttggttttgcggtggccatagacacaatcggggaattttgaaagcgattaataattggacaaatttattaaaattctttatgtaatttgtagaaccacaaaattttgaaaaatcacggaccacacccgggcaggattcatgattaaaaaatactgtttcaatgact

SEQ ID NO: 15549 - DNA, 1995 bp, Heterodera glycines
ccctcccccacgtgaatagtgcccaaattgttttagtgcctattttttttttgtatgctttcacctttttctggtttaagcttgcgtaactgtgctgcacagcactgcccttctctcgcaatgtccgaggcttccagcacttcgtgcaatactgaatcggcacgtgcatcgcgtcgtctcacattactttctttgattgtcaatttgacactaacattggccaaagcattggcctcccatttgtccggttcgctgtccattatgtcttcattggtatgcaaagaaaaaaacgaatccatgtacttttgcagttggtggcacaaatctgtttttttttttttttgcgttttaattgccaaaatttctgtcagggtgtgatttatgtaattttcaaaaaaaaaaacatattttggaatgaatttttgttgtcgatgcttgattagttatcccgaaaaccccgtgaaaaagttttcacgacttaggacaaaaaaaaaaacaaaacaaaagtttcctttctttgggtttttttcgggggcccccaaaacagcaatagtgccaaaaaaaattttaaattctaggttagaaaatatgaaattacaaattttaatggttgattggatgcgttaagttgtagcaaaactaaatgctttgtgctaacaaaaaactacaagagtataaatgaaagtggtcaaaatttgaaaaaggtcccacaggtcgactcgattgtcgacattacatccggattggtcatttggcgtaccggcagagcgatcagaacaccggacccgtacctttacccggttggcagaacacggcttgaaccagcggccttggtaattatgttttttttttgcttcagtgaaatgaatttcggaggggagggggggggggggggtaattgattttttcttgaaaatttacgtaaattagcaattggacctgaattcgaacaaaaagtcaaaccaaaaaaattgtttaaatgattgatggctttttgtttgtctccacgtatttaagccgtttctaaacataaatggctaatttcgaaaatttgaattcgacttttgttcgaaatttttttttatttaatgaataaattttaatattacagttaaattttatttttttcgacatataatctacggcttatttaaaatttaattaaaaatttttttttttttttgaaaaggcataccatcaaatcttacctcctttccaatatattttttccataaaaatttttgtctcacataaaaatgaggtttcttttcagataatcgtcagtgtgatcatggcgttggcgagtcttcaaatgatcctcaaaagtttaaactcaattgtctacaatgacatcaatcccaaggtcgattggccaacaattgcgattatgatggccacagtgattgttaaactgatactgtttctcctctgcagaaggtactcaagtacaaagtattaattgggagcggctcatcccccaatgaaaacccgaagttttttttaaattttagcggaagttttacaaaaatttttgaaaaattggtgaagtataactcctttcattttttcctggatttcctcacattttttttcaattttcagggtaaaaaacagttcttcgctggtgttggcccaagaccatcgcaacgattgtctatccaattcaattgctttgctatgtgcttttggggcacaaaaattttggctttatttggacccaattggcgccattgttgtctcagtgtttgtttttcaatttttctcacagaccttgttaaacctttccctggaggcgtctgatgacaccgattttttttttttaatttgacaaaaccctaaaaaatggccatttttgaacagatttttttaataagtccgctaaaaaaattattatttttttgcgcggctgctatttactagtaaaaaaatatataaattacaaatttttattccactgttcagatacattgctgtcacatggtataatacaggcaa

SEQ ID NO: 15550 - DNA, 2536 bp, Heterodera glycines
  unsure (1)..(2536): unsure at all n locations
ccccccccccctccctcccctcaaattttgtggtcccatcgaatggaatgggacgccggaatgaatgggatgggcccgggggggggggctgttgtgctgctgctcttcttccccgcaccgctttccttttactcccctcccccccccccccccggggccttgctgctggtgggaaagcctcgctcccccttcccccgccccttttctgtccgtcaatttgagtgaacccaccccctattccaactctgcttcttctcaaactgcttctttacctgtctgtagggaaaagaatgtcgctatttcttttactcttttgctgtttccctccctttccaatcactcactgatcggtctgatcaattcccatttgctgaccaatgatgagactcactaccaaagggttgcgcattcaaatggcgccaatgcgacgcatccattgctaagggaatgaatgccggccaagttgaaaagtcaaagcagagatagaaaagaacaaagtccagattggaaaaatggccgtggcgataaatgataatggtgtagctaattactcaatcaaaaaatcggcgaagccttttgccggaaaggggggggggggggagaatcgcccgaatcggccgctgctgtcgaggcggattcccgtggtttttctgtctgtctgtcgatcgttcactcgtttctctttttctgctgtggccacaaaacaacatcagagccaattctctgctaataactttatttttacatttttttgattcatttaaaattaaaatttttgaaaattttctttatttttaagcacatcagaacttttcccctcccaatctttgctttttctcttccgttagcatcgtaaaccattcccattttccgcttaatacccttacccaagtcaataatttcaattgaaaaaagtaagtacaccaaccgccagcggcgccttttgcctcgggccaaatgattggggggaattagcggtgcaaaggccccgaggggtaattttgatgatgccaaaggacaacacccaccggaaaaggaaaagccaaaagccatttttggcatcttagaggcaagcaaagccactgggaaagctcattcgcgtcagcagttgtttttggcaaatttaattgccgggacaaaaaaataaacaaagcttcttcggggcacagtttttgctttgatcagtccgtcgccggaggcacaaaaagcggtggcggatgggcgatgctttttatgtgctaatcggcagcggaatgtgtggtgttcttctcacccattgtcagcaacgacattcgccgcccgcccatccgccgccaccgccgaatcatcggccgtcaaaccgtccgtccgccgtccgtcactttcaaacgccacgtttcgctatttattataaaaatcgatcaatcatcggcccatttgtcctcatttttcacccgttggccaaatgttttttttgtacaaaagtaaaagcgttttttttttgaaaatgtttccgaaggccaaacaattttgaagcgtcgcgcagtcctcaaattaaattttgataaaaaatttttttttaaattaattatttttatttaaatcattaaaaatggaattcttttcgttgagattgtgccaacggtgtctattgtttgtctctttgcattaattattgttttgttgccctccatttgcttgctaattgcctctcctccatccttcacttgcaaatgccaaattcgaccgtcaaaaatgtcgctttgatgaacggcacttcccccgccccctctgccgatcttccgcgtttcaatcatccaactccgtccgcttctttctccttccccaagggcagctttttctcctccgcttctgcttccgttgagtcgccaatgacggcaactaaaaatcatcggccaacagagccattggcaacggcatttttgggggccagcagcagcagcagcaacggcacaattgaacatgccgaaaacggtggcaatggccatcaaccgatgacagtcattctgacagtgcgaatgctaatgcagggaaaggtggacaatttgggcatattagatttgttggctagagcgataagtgggcacggataggctgatcaaggacagatcggcaagaatgctagaatgatcaattattgatcaataattcgaaggttgatcaatagtaatactatgagaaatttgctcagattatgcatggacataagaaaataattgaactcattaaactcacgggcggaaggaagggggaggagggggattaatccccaaaataaaaataattattaaataaaatgttatctaattaacctaccttttttgttagtaaaataattgcaggaagtcggcagtatcatcggcaaacgtggcgattatgtgagacaaattcgggagcaaagcggcgccaaagtgaacatttcggacggttcgtgcccggaaaggtgtgccgatggacaacaaattatattttactttttgctgaacccttttttaagagattgtgacccatttcgnggttcttcttcctcaattaa

SEQ ID NO: 15551 - DNA, 955 bp, Heterodera glycines
gtgtgccaaattcttctgaacgcaccggcaaaaggaccgaccatccaatacaaaccggcaagtaaaatttgttaataatttataattatttctttttgttttaaataattatttgaaatattttaattaattctaagttataattgaatttttttttgccctagcagaatattttaacataaccttttaattcgaaaattaatggaccaggatgaatcctaatataatatataataagtaagcctaggcgtatgccacgacacccaaaatgcatgtgggaacggaagcgacatttccgtaggtacgagatacgaactgactaaaagtacggtattcgactggatacggtcaccatcctacccagcagacataaaccatttgtctttcgagaccaaacattcgaagccaaagcttgctaatctgcgatacaatttacgcatgctctctcaggttaaccaagcgtacaatccactggccgtggccaattccgcggccgcaattgccgcagccgctgccgcagtgaccgcggcacatcaacagcacaagacgatgccctgcggcatcggcacaaccgccgtccccggcgcggggaccgccgccgcggcacaattgtccgcgcttctgtcccacgcgaatccgtcgctgctttccgtgcacgaggtgaacggatggaacagcaatttgatcagatttgcacaacaaatgttggcacaaccacagagatatgcccacaggggctaaagcatttatttactcgtcgtttttaggcatgaaaatggttataaatggcactaaaacccaagaagaagaaatatccattggcatgccattagttaatagtcgtgccgtgccgaatttgttggccaatttatttgctgaaaattttaaaatttttaatcccattgtttttgtcatcgtcaaatgctaaccacaaaattttttactcatttaaact

SEQ ID NO: 15552 - DNA, 915 bp, Heterodera glycines
tccctctgaagttgccgtatgatttgtgtcaatgccagcggaatgtaacttttcatcacacttttgcagatggcctcgtcctccggtggaattcgatcacacaaaagcttttccaatttcgctatcagtgacttttgaaccttcgcttttcccaattccatttccaatagttttgtaactgcgcgacagataatgcaacggcgtgtcgagagaacatggacagttttctatgggataaaagttaatatttcatttgatgacagcccatggcatttgttcggaagccatcggttcgggtaaattagaacccaaaggtaaattgaacagagcgcggcgcgttttccgaaaaaaattttggaacaaaggggcagcgacacggatgggaaaattttgttctgatttgttaactaacagattttcaccagaggctggtttttgactgacacgaatcgattggtatatcatttatgccattttttttccgggggtgttgactatagtatatccgttgcacgaattaatgcaatgaatcgtcccaatgagtgatcgatcagcaatttccattattattcgtttgtgtatcatttttattaatttttggaaacaaaaacgataaatcaaattgaaacatcgccaaaataagcatttaaagtaagtattctctgctgttagtgagagattgcactgttcggtcggacttctctctttctctgctcctttgatcgatcactcgccgcgcggggccaacaaatggcgactgaccttgcgggcctttgattgggccgtggggcgtcgggccgaactcggcgaggaaatgcccgcggggcaaagctccaaatcctggcagaactgaaatggcgttcaatttggaggcgttttcgccgaccgaataacctttttctggtccgaaagaat

SEQ ID NO: 15553 - DNA, 3858 bp, Heterodera glycines
  unsure (1)..(3858): unsure at all n locations
agtgccgacagaaggatcttcaactcggcaactttttccgggtcggtggcgacattgacaacgcgtttgatgatctgagaagggcatggaaaggcaatgtccgcttttggccttcccccaccaattggcactcgtcgcacgcgtcttcccaatggacagtctttggcgttttgttcagatttgagaacgcaaaagcagtggcggacagcagaacgagaaacacaaaagggcaaaagagcttcatttgcagaattattagctaaatacgatggaccgaccgattggcaaagaatgaaatgagaaaacaaaaacagtgggaaatggaaaaatgagaaaggacggaggaaaagagaacggagagaggagaaaggagcatccagaaggaggaggaggaggaggaggaggaggagggcatcgatttgcaatgagaagtgatgatgaaaagtgatgaccctttctctctctttctgttcgattcgccctatggcaatgatggccaaagggaggggggggggagataaacgacacgaagcggagaaagagcacgacgaaagataaagcgaatcgatggaccaaaaaacggaggggggggggaggaaaggggcgacaagcaaagcgatttttaatttatcatgtgatgatatgatactctatgaacttatgcaaaaaaaaagataatggacacacgaagaaaaattggatgacactgataaaatgataacttttcaatgagttaaacgaattgattagaattcggacattaagccattctccgctggccaacccatccaaaagcaccactttttgtcaaatggtgccaaagaaaaagcattccgtttatttatcgcatgttttgaaatggaccatttgcttgctgatcagtcaatccgatcactctttgatcgtttcttccttcctcccttcttcagaatctgaacatcgcgtgccctccgccggccgcgggcccttcggcgtttccgttggcattgccctggggggcgaacccggcctcgcgtttgccgtagtacgggtagtagtagccccacttaagggaaaagacatgtcacgcacagtgttcttcaaacagagcttttattttacctgtgccgtggcttgttcgacgagtaaagcgaccgtaagaaggacgaagaggagaacaaaactagacggggtatggtacttacaaagcagaagagatacggtaggggatcgaagtggaagagatacagtatgagacagaagcagaggatatgagatccggtagaaatagaagcagaaaagatacggtaggagtgagaagcaaaagggatatggtaggagatagaagtagaggatatgagatggtatgaaatagaagcaaaaaagttcggtaggagtgagaagcaaaagggatatggtaggagatagaagtagaggatatgagatacggtagaagataaaagcgtaaaagatacggtaggagtgagaagcaaaagggatatggtaggagatagaagtagagaatatgagatacggtagaagataaaagcataaaatatacggtaggagtgagaagcaaaagggatatggtaggagatagaagtagaagatatgagatacggtagaagataaaagcgtaaaatatacggtaggagtgagaagcaaaagggatatggtaggagatagaagtagaagatattgagatacggtagaagacaaaagcggaagagagaaaatgcggtaaacacaatattgaaaacagctgttggatgcacaaatgaccaaaaagcttacatttttgcggaggttgccatttttgacgagaatgaactgagaagtgagtgaatgagtggcgggagaaaaggcgaatgaatgagtggtgggtgagaaggcccattggcagtccttttatattcgccgtttttggcgcaatgtttgccattcgaaggccgcgcgactttctcggaatttcgcttcttttcagtgatccgtccgccgttcttttgacaccgccgattcttttgtcaatttgtggtaaataaaacgaaaactaaaagcacaacaaaagaaagtgaaacgataaacatttattttttgttgataaaaacggagaaatttgtgaaaatcgaaaagagaaaataaattgaggaaaacagtcaaagaatgccaactcacaacaatcaacgggaaaagtgatttgtttacgttagaaatttaaatgcacattctgtgacaattgaaagttgaaagtttaaaataaattgttaaattgggattaataaaatgcaacttttggaatgaccgacacaaaaatcacgggcaatttgtcaaattgggcaattgtcttagcgcacaaatgcccccacccccgtcgaatttcgtgttcggttttgtttctgtctttgctttgtccgaaaaatgttaaacccttcccaaatttgcgaatgtttgccatggtctgtcacttctcttcggttgcttttcgctgctttctttcccttcgctttcgcttctctcttttctctgccggtgtttcccctgggactgattttcgctttcttcgctttccccccccccctcccccctctttttttgcccctttcatttgccattccctccgccgtctttccgttttaccaaaaagggcacttcgttttgttatttcatttttattaaaatattttcactgtctgagattggctaattactcaaaatgccatcgaaactcatttttttcaccctccactcaatcgcatcaattgaataaaaatggaaaactttgaattatttttggagaaatcgcacactcaacgcgattattactcggccggagaagaaataaaagtgagaaaatggaaaggcaccaggaaaaaaaaagagagaaatattttggtaatgaaattttaaaattattggaaacttttgaattatttttggtaattgttttacacagcggcccaattttgggctccaagtacaattatgctggatttttcgtcttagtggtctgtgagttagtcaccaaaaggggggtcccaggttcaagtcctccctatgttgtgtgttaatttcaatttcttcttttaaagaaggcaaaattattttttcattaataaaagttttcgtgtcaataaaaaatcatattcgaaaagcgttggttacgtacaacatcgacaattttatgaatttttttagcttataacttggtgaatactagagcaaataaaaccattttatgctcattttgaagggaaaattctggagaatattgtaaatttatttggtttggccttaaattgtggacttggctaaaaaagaattaaaattattgaaatgtttgccctgggaaaaaattttttaattttgtataggcccatattttgtccccctctatcgaatcacagtttattttttagccgtctagtttttaactcgagatcggctcttctatttttacaagggaaaatccccaaaaaatttttaagttttgcaaagttttggcgttctgattactaaataaataataaacctatttgcactgagagcacaaaattgggccgctgtgtataatattcgatacattttggatcgaataaattgtaaaaaacaagtgatttgtagcaattttgcaaaatgtcccgnattttcggtcccaaaatctgattttttgggcccatgtcctggtcttgaaaatttttcgatagaaaccctgctttaaacggagattctgctgaaacacaaggaaaagtgaaacgaattttttccatatgtgttgtgcataatacttccactaacacattatttcaatttttgtttattcgtacacaaaataaagtgagttcgaacttcccacaacatgattgtttggttaccatcatc

SEQ ID NO: 15554 - DNA, 1747 bp, Heterodera glycines
ccatgtcccccgttgttgttctcctcccgctcctcctttattccgtcattattattattatcattttgatgaataatttgtttcgatcggccaaatttgttggccccaatttggggaccaccaccaccgcttttttggtacaacaaatcggcctcaaatggtgtcgctgtccaccggttgacgcgtctgatcagcttgtgcaaactgttgtacagggtggacctgggaacaatgaacaaattaattttcaaccaaaaaaaaatcgttcaagtatttctcgaaaaatatttttagaaaattttttgatttttttaaaaattttgaaaataattcaaaatatgtcaataagagggagtatatcaaatccccatcgaaattttctcaaattcgttaaactgaccaaacaaattcctctttcgttagaaaaatttaaaaaaaaactaatcattttcagtggaaaattgaaacgatgcaaaccgaaatgggataaaaaaaacgccaatttttaccggtcaaatttgtagccacagtaatgcaaaatttcggcgaacaaattgtcgagcagcgaatttggcgggcatactgaaacggacggacaaatgttggaaaaatttgaaatttaataatattcagtaatttgctattttttgatttatgtaaaaaaaagaatatttcaaatgtagatttgtttacctattttattaatataaggagccttatgtacccactggtataacttttacatgtatttgttgactctcggaaattaaaatttttttacctattacgcaaaaaaactaaatttttcaaaaatgcattccgccaaaaaaccttttgctctgttggagggtgaagctgttgcagtgcctgggcgagatcgtcaaagctgaacgggctgagctcgaacagtgggccaaattggtgcacaaatgccaccgtttcggcaaaatcgggcaaactttggaaggcggtgccgtcgtcgccggcatcgtgcccattgccattggtggcggtgcaacacttaaaaaatggggcacatttatgttttgccggcttgaaaaatgccatcatgaattaaataaagaaattctgtgaggctgtgaaaattctgaaatagatttgaccagcgagaacgttggtccagtggttaaattttgttttctggagtcaaggttcgaagttcaaacccattagactgcaaaatttttttttttaaatttcggcgtgaatggacttggaacagattggcaaaacacccaaaattgaaccgtcaggtttcaagtgccgttccctgttgtttggaaatccgaaaacttttgagagccaaaaaagtgaaaaataaaaaagattccagcaagaaatacggtaaaattatgctatttttagggctaaaagcaaactaaaaactcaatttaaaaaaaatgaaagcaatgatggggtgaaagaattgtgcctcccgacggaaaaaaaatagtaaaaatttcaaaaagcattttttcgtaaaaaactcatatacagatgttatagagctttaaaagttttcgaatgagctattgaatgtatggaaaagtcaagttttaattttttacgattttttgaaatttaataattcatccgttaatgggtcatatgagatggggtgtgggttcgagcccgattggctgcggtttatttttttatgtcgattgttgaaaaatcatagataaaatgatggattttgcaaaatctgacttcagattcatgatca

SEQ ID NO: 15555 - DNA, 1361 bp, Heterodera glycines
  unsure (1)..(1361): unsure at all n locations
gattcagtaaaaaaaacntccatggccctcaggcgttttaagcaaaaaaaaaaaaaaaaattggtaaatatacctttatctctgataaaaatttgatttaaaatgacaaaaataacaaccttatccttcaaacattcgtcgagttcctgttccgccgcttgagaagtcatttgagaaattaattaacccgttttctttaaaaaaataataatttaatcgctgaggaatgattaggaaaattggttcacaaaagcataaagatagccgctaaaaatgaagaaaagatttcgacgatgatgtcaattttgttttggttccacttaattacctagctgtgaaaaatttttagggctaacggcaaaaaaaaatttactccaaaatttggattgaatttttatggcataatgttttttgccaaattttaaattttcatactgttaaagctgtacaaagagacaaaagattttgccaatttctcttatgtatgtctttccctcaccaaaaaaggcatttttcatttcatctaattgattgttgttttggagtgtttcttcgctttcgtgtcttcaaatattttttgttaaaaatgatgaacattcggtccaacggcaaaattcggtttgctgtcagttgctcgtcaaacatgaaccgcagcatggaggcacactttttcttgcagtgagaaaatttaaaagaagaaaaagcaaattttgaattcttggaaaactattcaaaattgggaagtgttttttgattggtttagcccctgaatttcggcataaaataatgaaaaaaacaagttaattgtaagtcgaagaaataaaaaaatgggattttatttggcctagatctgttttctggacaaaaatacagggaagtccaggtggccaaatattgcctggaataatatgttgatggtaccaatctgtttttttaagccaaaaaagtatttattggttttgggtcgctgggatcgaaaagatcattcgcaatttgtttaagttttgggccgggattgaaaattggctattcaaaaaaaaaaaaaaaattcatacctaaacctggtttgagccaaggaaaatccaagcctgggtccagctcctccacaagtcctccttcctcaaaagtaaactatcgtcctaactttgttgattaaaaaaataaaaatgaattctgcgaacccagaaatgggaaaataccctaatttcggtatcaaaatcaaagtcctgctcttcaaaaaatttgcgacaaatttctatatttaatttataaattttattaaatttcaattttatgtgcatattttctgtaccccccccccccctcccccattagaaacgtggcttcacgtgcaaagcttt

SEQ ID NO: 15556 - DNA, 841 bp, Heterodera glycines
gaaaaaatggaaaattttttctttaggggggtggagggggggggggggggtggaaaaattggaaatcccttttttagcaagtatttcccataaaatgtatttatttttcgcaatttttttggcactttacagagggctggctttctcttattatggcactttagacgtccaagcgatttttaggcattcaatcaatgaccgtcctcagtttcttaggccataacttttttttgcttgatcaaggcctacatttttggtatcaaacgaaagcctaaagtcttggaaatttagaaatataagaaaagagcaaatactgacattaagaaaaaaaattacaaagaggaaacaagaaatcccgcctttttcaagtataattaagaataattttttgtttattgccttaagccccaaatttacttttaaataaaaacttctctagacttcaagcttttgtttgataccaagaatgttggcattgactaagtaagaaaaaaaagaattatgctctaggaaactaaagaggggacgggacaaaatctcgcctcagaaatttcaaaaaatttttttttaaattttcttataaaaaattttctaagaattttttccttgaaaaatttctaagtttgaaaaaaaaatttttgaaattttgggcggcgagattttggggtgtacccactaaagatggtcactgattggaagcctataaccaaagggggcagaggaggtcccaatttgtttgccaaaaaaaaaaatttttttttttcaaatttatcaacgaaaaatcacaaatgtctaaaaaatacttgttgaaaaaaagcatttggacccctctctaacgaaa

SEQ ID NO: 15557 - DNA, 1753 bp, Heterodera glycines
  unsure (1)..(1753): unsure at all n locations
ttttccacttttttggctagaactttttttaaaactgtctaaattttttggaattttgcaggctaatagagcatctgaaggggtctcgaatgatataaagaaagttggatttggatagcaaataaaaaagttatagtggaaaaatgtgcgctcgtactaaaacggcccgtactaaactgacccggtccgcaaaaatgggtagagccaataacttagttggaagctaaaattggggctaacatgtgatattgtattgacaaaatgcaaatgttattattcagattaagcaaactaaaaagttcaaaaatcatggtaaatatagaagtaaactaataaaattttattaatcaataaaaaaaaataaaaccctaattgacaaagtttagtataatattattttcattaaaaagaaaaaaacgcattcagaaaaaatttttcaaatccttaagcaggaactacgcaacaagaagattcactgataatatttaaataaaaaacaaaaaaatattgtatattttacaaagataaaaaatccaatgcaacttgaaaggcttatcactgaaattgcggcgtgaattaccccccaaaaaaagtctagatagataaaaaaaatgaaaaaattaatggatatgcaatctaaataaaattgctttcaaaaatgaaatgaaatgcggcgaaattaaaactataattaaacaaacgaaaaaagagagtcataaaatattctttattttgttattattaaaaatgtcaaaatttttattttttattaaggaaaaaatagaaaataaaagcgaagaaaaaactaaaaataaaacttgaaagaaatctttaattttaatttattatataagcgataagcgataaataatcaaagaaattataatcttaattctccaaatataattttattaaaaaaactaatgaatgatagtgattatcaatatgcgaaataaaaaaattctattatttttaattacctaataaaacactatcatataaagtaataaattatagaaaatagaaataagctggtttagtatacactgaatatatatatgtaatacaattatcaaaacatgaacataaattatcggaagaaaaattttatcgatattctaccaattgacttaattactaattcataatcaagaaaataattgaaaatgtaaaatggaatgctatttattgtaaatttaattttgtaaaattatttttggcagtcaaaccacatctcaaaaaagggatattgattattccttcacctataatccctaattctaagtaatctccatattttcgaagcagacttataattgggacaaatcatgccaaaaaataaaaataaatttttataaaaattaataaaattgcaataacaaaaatgcgtaaaatttgcacatatggattaaagaaaataaagaagaaaatgacaaaagcggttttaaaatatctatataaaacatatattcgattttaaataaataaacccgaaaaaagtaaaaaaaaaattgaatataaataagcaaaaataaataaaaatttaaaattgtataattaaaaacgcattttccgcttggtttgagccttctacgctgactttattatgcctttttttgcctttttcgggattttcgtgccttanatgctttttttggcattttgccgttttggtgccttttttggagttttttcccgaaaaatccataaaaatgcaatnaatcgggaaatacacccctagaaatgaaaattt

SEQ ID NO: 15558 - DNA, 2554 bp, Heterodera glycines
  unsure (1)..(2554): unsure at all n locations
attccatattttagaaattaatttaaaaattaatatttcgccgtcaacggcattggtgcctaaaacaataaatggaatggcggaatgagtaaacttccatcgttaaataaataaatttacaataaatattttccaaaacacaaataaaaattaaaagacaattaaattcttgaataaaaccaaattattatttattggatcttttttaataaaaaacataagtcatttaaaaatagataattacatagtttataaaatttggaaataagtaattaaaatatgttggtgctttaaaattttatcatgaaactttaaataaataaagtgacgaaccaatcaatgtaagccatcaataaaacattaaaagacacacatgaaaaggacaaatcgaaattttgttgtaatacgagacaaaaaagacgactttaatcgaacattcaattccaagaaattaacattaacagtaaacataagtgtttaatcttacatataaaagccaaaactatatgaataatttaagcttttaaaatcaaatatgaccgaattccataaaattattagccaaaatactcacaaaatttctatataatatgtagacaaaagtctcttttaaattaaagaccgaacttttgagaatttgggattgggatcatgcagtcttaaaagtgaaaaagtcaacgctaatgatgggttcatttttaagactcgaaaaaatgataaaacctaaaaacaaagccaataaagaagttagataaattaaaaaaatataatgtgattatctggaaatacgaagaagcactcgctgctttaaagtttaaacaattatgtttaaccaatcttcttgaaaaaaatctatattatatttaccctttttatatacagggtaacaaataaaacttcctataatttaattactaaatatagtcaaattttaaaaataattataaatatatgataacaaaaaaatgaaatctactaattcgaaaaaacttaaacaaattaaaaagtttaaaaatgaatttgtgataagaatatgctcaaaaatattatatattacataaaaattaaattcacaaagattaacatattcaacatgtaaaatctcaataaatatttatccggatgaaatggtaaactcccatgaatttctaagtcgaacaaaaattccaatggagagtgtctttcttgtcttccaagggaaaagtgaaataaagtcactttgggtacaattatttattgtgaggcacagagacggaacatgattataagcgatcatcgatcactttgtgttatctttttcccgcccctttcgcttcctttttcccgttcccccgttctcgaaaaagtcagttgagtggggataggcagtcgagagcgatggagcgagatgggctttttgcgattggatttcaactgtttttatcggctaataaatgatgttgtgttttactctttctcagcatttttccatgcgcattcaatcagtcgcgcgaaccggggatcccaatttggggaggtcattaatccagggcccggatcattggctcattcaccctttcccccgaatacgaattccccttttcctctcattctcgttcgtcagctgggttaggacatcagcaccttcactggtagcaccggaggtttgctggcacgccgctggctgtccatccctcccggagaatgagatggagatacgcgtggagaaagaagagaatggaatgaggtgcgcaccgctctctcgggagtcttgtcaaggaccggtccacatttgaatggccaaaacactttcttgaaaagccaaattgcagcccaaattattttcgttatttcatcaaatgccgccactcgctcacatggtcaaattaatgacgaacatttaagggagggcattcgagccatcaaaccataattttgtttattttcgcagatcaattaattttgtttgacatcatatttgagggctaagattcttatgtaaaaacatcatttaattatatatatatatatatatatttcctctttttctctttttcttcctctttctctcgttagaacgatttaacagcttagtacttctgcataaaagtcttagccctaattacgcaaatttttttttctttggggatgaaattttccctatacaaaagaattttttttttctctttctcagcgctctcgccgattcaccggaagtacattacagctgccgcctgagaatcagagcccatcggccgagaattgcgataaacacgtatcatgtgaatactacgccgctgtcaacagttctcataatcgctcgagtaatcgtagattaaatgtcgtagaattactgttaatttataaggagatgccccgcaaaatataagcatttattttccctttgtttatgggcactcactttcagaaaattcaatattttcaattttaaccgcactatttaattaaattttttttagctcataaaatcggaaccaaattttaatattcctcgactcatttcacactttcatcccggtacactactnaaattttggatttgcattgtgtcggc

SEQ ID NO: 15559 - DNA, 3034 bp, Heterodera glycines
aaaaaggaaaaaatttaaaatttttcaatttaattttcccaataaattgtagacaaaattttcttaaaaggggttaaggtacaataattaacaactttttaaatattcataacaaagtggctttgaactttttgtcgtcgagcatttgagttggggttagtgcccagcacatccacgggtggcaagctgtgctccatttcaaagcatttgcttcaaatagggaaataatttttatagaacaattatatcttgacaaaaaataattatcgttataatctttggttaatcccccgaactattacttaaatcactccactaccatacattagggattgcgaagcgcttgcggactgttcaagaaatcagacttcccgaaaagcattcactgcgaaggcttccagttttcctcgcggtgttcagtagtttaatactccaattcaccgcttcacctagtgattaccaatgcctcgcattccttggccacgtggactgatgtggcggtatagccttcaatataaggcgttaaattttaaacaaagttttccattttcaataacttctgttttcaatgcaacgctttttactgattgcctttatcatcggcttttgttcggcaacggactgggaattggtcgacaatcagcgatgctcgacgaattgtacctcgtcgtttacatgtttcaaattggtcggctatgtagggccatttatatgccttaaaaaaggctacattctcaatcgggcagagatgtggcccgattggccagagacgggagttggaaaaaataggtcttaaattctatatatataatttattttcccctaggtctaattcattttaaaatctaaattaatgtcaatttattattattatgtatcaatttgtagtgatggcttttggcgctgggcattatctggagcggccgttgtttccattatttggcttggaattttgactgctctaatggtcgccggtaagaaaagtttatatatttctttataatgaaggggtaaaatttttgaaatctaaaattatttttttcaagccctattgttaattttccttcaagtttttaattaaccaattattttgaaaattttctaaacaggaattaaattgtccattgggccaaaactgttttcaaatttgccataaagtttcagggaaaatttaggaagcgcatggccaaacattttcaaaatattcaaaaatatttctcttcctattactcaaaaagacaatgaaaaaatagtgtattttatgctcaatacatgacaaatttgatgaaatagtgccgacaatcagttttgactattgttttttgacccaaaagctttttttacagtttctgtttctatttgaaaatgtcagattggagtcctcataaatttgaacctaaggataattaaatatttttaagcgttcataagaatgaagaccatcgctaccgcgaggaccgtcgatcgaatcccaatgccgacgttttaattgatcgggaaatcaatggccaaatgcttttttgaaaattacaatttaaacacataaaaacgaatattttcaaaaaaatggtaatttaaaaaattaaaaaattcaatgaattaagcaccaaattttatttatcccttaacaaatatttgcgtattaattcgtatttcatatctattgataaaacgcaagcaaaattaaaaaataattgcattaaactaaaataatatcaccaattaaagaccatcacatttgtagtgcatcgctacattaaagtagctgcataatccggcgagattggcacgtagttgtgctcccaagctgcacttgtggatggcacttttgggtcaggatcaggcgaagaccaaacattttcttgtggtcccaagatcgctgaaaaataagtgattaaaatcaaaatttaaaaaaaaaactaaatttaattgacctatagccgcggtgtattcctcaaccacttttgcccgctccgatctatactgcttccataatgctccaatctttagacgtaatgcttttttaaggaaagcactttgttttttgcgtttttgctcctattaattcaatgttaattatttatggaaaatggcaaaaaaaacctccaattttggtgcgaaaaaccctttttccattacggaagaattattttgttgggtaataaaatctgaaatactatttatttagaaggtttggaaatcgggaaggtaacctaaggggttaaagggtgcatcatcaaatatattaggatggggagttgaagcctttcgacgattcccggcgtttccgttaagggcatcataaagccgactgtaaagccgtgccgtttttacaggcaatacagctccaatccggtcaaaggatgaacaacgttgccgtaaaaacggcacacttttaaaagaaggagacaggcttttggccaaccgatgatatggaggcatttgttggatgcgctattggaataggcacgctttatataagcactcccccctacctctcccccttattccagtctttttttggcaccgacaacaattattcaggcccaaaattataataaagcaggttttttgcattttcagctgtttttgagggattagcaacctataagcaacttattatctattacctcggccacttttgttgcatttcagccgttttacggatgaataattttgcatttcgcccattttagggattaacaactttgttcactcatttttggattaaatatttttcgtttcacccatttttagggattaacgcaaccgtaagcagacaacacaattttccttttcatttctggtatatacatagccatcatttactgattaattaaacataaccatcaagaaatatcggtaaatattttctttatgatagtaatttcctaatcttttttttgtttggccaagaatatatgttaaggacaagtataaaaggggtacttggtcccccctccctctcattcattttttcggtcttctttctgccatattttcaagcctatggacatttttgcatattttaatg

SEQ ID NO: 15560 - DNA, 1332 bp, Heterodera glycines
  unsure (1)..(1332): unsure at all n locations
tgcactacaaccccgaatggtccaagggcaaaaaagaggacgataatcctcggcgaaattcgcctctcagaatcaacgaagcttttctgttactacttgcttcgtttaattatgcaggtttcgccattaggctattcgctcgcgatacaattagccctatagaatcttggagcaaaaactagtaatattttatcctttagaaagcatgcaaaatagtttgttatagacttgtgcaacaactatgaaataattcgctgaaattagtgttctttcgacaatatgaaattaatttcgtttattttagaaccttaggttctgatgaattaggtaaaattaagttctaatttattattaaaattattaataagggtcaaaaagcaattaacaggtggtaaatcgcaattgtttctttctgcactacaaccccgaatggtccaagggcaaaaaagaggacgataatccttggcgaaattcgcctctcagaatcaacgaagcttttctgttactacttgcttcgtttaattatgcaggtttcgccattaggctattcgctcgcgatacaattagccctatagaatcttggagcaaaaactagtaatattttatcctttagaaagcatgcaaaatagtttgttatagacttgtgcaacaactatgaaataattcgctgaaattagtgtcctttcgacaatatgaaattaatttcgtttattttagaaccttaggttctgatgaattaggtaaaattaagttctaatttattattaaaattattaataagggtcaaaaagcaattaacaggtggtaaatcgcaattgtttctttctgcactacaaccccgaatggtccaagggcaaaaaagaggacgataatccttggcgaaattcgcctctcagaatcaacgaagcttttctgttactacttgcttcgtttaattatgcaggtttcgccattaggctattcgctcgcgatacaattagccctatagaatcttggagcaaaaactagtaatattttatcctttagaaagcatgcaaaatagtttgttatagacttgtgcaacaactatgaaataattcgctgaaattaatgtcctttcgacaatataaaattaatttcgtttattttagaaccttaggttctgatgaattaggtaaaattaagttctaatttattattaaaattatgaataagggtcaaaaagcaattaacaagtggtaaatcgcaattgtttctttctgcactacaaccccgaatggtccaagggcaannaaagagacgataatcctttggcgaatcgcctctcagaatcacgaaagctttctggtacta

SEQ ID NO: 15561 - DNA, 1130 bp, Heterodera glycines
  unsure (1)..(1130): unsure at all n locations
agggtcaaaaagcaattanncaagtggtaaatcgcnaatgtttctttctgcactacacnnccgaatggtncagggcaaaaaagaggacgatatccttggcgaaattcgcctctcagaatcaacgaagcttttctgttactacttgcttcgtntaattatgcaggtttcgccattaggctattcgctcgcgatacaattagccctatagaatcttggagcaaaaactagtaatattttatcctttagaaagcatgcaaaatagtttgttatagacttgtgcaacaactatgaaataattcgctgaaattagtgtcctttcgacaatatgaaattaatttcgtttaggtaaaattaagttctaatttattattaaaattattaataagggtcaaaaagcaattaacaggtggtaaatcgcaaattgtttctttctgcactacaaccccgtatggtccaagggcaaaaaagaggactataatctttggcaaaattcgcctctcagaatcaacgaagcttttctgttactacttgcttcgtttaattatgcaggtttcgccattaggctattcgctcgcgatacaattagtcctatagaatcttggagcaaaaactagtaatattttatcctttagaaagcatgcaaaatagtttgttatagacttgtgcaacaactatgaaataattcgctgaaattagtgtcctttcgacaatatgaaattaatttcgtttattttaggaccttaggttctgatgaattaggtaaaattaagttctaatttattattaaaattattaataagggtcaaaaagcaattaacaggtggtaaatcgcaaattgtttctttctgcactacaaccccgtatggtccaagggcaaaaaagaggacgataatccttggcgagattcgcctctcagaatcaacgaagcttttctgttactacttgcttcgtttaattatgcaggtttcgccattaggctattcgcttgcgatacaattagccctatagaatcttggagcaaaaactagtaatattttatcctttagaaagcatgcaaaatagtttgttatagacttgtgcaacaactatgaaatgattcgctgaaattagtgttctttcgacaatagaaa

SEQ ID NO: 15562 - DNA, 2987 bp, Heterodera glycines
aggtgctcccttttttcgtttaattttttcgcattgcttcccttgcggattcggttttcagaagttgaatgacctgtttctccagtacatcgactactttttggatgcggacattgcacgtaaatgctccattcgtgagtggtggtccgttttcccctcccccaatttttagctgattttggaattttcaaaggtattcatgtgccgcgcagctgggcataaatccgaaagtctacccggacattgagctgttcaatgtgcccaatgaggtgattgatgatgcagggacaggccatcccaggatcttcggaatgctagatgcaattcaattttaaaaatcccaaatttttaaaactttttgggaggggttgaggactttccctcctccttgggctgtcctgtccctctgctggcgatggcatggcacttttctctttacgcaatccgttaattttttgatcccaactctgctcctcatggtgttgctcaattcctgctcattcaaaccgccgacgcggcgaaggtccgaccgactgaaagagggcgtcgacaaacagtcgttggcgtcgtcgaagccggcaaagcccagcaaaagggcaaagaattggccacacgcttttttcatccgcgacttggccatttgtgagtttcttttcgggatattgcgtcttcgaatttcgaaaaatctaattgctattcatagctcggcttcaccgaacaattttgacccggttttttggttttttatagattcccagaaaaatttcaataattgtgaaaaaaacatacctttttaaactgatttcgaaatttgacagagttatgataaaacttagggcgacactatttttttgggttgccgtgtttcatttgctccaattttaattttcgctttgccactttagcgcatttgtcgccgcatgggttcgaaggtgagaagacggggctgtgcaaaatgctgtgtgtccacgagcagctgctccaatatttcgacttgcacgagttcgaatgtcttcattttccgacctatgagttgcctttgaaggtgggcgctatttacttttccattttttttgcctccaatttgacgcaatccctctgaaaacccgaaatgccttttgccttcgtccgcttttccataagttgtttctgtccgtttcagctccctcccaggccttggctggacacgggccactgcggccccgcgtacacttacgcccagaatgttgtgcgcaaattggagccctacccggacatggaccccacagaaatgatgcgtctccgtgtcggtgaccgccactcgcgggcgcggccggtgttcgacgcgctcaatttgctcggggcaacgccgtggatcatcaacaaagtgagtgtttctgtgttatgtctttgcttcatgactacaacacatttgttttcattgtttcgcccgaccacaaataaaattttgaaaaatcgctaaaaattacaaattttttaatttataaaaaattccaatgtttttaaaaaacacaattttttaaatttttcagggggagtaataaaacttgttaaggatgtgatcactttttcccgcaggaaatgctctgtcacatgcgccgtacgttggaaatgtcttacgacggtcggcacagagaatacctccgcccgttggctgtgccggtccatccggccacgttcgacgtgccgtacaaaccgaaggacgcgtgggaacgcggggtgctgacggaggcggcgtgggacggagtgattgtggacgaacgggcggacgagcgacagaaccgccagatggtgttggaactgttgaaggagagcccattttggaacagtggcaaatggaggcggaaacggaagaagaagaaaagcgaggaaaatgccgaagaaccaacgacgacggaaaggggggagacgaagttggacgggacgaacggaggacggggggactcaaaatgggacagattaagcggaaaaacaaatgccaaaattgaaaataacgggggatgattttattttgctttgattttatttgtcgaacactctgccaaattggttcatttgtttggcactcttttctgccaaattggttcatttgtttggcactcttttctcgatcgctttaatttttgattttgcatttttttcctatttttgtttaattttgcacattcactatcattactttttcttcagtctcctctctcttcccgccgaacgcgctgaacttgaaaggcttccgccgtctctgacggatgaccagggctatctgatcgcgaggcgtttcctgaagaaagtgaacgccattttcagggacaagtaaggcattattgataatttacaatttttatttcccattacacagtattgcgagtactgtagtgtacttgtacagtaccccatttcaatttcatccgcacttttcagatgtgaacagaactcgctgcactgttggttggtctatcggctgactttggcacaacattttgccaactccgttctctactttccgcataacatcgatttccgtggccgtgcctacccaatctctccgcagatcaaccacatgggagacgacctcaaccggggccttctcaaatttgccgcaggcaaaaaatcctcactgatttatggcccctgaaaggcgttgcaatggcaaaaaaaaactctctcaggcaaacccttgggcgagcggggcttggaatggctgaaactgcactgcgtcaacatcaccgggcgcaaaaagcgcagctctctgagggagcggctgaaattcgccgaggaaaacctttcccttttgacttcggtggccaacgacccattcgaccgtaacggaagaaaacaatattaattaattaatcatccgccgttttagccaaatttgccttttggtggcgcgactcggaagagccgtggcaaacgttggccgcgtgcatcgaactgcgagacgcactcagccgcgaccgacccgaagactttgtcagccatttgcc

SEQ ID NO: 15563 - DNA, 2738 bp, Heterodera glycines
tttccaaaaagtcattcttaagggtgtaaatattttcgtcttttttgaaaatattgctctgacgaaaacgaaaacgaaacgaaaatcctaaattttaaaaaccgaaaacgaaacacgaaacgaaaaataaaattttgaaaaccgaaaccgaaaacgaaacgaaaaaactttagcggacgaaaacgaaactcaaaaagtgccgaaaatgtaggacgaaacgaaaacgacacgaaatttcgtccagccctgactgcaatagagcccaaaaaatttaggggatggttaatggttggactcatagaatgccattggacccttaaaaattgaatgtgcttaaagttcaattaaatcatcgttttttagtcttctcgacgacgcttttcccgagccgagtggtcagcaacaataaatgaatgaattaattaattggttgattgctgtgattatgtcacccaaatgatgttggcattttgccatttcaatattatgtgtaatttgtttgtatatgtacctatttgacctttgcttgccgcaaaattcgtccatttccattgtatttgatgtgcatgtgtaaaatgcattgtgataatgataatcattgttaaaattttcggtcgactcttagtggtgtttttttgaaaattttggggtcgattcttagggggtgtattttttggttttattgcatttttgttaaggaattttccaaaaaatgtcgaaatagtgaaaaaatagtggcaaaaacgccaaaatagtgatttctagtgaccgataatgacatcagaatcgaacatttttaatgcagaaatgcgtttttgagctcctctcttcaaaacaattgagcaaaaaaaaaaagaagttaaaacctaaaaattgcatccctagtgattaaatgggtttgatttctgagttttacaacaataaaaaaagcaggatgttcacaaattgtgttccttctattgggcttaatgcagggcttcgctttccaagcacgggtatactgattcctttttaaacattggacggatgcgggtcaaaatttttgagccggataagttgtgaaaaaaggatttgtttaatcccgaaaatcgttccagttaaaattctcttatcctttccataattttttaactcattttttaatttaacacagggctcccaagttttttttttcaaattcaggacaaaaaacattaaaattcagatttagaccccaaaattcaggtttttttaaaatatgtagtagcgttaagaaaacgcattaaaaacataaaaaaacttaaaaattttttgcttaaaggttattttttggaaaaaattcctcgtaaatggtgaaataggcacaaaatgttataaaaaatacccaaataggcttagaatcatatttagtatttaaaaattaatttttgatatatcatttttagaaaaaaaaatcgattttttagggatactttttcacaaagaattttaaatttttcacaaaaaatttctataaattctcaaaaagcatcaaaatatgtaaaaaaaaaaaaaaatgaaaatatgtacaaaaaattgcgaaatatgtatgaaaaagtccaaactatgtataaaaatatgtaaataagagtcccaacttcttttgttcgcaaacacaaaaaagaatcaactaaacatttggcaaacgttcagcgatttgagcagcaataaaggagcaaaccagactagagaccggcgcaggacaggatcctgcgcaggattttgcaggatcccagtccgcaatcctgcatattttggaaaatacaggatttacaggatttgcaggattaatcctgccggatcctgttctgtaaaaaattttgaattccaatcctgcaacaggacccgcaaatttgattttttgcaggattcagcaggatcctgcattgattttttgaaaatttttaaaaatagaatgccaaatattcagaaactttcttttttcaaaattttttttcttaataaaaatttttcgtttaaaaacttatccttattcgaaaaaagtttatactagagtgccacgggaccgggaatttttgccaaaaccgggaccgggacttgccgggacctgagaagccgggaccgggacctcgatttttttcgggaccgggaccgggaccgcaagaaaaaccgggaaccgggaccaaccgggaaattttaaaaattcaaaaaaattttaaaaattaaaaaaaaaattcaaattttaatttatatcaagtgaaaataatacaaaattatttggttttttatttaataaattaaattaatgaaaattttcaaacaaatattcttcaattatttcaaacaattaatcatttttggactaaatcatcgaatattaatagaaattcagatttgattttcacatcactttttttcggagcgctttttcaaaaaacttttgagaaagaaggggtccggcggtgcctataggcgccgccgggggaaattttaaaaatttgggtgcaatttgttaacagattttcaacaaaaaaaggttggtttttgcgattattaagctcaattggtaggattttcatttaaaaaatgataaaatatgtatcaatttaaaaaaaactatgaggaatcatattttctttataggaaacccacgagtatacaaaaaaaaaattgaaaataatctaatttctatagagggattgaaccagaggaaagaagaagggaaagtcaaggagactagccattaggccatttgcaca

SEQ ID NO: 15564 - DNA, 1205 bp, Heterodera glycines
  unsure (1)..(1205): unsure at all n locations
cccgatgcttatccgttcccgcagagcttcttcaaaattttttccattacgcaaagagctgcgaaaatgtgaataattctcagaaaaatggctatctcttnntaggacaatattctatctcgtaaccccgatgctaatccgttccgcagagcctctccaaaattttttccattaccgcaagagctgcggaaatgtgaataattctcagaaaaatggctatctctttttaggacaattttctatctcgtaaccccgatgctaatccgttccgcagagcctcttcaaaattttttccattaccgcaagagttgcggaaattgtgaattaattctcagaaaaatggctatctctttttaggacaattttctatctcgtaaccccgatgctaatccgttccgcagagcctcttcaaaattttttccattaccgcaagagttgcggaaattgtgaattaattctcagaaaaatggctatctctttttaggacaattttctatctcgtaaccccgatgctaatccgttccgcagagcctcttcaaaattttttccattaccgcaagagctgcggaaattgtgaattaattctcagaaaaatggctatctctttttaggacaattttctatctcgtaaccccgatgctaatccgttccgcagagcctcttcaaaattttttccattaccgcaagagttgcggaaattgtgaattaattctcagaaaaatggctatctctttttaggacaattttctatctcgtaaccccgatgctaatccgttccgcagagcctcttcaaaattttttccattaccgcaagagttgcggaaattgtgaattaattctcagaaaaatggctatctctttttaggacaattttctatctcgtaaccccgatgctaatccgttccgcagagcctcttcaaaattttttccattaccgcaagagttgcggaaattgtgaattaattctcagaaaaatggctatctctttttaggacaattttctatctcgtaaccccgatgctaatccgttccgcagagcctcttcaaaattttttccattaccgcaagagttgcggaaattgtgaattaattctcagaaaaatggctatctctttttaggacaattttctatctcgtaaccccgatgctaatccgttccgcagagcctcttcaaaattttttccattaccgcaagagctgcggaa

SEQ ID NO: 15565 - DNA, 3446 bp, Heterodera glycines
tgcttaccctagaatttttgatgcgccattaatccatttctaataatttgacaacatctgaaactgaaattggacattgagtctgaaacggaatgaattgctaactaagaaatttttgaagcgccttttttcatttccaacaatttgacaaaaactgaaactgaaataggataatgaaattactgatgtctgaaaggaatgaattgcttacaataagaaatttctgatgcgccattaattcatttccaacaatatgcaacacttgaagcgcctttaatccatttccgaggatatgcaaacaactgaaactgaaaaggaacagataattgtgggtgtccaaaaataaaacaattgattacaaaaaggaatttttgaagcgcctttattccatttccgacgatatgcaaacaactgaaactggaaaggaacagataaattgttggtgtccaaaaaaaaatcaattgcttacaaaaaggattttttgaagcgtccttaatccaatttcaataatatggcaaaataaaggactttacagcacctgtttcaaaacaaattcgcaaacaatttagtaaatgacaaaacattaataatttacaaagataattttgaatacgcaacagtaattaaaaattcgagaccacggcaatcaaagaacaagaaatcaccattaatagaaatacaaaacaattgaagaaaagagataacaaaaacatgaacaaaaaattaacaatattttggtccgaaaaaaggaacgccagaacgtcaataaataaattatgatttaaaacatatattccattcctttaaccaaagagcttttcttcaagatggtgcccactcattttgaagagcaaggcaattcttcaaaaaattagaataaaatccattgttcgatttatcaacttaccatcttcattcacaattatgttgagaagaaaattttgcattgggttctcatttctagctgaaattaaaaataaatacttgagtttaaatataatcggatttttaagtaccgaaaccgttttcctctgacaaaatggtgtacgcattgatgtaatcaacgtatttcaattggtctgcaggaatcagcaaaattgccttgcgctaaaatgaaagataaatttttggaaatagttattattatctgagctaaatttaagttgatcattaggtattaccccccttctttccagtagcaaattaagaaataatctgctcgcccggccatttccatcatcaaaaggatggattcggagctgcaaaaggggttttaaaaatatatttgttatttatattttaaaaaatatttttttttctgtctttgataatttctcaatttagttaaattatctcactatctcaagatgcgcacgaattgcaacttgaaagtattgataatcatctggcattggctgattgacttgttcaatgacatttttcatctctgatggcacgtcttgcggttgagatccccaatggtctccaaccgacacaaatcctgtgcgatagtcaccggagtcacttgttccagacaaggcaatactattaagctctttgattgtcttaaagaattaatataaaataataccagccaaaaaatgcagtttttgcacatttttaaaatttttgccatcaataaaacactaacccattaagaattcatgcctttaccttttcagttatcttttgagaataaaggtatccccgtgatcgcataattttcagaagatttgcatcatcagcaaacatcgatggggtgggtgtctgattggccatcctttcgatcttctccaacatgctctcattatcgcgagaaaatttatttgctggttccatcttaaaaaagcaaaaagcaacaataaaaagttattatttatttattcttaaagaaaataagccctctgaagggttaaccacttactctgacggctattcagaatattatgcgtcaaacagtcaattttcaaaggcaggaaactccaaataatgataagaattaatataatagtggctaaaaaattcattataattaaattaattttaaattaattgtattgtttaaataattcttttattggcatccaccggccactatatactttcttttactggcatccaccggccattggataattttctgttatttgcattcacctacatagacaattaggcttaataaattgactgacagtcaagaaaagttgggagtaaaggaataaattgattaatatgtttggaaaggtataggtaattgaattaatattgaaatgagtctgaaaatgataattaaaacatttccagcaataagcaaagacctgaaacttaaaaagggacgtaaaaatgcccgtgacaaaaaaggagttgcttactaaaaaataatttgtgaagcgcccttaaacatttccaacaataagtcacacttgtttgtacctggtaatctatttaaaaaaatttatgtgtgcatgtatatgtatgtggggggaatttgaaaattattgttttttaacccatcgaaaacttaacaattcgttaagtaaaaaaaaattttgaagccattttttggctttgtaaatcatcccacatagtatgccgcagcacttggcagatttttagaccaaggatggaagagtgtttaaaatttgtttttattgttttccttttttgaaaacgaatgtttttaaattgaattttttttcgtttttgaaaaaaatttttttttaatttttttgttgctcttccactccaaggtctgacaggttacgcttgggaagtgcgacgcaactgcgcagactgcccccagtgaaccggaaatttgccggtctgacctctaaggtcaactgtacgcacactatgtgggtaccaggtaccgctgtattgcttttgcaaaaaaaaaagcaaaaatttggttctcaacagcacacacgagaaccccgatcccgggtaagcacggcgatccttcagcgccgggccagaatgaccttagcccggcgctgggcgagacttacaacattctataaaagaaagtgctcgattaaagtcataaaaatggtgcctgatatatgcaattggctaaggaaaagagagatgggaagcaaacgacttgtcacttatcgcacactatttctcaggcgtacgataaattctctgcacgtaacacactatttttttgcagacgacaagagacaacaaagggaaaaggtaaaaattccacttttttcgagatttacaggggtataactttgttcgaattagttgtagagctacaaattttttttctcgcccttcgtctcgacgagctctacaaattgtttgcttaccgcaaaagcgtagcacttatggttcccgagaaataagagtaaaactgagttgttaccattcattttacaaaaatgtgagtaacaaaaaaaaatcataaacatttttcaaaatcaacatttttcaaa

SEQ ID NO: 15566 - DNA, 2270 bp, Heterodera glycines
  unsure (1)..(2270): unsure at all n locations
ttgcagaattaattttttattattttttgtgatttttatcagaagcgccccaaactttgcagggatactgaaaggaaataattaacctgttttatcacattagcttgtcatcagtttttataaaaaattttcaaaattctgagtcttctattattttatttttttttcaaaattttgaagggcggggggggtattgcaatacctagaagcatgaactcaatgttgccaaactagatcggaggaagcctcgcaatcttctgaaaatagttgatttctacattttctagtatgtcatcgtaacaaatagaaatactgatgcattgtagacgcattcgatgccaaaattcagcccatctacgtgtgcagaatgtcaaccttcctttctgtaccatgtttttgtttcgaaaatatttccaattttgtttatgatgaaatagcaatttacaaaattatagaaatatattagcaccactacagtaccacaaaattctttcgtaaaacacccgatcaactgaaaagtctgatcgctagaatatgtagctttctgccatatgagagaaatatgaaataatggtaggagggatgttccaataacatgcttatgctgttactaaggctacttttagcggcacatctgtaatttgtgcaacccttattatcagtgagattaaacacaggattagagaaatgccaacctagcaaacgaagcatagcatagctgaagcccctgtggaaatcgctgttttgcaatttggattggtgacaacctttgtagatatttttatccgtttacactaatatagcctttcttggcaaattctaaatgctgtgggtattgcaatacctagaagcatgaactcaatgttgccaaactagatcggaggaagcctcgcaatcttctgaaaatagttgatttctacattttctagtatgtcatcgtaacaaatagaaatactgatgcattgtagacgcattcgatgccaaaattcagcccatctacgtgtgcagaaagtcaaccttcctttctgtaccatgtttttgtttcgaaaatatttccaattttgtttatgatgaaatagacaatttacaaaattatagaaatatattagcaccactacagtaccacaaaattctttcgtaaaacacccgatcaactgaaaagtctgatcgctagaatatgtagctttctgccatatgagagaaatatgaaataatggtaggagggatgttccaataacatgcttatgctgttactaaggctacttttagcggcacatctgtaatttgtgcaacccttattatcagtgagattaaacacaggattagagaaatgccaacctagcaaacgaagcatagcatagctgaagcccctgtggaaatcgctgttttgcaatttggattggtgacaacctttgtagatatttttatccgtttacactaatatagcctttcttggcaaattctaaatgctgtgggtattgcaatacctataagcatgaactcaatgttgccaaactagatcggaggaagcctcgcaatcttctgaaattagttgatttctacattttctagtatgtcatcgtaacaattagaaatactgatgcattgtagacgcattcgatgcaaaaattcagcccatctacgtgtgcagaaagtcaaccttcctttctgtaccatgtttttgtttcgaaatatttccaattttgtttatgatgaaatagacaatttacaaaattatagaaatatattagcaccactacagtaccacaaaattctttcgtaaaacacccgatcaactgaaaagtctgatcgctagaatatgtagctttctgccatatgagagaaatatgaaataatggtaggagggatgttccaataacatgcttatgctgttactaaggctacttttagcggcacatctgtaatttgtgcaacccttattatcagtgagattaaacacaggattagagaaatgccaacctagcaaacgaagcatagcatagctgaagcccctgtggaaatcgctgttttgcaatttggattggtgacaacctttgtagatatttttatccgtttacactaatatagcctttcttggcaaattctaaatgctgtgngtattgcaatacctataagcatgaactcaatgttgccaaactagatcggaggaagcctcgcaatcttctgaaanttagtgatttctacattttctagtatgtcatcgtaacatttagaatactgatgcattgtagacgcattcgatgcaaaaa

SEQ ID NO: 15567 - DNA, 3131 bp, Heterodera glycines
ttttattgaattctgagccgttttgagtagattagacttgaaaaaattgaaaattttgaaatcatgtttcccactcccttctcccaggggtattattttgtaaagtctttttttccccaataaacttttcataccccatttttcgcaccgtgaatgttatttttattgaattctgaaccgttttgagtagattagactagaaaaaattgaaaattttgaaatcatgtttcccactcccttctcccaggggtattattttgtaaagtctttttttcaaaataaacttttcaaaccccatttttcgcaccgtgaatgttatttttattgaattctgaaccgttttgagtagattagactagaaaaaattgaaaattttgaaatcatgtttcccactcccttctcccaggggtattattttgtaaagtctttttttcaaaataaacttttcaaaccccatttttcgcaccgtgaatgttatttttattgaattctgagccgttttgagtagattagactagaaaaaattgaaaattttgaaatcatgtttcccactcccttctcccaggggtattattttgtaaagtctttttttccccaataaacttttcataccccatttttcgcaccgtgaatgttatttttattgaattctgaaccgttttgagtagattagactagaaaaaattgaaaattttgaaatcatgtttcccactcccttctcccaggggagtagtgtaaggtcaggtaactggggccatctgagcgccgggacatttcagtaccgcggctcagcgcggcccatttggagcgccttgttggcgctcaaaatggctacgctcaattcaccccctatctgtcgaccatttgtcctagaccatttgtcctattgtcgaccatttgtcccaaacatattatattgtcttttaattcatcagcgatctaggggatccgaactttgacaagtcatcccatcacactaaccattaggccatccagacaaacataatttattttattattttgtgctaaaattaattctagaaaaatcatcaatcaacaatgtgtgtgtgtgttcggtcacaaaaaaaattagggactgaatattttaaacaccccaataagttcttcacggcaaaaggggcaacgcccatcaattgaaacagtttcggcgcatcggttgcagagggcacgatgaccacatggaatgcatgcataatttctctaaaatatccaaaattagttttgcattaaacgctgacgacttttctggtatagcaaacggcgcaaagtgggtcgtcgtctttggaaccatccatatctcgtaattccaatatttcttctctcaaatctttcgtctcgttgaccagagttgcctttgtctctctcaacacacttatttctcttattaattgttccttttgttgtagcaattcgatttttttgttatggatttgtgttttcctatttttaagatgataaacatctcgttgcagttggtccttgtcgatttctaacccaatgatcatcgcttcaagccgtacaatttcgaaattagcaaatggttggtgggacattgattatttttccgtgctaaaaaaaaagaaaattatatgattaaatcggggagggataaaatgggtcaaatgtgtgcaacatctctatataaataaacaggaagttgcattaacatatgcataaaaatgtttattgcaccattcactctaattttgtcgggggccactggtagtggcaaaacgcaatggttgatgaaattgttgagaaattacaaggaactaatagacccgccgcctgcaaaaattctgtattgctattcagagatgaatgagtcggttcttgatctgatgaagcggggaattgagacgcacaacggtttgccggatcaagcgttgatccagagccagccgaaaccactgctcctcgtgcttgatgatttaatgttgaatgtgggagcgattttctggatctactgttcacacgtggttcacataactggaatgtcagcgttatttttgtcacccaaagcctatacgggcgtaacattagaacagcgcgagctaacagccattatttggtgctgacaaggaacccgtctggtcaactccaggtcagaacggttgggtcacaacttttcccaaaacgactcaattactttatggaggcgtacaatgaagcgactagtcaaccgttcagttacttggttataaacatgcacccaaatgctccggaaaatgagcggttgacaagcaaaatattccctggggagagccgtgaggtatatttacctgtagaataagcgtaatgaacgaaacaagtgcgcttaaaaactatttaaggaagggaaatttttttggttcgcaaaatgtacgagttcagtccgtccatacattcgcgcaaattctgatttcttcaaaaaattagcctcaacaaaatcggataaaaggaaaaacgatttgctgaaaggcgcatccgtagaacaaattctcggattggttgagatttgtgcaaatattttaaaatttaactttcgcctcaaccggcgacagaggagacgattggccgtgtacgcagactattaccgagcaattgcacgttcacgtagtgagcgcacagccaggcagaggctacaacagggcagcggaatagctttaggagctattttggcgccaattttgagcgttttggctgaacagctggtccagaaaattgttgcaactccatcggcacaacaacaacaaaatgaagcacactaaaaagatgctacttgtaccggagagtgaatatttggcgcttatcaacctgctgaaagggggcgcaggtggaacggactcacttcaagccgaaaaagcagcgatcgatgccagcatccaaaaaaatctaaatgacaataaaacgggtgcggacgtgaaaatgaagcgccactcgtggttgtacaaacagaggcatcagctcaaggacatgattgagaacaaaccacaaaaggtgattgtggaaaacgctacaggcacagcgccaaaaacattgccccgtatatgggcatacagaaaccaaacctcaacaagcttgaagaattgaacgggcaggatggcaaaaaaataaataaaaaaatagga

SEQ ID NO: 15568 - DNA, 1134 bp, Heterodera glycines
ccgaatttgccggcatgggcatgacggagatgaacgagagtgtgttcggcgtgcgcaccaagaagggcatgttccgcactgttgggcacatgcacaaggagcagttgacccgactgatgcaaacgttgcgcaacacgttcccccactttgtgcgttgcatcgtccccaaccacgagaagaagccgcgcaaaatccaatccatgctggtcagtttttcagttttattgcatgcgcagtgccgtaacatggtgcggagagagaccatttttatggcattgaataatgaatggtacatctatcaacaaatttgtaagggattgaaccgaactccggatttggtttgggatggggatattaggtagaatggaacaattttgcatttttttcgcacatttcgttttccctcatgttgtcccctgagtttttaaaacatatttactaattaatataaaccaagaaattttcatgaaacccgatttggatgaaaatcttggaaactaataatcgttgaaaaatcctaaattttgataaattatttctgccctactaaaatgttcggccactttatggcccttcaaataataattattaaatggttgtacgtccatcaacagttcgtatcactttcgcttcaggtgcttgagcagttacgctgcaacggtgtgctggagggcattcgcatttgtcgtcagggcttccccaaccgaattccgttccaagagttccgacatcgctacgaaattctgacgcccaacctcatccccaaggggttcatggacggcaaagaggcggccaagtaatcattttacaattgtcacatgaaaagtgccattttgcaacacgtttttatactattggtttttgtatttctttggatgcgtttgaaaattcggaaaaaatgtgacaaaaattagaatttttaaaatcattcgtatccattccattcaaaccagacgcatcattggaactctcgacttggacccgactcggtatcgcattggccagtccaaagtgttcttccgggccggcatgcttgctcacttggaggaacaacgggacctgaagatcaccgacctgatcgtctgcttccaggttggcttattcaatttttgggtccctttacgggtcaataaa

SEQ ID NO: 15569 - DNA, 3803 bp, Heterodera glycines
atccgcattttgcaacgcaacggtgtggcgtggtggaagctgcgcgactggcaatggtggcgcctgtacaccaaagtgaagccgttgttgaaggtgcgccggatgtcattctgatcagcattaaaagcattattggcacatgcaaaacaactagggattagacacgattgcccatggttcttgtcggtattttcttgaaaaatgcaacaggacctggagtcttgttagaataggcatttttagtccggaaatcctgtccaggtccaacccggaactccgggtccgatttttccataattctggctgctacatataaaaagtcttcgtcatgttagccctttgacatgtgttttgttgtataggtgaccaaccaggaagcggcaatttcacagcgggaggaggagttgcgagtgctgcgcgaacggttggccaccaacgagaaggagacgctggaaatccgaatgctgatggagaagtccaacgaggaacgagccgcagtgcaagcacagcttcaggtcggtgggcgaggggacgggacgccaaaccgcttatttttcaacaaatttatttatatttactgcgtgctttttttgttgctctcttttatcttacgaatttgttggtttactactataattctggatccatcatccgcacatttcacagtgtcacttatttatctctgactctttttggttgcattctttcccggctttaaccattttttataattatatataatttagtaaaattggttttattcgagtttggtttcgggggtttgaattggcgaaatgaatgtcagatttttgattggcggtcccaaaaaccccgagaagcattttaaagttgcaggcgcccacccatggaattgtccccgtacccgtttaatccaaattctggtgccctcccccttccttttctgtaaatattctattctgctcttcaatttacctttagtggtggccatttgccgagacatttatgatgataatgtcccgtctttggcactttctttgtgctctcttcgcctccgtcttcttcacctcttccccccttcagacggagtcggaggagcgcgcggacgcggaagaaatggccagcgatttgaagcagaagaacgtgaacatgcaggagatgctcaacgactattggatgcgcattgaggagaatgaggacacgcagacgaagctggtggaggagaacaagaagctcaacgagaccaacaaggacctggaggaacagctggagcaggaggagcaggcacgccagaagttgcagttggacaagaagaatgtggacctgaagctgaaggagttgcaggcaatgaatacatttcgaaatttaaaaaaaataagaaaatttcattaaaaaaaagttttggaaacttttttgaaaagacattaattcatcataaaaaaaatttaaaactaaaatcatacttcttataattaatgctgttttccaggacttgtacgcccagttgcaggacgcatttgcgaagctgcaagcggaaaagcaaagtttggaggcgcgcatcggactgttgtccaaccaactgcaggaagaggaggacaagaacaagcaaagcgtcaagtaccggcacaaggtaaaaaattgtaaaatctaataaaataattacacatccatcgccaccacataacagttggaggcccagttgaacgagctgacggagaagtaccagtttgagcggaaactgcgcgaggagttggaccggaacaagcgccggctggagttggacatgggcgagcagaagacgcaggagcaggagaagcacaacaaaatggagagcatgagccgggagatggccaagctggaggcggagctgagccaactgcgcaacaagtgcggcacatttgaattacagtggaaagaaacactatttgtagaatgattggactctgtattttcaggatgaggttacccgtgacatttgtgtctattgccgaaatcggacattttgcgcccggacttatgcgccccatttcttaaagggcattcattcttttagacatttgtatagaatccaggattggtaggaacactttttcttacgaagcattttttgcgcatccacatttgttcggtggcttaaatgttgctgtccacagtatatttatgtgcagtttttccagtcagaaaatttaaaagtgcttggtccagagaattaaaaaatcgaacaacgaaacagtagtaaaagaagtttaatttgttaacagctttttccaattttgcgattgaccctttgagaaaattaactcaataaatgtccgaaagtccttttgaaatgggttgcacaatgccggagctcaaatgtctgtatatgttttaagaggggggggggggggggaggcgggcatggcattagtggccaaataaatatgcatggaataattgagtgtcactccataaacaaaattccagcgccgacgacgatgccgccacaattgccgccctgcaaaagcaggcccggaagttggagtcccagttggaagaagtgcgcgaggactcggagaacgagaagaagcagaagcttggcttgcagagcaaagtccgccagctcgaacaggaactgtccggttagttgggcgttggctggtggattggctgggtccccattacattcatcggtcactttggaattccattgatcacgcactattttcctattatgcaattttttcattagtttttctatggctcactttttatgtcattttagtgccccttttttaatttaaattcttttttctgactctttctttgcttgccttttcacctttttcttcgtttagttttttctttcttagttatttccacaacagctctaaatttctagtttcttactttgtttcaatttttctttctattttaccctattttttctttctaatctcttttcctttctttatctctcattcccgctccattttactctgtcctgtctttctttctattctctcttcctcctctctttctcatgtatctctcatatctccaactctctgtctctctctctctcatccattttttactatattctatcccttcctcctttgattaggcttgctggaacagcaggacgagcaggaagcagaacatcgccaattgctcaacgccaacgcgctgctcaagcagcaattgaaggaggcgcagaagaagacggacgatgacattgttgcccaattggaggagcagcggaagcgttcgcagaaagagttggccgaagcgatgcaggcattggccgactcggagcaggcacagaagcgggcggagcagtccaagaagaaagtccaacaggaggtgagagcagcagacgacgtgcaatttgaaggaccaatcgggggggggggggataattcaaggaagtggcaaaagaatttcaaaaaaggaatggatagcgggcacgcgtgcctctcccccaccccaccaataaaattaaaatttccagtaaaatgtgaatttgtttaaatttaacccttaaattttctcggcggcgcctaatgactctgcgggacccctattttcatgttttttaaatagttttttggctgtaatttgtacttgaaaataaattatttttaatttttcaatccaaacctggttgaattagtttgtcatgctttcgaataatacataggtttatttttaaagaattcaaataacaaacatgaattattcgcaaaaaagccaacgaatttgcaaattttcttttttgtccacgatggatgacctgcaaattgaacttgagacgatgcgcaaaaaccagcaggaccgggaga

SEQ ID NO: 15570 - DNA, 2347 bp, Heterodera glycines
  unsure (1)..(2347): unsure at all n locations
cttatgaaaaaacttccttacatttttttcttgaaaactttctgttatcaaaatagtctctcaaatacggtacgacaaacgaataccgaaggactattttttagcatttaccgtatatcccccatcatttgtctgcccgaccaggtacggagcgcagttcttgcgcaagcgcgtgctccagttcatcatgcagcatccgaagaagatcacgcagacagttggctgggagagcatcatcggcgacagtcggcaccgtcggcttgcaacggacattgtggcatcgtttgagaagccgtgctaatgactactggcaatgtgaagaattcaattcaaatcaatttaaatttgccacaaatgtgccaatgctgtgccacccgggaacagcccactcccctccccccccccctctcgcgacagaaaagcttattgttaaaaatttagaaaaagtatatttttaaagttttttgccgtttggtatgccccgacacacccatccccatgctcaagcccaggcacgatttgttatgcgggatgagttttatgatgagatgcatttttccggcagggaatatcgcacaggtcgcccaggaggccctcgaacataaaaatttctcgagaatgacttaaatatttttagaaattcgaaatttgtgctagttgtaagattacgacaataggcaaaatttgggagaagaaaacattgaattaaccggatagatttgagtgccgggtcagcccgggtttggattcgaatctctttttttatcccttttttggtaacataaatttgccattttgttcagatccgtcaccaccaccgtcttcttcttcttcttctccnacatttgtttcgtcgtcatttttttgtccatttgtttctgtgctgctgtggaccaaaagcaacaaaaataaggccaattattctctcctttctccttttcgctgtttttctctcttttctttttcttttgcttttttcaaaattatttttgcccactaattaagcgagcaaaagtgttgtcctattacaaatttacattttgcacttttttcggtgactttgtggaaaattcaacatcacatttcctataaatacactaagattttaacgtgctttctggagaattgacgaattttccacttcatttctgttcatacttttttgtgcaacaatttcgttcgtgtgatgtgttttggtggtgcgcaattaaatgaattgtttccatttttcgtcttttaatttcggatgagtaaaacaaaaaaaaatatattttttaatttatttcaattaaactacattttttgaaaccttggcatagttttcgcgcctaaagcactgttcaaaaattgcctaaaaatgatcaatcagtgtttctgaccttttatcaaattgcgcgcatcgtttcgctctgatgctttttttgacccgggcaatgattcgatagtaaatgatgatatcagtaaatatattaatgtatatggggagcattgtgcaatatgctctgatcgatcagtggtcgcccgatgggcaaatctgatcaatcaataatgacagtgctcataaggttacaaaattcagtttggtctcagaaaattggagcctccctcgtgatcactgatcagatcagcgggcagatgataattttgtgacaacaatcggtcaatcaatcaatcagtgttgtgtgtataattttaatttaatgcctaatttctctcaataaaaaattctgcatttttctgttgttttttttactgttaacttttcctttctctctcacaaagagtgtactgtatgtacagtaagaaatgtgtaatttgttataaaaaaaagccaaaaattcattcattggtgcaacaacaaacatcaaaaattgagttaaaattgttaattttttttcctcttctaatttatatgcgaatttaggcaatggtaaagaattgtggttcctattttaacttttttattttggactaaaattcagtttccgtgggtttttgagggtgctgattgaatctacctaaccagagaggcaatatccagaatacattattaaataagtaaacttggaatttaatcgaataaactattaaaattgaataaattaaacgaagtttttaaatgaaaatcattatttatctatatttataaacaaacaaatcaaaaaagtgaatttaacacaattttaattaaaaatataaatgaaaaaaacagctattaacaaaaaataaatattttaaagccccaaattaattatttttgattccagctaaattaaaattttaaaaaaccccaaacattttttaaaattaaactaattaaaaatgaaaaaaaactttattaaatttc

SEQ ID NO: 15571 - DNA, 2246 bp, Heterodera glycines
  unsure (1)..(2246): unsure at all n locations
aaatagttgttcaataaatttgaagcatttacttcaagaaaaatgtaatccttggaaaaaatttcaactttttgttagaattcgggtccggggttcggaattgggtaaatccgagttgagattcgtaatcagcacctcgaaaacctcttanaagttggtttcgaactcaaaataaaaaataaatttttttttttaaataatccgggaccacaattctttaccattgcccgaatttatttttatggcccaaaatggactttaaaaattgaaattggttttttttctccttttaattgtccattttcggctgccattgtttttgtcattaattcgttttctccatttttgttttgcttattttctcgccggttagtgggtgtgtaattaattaactgtaacttgttaattatgtaattagcgtgtaattataattgattgtctaattgacctaaactcattagcaacatttgttgttaaactgttgttttgtttttcctaacttgtcaaaatcaatttttgcccagcagtcagttccttcttcgtttgttcttcattcatccgccaatttgtactcattaattaatgtccattagaaatgcttcctcccctgataatgatgatcattaaaatggtgctcttttaaatgttttttaatatttttttctcaaaattttcgtttaaaaattcaatttatttttcaagtttagttttttgtatttattttaaatttaattcccacagttttttgttttgatgtaaatttttaatggctggcaaattgcggcagcattccctgtccagtgttcggaagctgcaagaagttagtaatggaaatttttcaacaattcttttcaattttggaaaatttgcgttcctaccgtaatcctaccgtaaaattccaatgaaactaattaaattgacaattattggctcaaaaatagaaattttgtccaattgttgttttacagctgctccatgactgcaacgtgcagttggctacagtccgtagccaaacgcagcaaattggcaccgcggcggacagtgcgcaactgcggcgagagttggacaacaatgccaaggtgggcttgccaattgccaccgagactctcgaagaaaacagcaagggcacaatttggcatttctatcgaagtgccaatgcttcccgattcggatttgtcatcatgaattgcataaaacggcaattcgttctttgctctcaacaattactgatcagttatcattttcggttccgatcgtcacccaattttacgcctgatcggcagacaaaaaaatgcatttgcatttgttggcattaataagctaatgaattttgtgcatctcagagttttgggttttggcatttccgaaaacttcggaatttctggcattttattgccacaaatccggtcactaattgtcagtcttccgccttctgctaattggtccttaaatttcccatttaagggctgttttcgtgcttatgaaaccacaaagaacagtgtgttgccgcagcttaagcgcgaaggtgcgttcactgatcaaatttttgattctatattttttagtagcactttgttttttatttctcattgatgacgttttttcatgatatttttgatcactttttttaaattgggtcctttttgaaattgaaatccctcgttattccctgattttatctgatctgatttgggttgatcaacgcattttaaatataatcaattcctccagagagactcttctaattcaatcgctgctgctttgatcacaattgttgaccaaaaatcctaagggggcttccttatcactcccactcatcagtttaataatttggactttcattctgatcagctcggttcgagtcggggttctgatcactttatcaatcactttgatcagctcattgatcagtgatcactcgtcctccttttcattgtcacagggaatgcgttcagtcaatgtgtgatcggcttcatcggatgcgtgagcgcctttttgctggagatcaaacggtgcggcgcgttggaaaaaacttttcgcatggacgaggcgccaacaatgtaaaaaaagcaatgcaaatttaaaagcgccgaattttttaatttaaattttaattgggtaaaaaataaattatttcaaagtcgatgaaatataattaacaatttcatattnntatattttttattgacaanaatatttaaaaatgttttaaatatttannaatgcaaaaattcatttttaattgc

SEQ ID NO: 15572 - DNA, 1421 bp, Heterodera glycines
aaaaagttatagtcaaacaatcatgctggggcccaaatgtgtgaggcccaaatgacgggttccgccgtttcccattttttttcatgcacagcattttagggaacgggaaacatacgggattctcgtcttttttttgaattcctgtttcccgtaaattttttattttataccaacttaataatatacctcctttatggtgacatgaaaatggcttaaaatcgcgaaattcttataaatcatagtaattaaggaaattcttgcaaaaaatgagtaggcatataatgacgatattttttcaagatcatattgggtatttattatttgtcctccgtttttgcttctttcactgtgacatcaatggccaaggtcactttgtcctcgcttttattgtaaaagcctttgctcgggtccatcagttccttaattgtccataattgggtcaattcagggaaagtttaattgtgacacacagcaaatgaaatgaaatcagggaatccgctggccttcgattcgctgttaaaagttctttcttcgctgaattccctcttgatatcagtcacgccgctcttttgcgacacaattctaaatgttgccgtacatttgcaattccaatttgtgtctaaaaataaattaattaatactattaattaattagcattttatttgcaccttcttcttttgcatgacacaaaagggaaaagcccaagcatttctcattgccagtgctttcatttttcttttctatttctgccaatattttccattgcaatcctttgatgtgcatagtttcgcttttacgttcactcaaaaagatttctcgtgcaaattccgacactttttcaatttccatttcaattgttccattggatttgctttgatccaaaattaatttctcccttttttcatattccactgtaacatcaatggtcaatgtcaatttgtcctcttttctgttgtagaatccattgttcggatccatcaattccttaattgcccataattatgtcaattaaaattttcaattgtcactcaccgcaaaagtaatgaaatttttgaatccacagccgacacatggtctattaataacatagtcacaaagtttcccaatagaattctccgcttcggtctttcctgacacaattcgaaaggttgccgaaaaaacgcagttccatggtccacctattttaataatgattatatttttaaaatagtaattaaaattggaccttcttttgcatcgcaccataagtaaaatcccaaatatttcttctcatcagtgccttccgtaatttttcttatttttgcttcaattttccattgagatccagttatatacacggcatcactgaatctgcttctcccgtcagactctcccgcaaattccgacattttttcaattttcatcgaaagtgtccctcttc

SEQ ID NO: 15573 - DNA, 1845 bp, Heterodera glycines
  unsure (1)..(1845): unsure at all n locations
taaatgaaaattacagttttccaaattcaaattcatcgttgagtaacaaacgatcactctagagaagattgcaaaacacattctggtgatctgcaaaaattgatctgatccgaacaagtgagccgcattttgacaaatgtaacgcaaacatttgcaggcaaaatccttaaaaattatcaaattataaaattattccaaaaagggataatcaaaataaaagaattaaaaataaatttgtctttctcacctccaattcgaaaatgagagcctggttatatgccaagaaaatattgcgcaattcagagattggaatttgcacagatggacggacaaggccagggatattgaactttttggctaattagggaattgaataattaataaattaaatttaaaaataaaatcaccggcgtaaagcactgccattgcattgtctccgttcaattcgctcaaatcatccgtgtaaatgaagctcaacattattttgaacgctgctggttcaaagtcggggagctcctccaccacagagcaattagcagagactaattgaaaataattagggcaattagcagagacgaagtgaaaattttaaatagggtagtagagactaattgaaattaacagactttatcacaggcgtatttagggatggggggggggggaaggtgggaaggcaaaaatgaaaaatttttaaatgagaaaaatttgaaaaatagaaaaaacaaaaggagtggggctagtcccttatgtattaatttgcttatgttttcataattaggtaatcccttttgcttactctttcctgcattggtgtcatttgcattttcttgctccgtttggaacatcgcctcaaaaacattggaagaagcaatcagaatggttttgtgcgcatgcacaagcttaaaatttaattttaccctaattaattgtctaaaaatgtaattcgctaattataccgtaattaattaattgtttattaatttcacttgcctctttattgtcactttgcccaaccaaaaaatgtgcatcggcacctttggccgtgctcagcaacaatttcattcgatccgtcaaaatctccggcttagccatgcccattttgtggccattgtctacggcgaaaaatttaaataaatttaaaaatatgctaataataataaattgtgaaggttctaataataatctcaaaatgtacagcaaagaattttctaccgtatctgcccggcgacgaaattttttgcatccgttccatttctgtgattcgcattcgtcgcaattcatcggttggcgtcagacattcattttgatacgaagcttaatttaaaacataaattttaagttctgagcaaccttttaactataattattaatccaattaattgagtaattaccctgatcagctgtaaattcagtaattgttgggtcaggagaaaaagacctttgtcgattatctgaaagtatgaagattagacaattcgaaaacaaaaattttggaataaaatatttattaatggttcaaatcaactcagctaaaagcacggtatacttgaaaaagtcatgaaaacttgattttgtgatcgaaatctaatatctatttacaccaattccgaatcgctaacaaaaatcaaaaaattgatttttgaatttttattcgaatttgggttagggattgggaatcggtagaaaatgaatatcatcatgatcaatgaattcatttagtatttttatataatgccaaaatttataccgttttcattttccaaattcattctctgcatccgttccagttcagtcattctcgcaagcagcagattttcaaattgtgctannatattgacattttga

SEQ ID NO: 15574 - DNA, 3582 bp, Heterodera glycines
taccaagaatgtttaatttagttgagaaagaaaagagttatggtccaaaaattcgtccgacgacgttttgtcctgctccgcctgttggcacctcggctggcatcaatttgaaaacaaacaggacggaaaaaagttttttggcttctcgaaaagaaaagtcgtccggagacggtgccaccccataaattatttttaaaatatgaattaaacgtaaaaagataatttctggctttttgtagaaaaatcagtctttccgaggggtattttttgaaaatttttgtgtacaattgtatacgaaattcttcaccacaacagcacgcactgttgcgcaacataatggtggacaaacggttcgaaagtctgttcatggacccggacatgcaaattgacgaggacagcgaccagtacaaacacttggagccgttgatgaaaaagatggaggcgaagaggcaacgacgaacaacaacaacaacaacaacaatagacaacagaaggggaaagaatcggaatcggacggacaaatgaccaaccaatacggacaattggccaatcagtacggacaattggcaaccaaatgataatggaataacaaacaatgaccataaattcaaatgttgaagattattatgattttatgactatgaatttgtcaatttaatgcatggatttctcacaggtgtcctttgtagccaatatagggagcggatttttaagggcgaaattccaatttagagacctaaataggggcagaaaatcgcgaaaaatcgtaaaagaggggcgaaaatctgtgctttttctcaatgatagagacatgaaaatacctacataggtagtacgccaaaatagggttgcgaccccgacgtgaagaggaaaactatagagagagagagatgagaaaggaagcgagaaagtaaaccgaattgatatattcagaaagaaaggaggaatgggagatagtgaaagaaaaagagagataagatgagtgagagcgcagagagagagagagagaggagaaagagagtgaaaaaagagcagagagagagagagggccgccgagagaaagagggagagagaacagtgagagagagagagagagaatagtaagtcaattgagggtaaaagagagagagattagagagagaacagtaagagagagagagagagagagcaaagaagagagagagaaagcagagaagatagagagaacagtaagagagagagagaaagcagagaagagagagtgaaaaagagagagagacagagagcagagaagagagagcaaagcagagaagagagagtgaaagattattaaaataaaatggcagccataatcaagaatacagcaacaaagttaaaaattgcgaaaatggatgtaaattttataatgaaaatatatttcactattttttacagctttattgtacttaaattgaccttaaccggccgcaactattattttttcaaaatttcgggtcctcaaaagtcgggtcctcaaatgtcgggaatatccgcaaatgtcgggtcctcaaatatcaaatcctcaaatgtcgggtcctcaaaagtcgggtcctcaaatgtcgcaccacgatatttattttacccagtgcagcagttatgtactggttgttgttttgtttttttattcgttaattaacgcctcccctcgattcgtcaactcaacgattcgtcaactcaacgattcgtcaactcgacgattcgtcaactcagccaaaatgcgacgattcgtcaactcagccaaatgtcaacgattcgtcaactcaacgattcgtcaactcgacgattcgtcaacccagccaaaatgtgacgattcgtcaactcagccaaatgtcaacgattcgtcaactcaacgattcgtcaactcgacgattcgtcaacccagccaaaatgtgacgattcgtcaactcaatcaatattacttaaaaaatggaacttaaagcaattgacaagaatttcgagggatgcttaatttttagtctttatgtaatgctttaccaggcgaattgtaggcgcatttgacattgcatcaatttcaattttgtttttcagttttagcaaatcaatcgaatttcaacaaggaaaaacggagaggggatcattatgcatttggcatcaaggtcgggtggttaaatttttcaatggcttcgattttttgcagggttccgtttcactcgcatcagagggcggtggtaccgctgttccaaccgggactgtgaggtaactgcagcattgagtaaagaaggcggaactaatggtgtgctcggaagaaaagagcacaaccatctgccggacccagcgtgtttccacgcggaggtaaaacgcaacggaattaagacgacaacgatggaaaacccgcgccaaaagccatcaaaagtattggcagaagtccgtgcaaacgccaagtgttagagaaggaagtaattattgattaggtgtatgaccccacgccacttcgccatcttccccctcccattcccctcattcagtttgttattgtgcccaccaattttgacctcccaatttattctctgcatttatttattattttattttcttcggcaaataaacttatttaatttgttatcttcggacataacaaattttggcgcagtcagcaactcaacgacagcgtttattttccaagctttatctcgtgctgatattgcttgtgttgattcatcataaaccgatctttgccatattttacggcacggtttatcaacaatctgtgcaactaaaccgcatctttgccatatcttacggcacggtttatcaacaatttgtgcgacataaaccgaatctttgccgtatctcaaggcacggtttcatcttcgacaagaaccgatttttgccaaatctcgaggcacggttatcgtctatttcaagccaattttacggcacatcatttctccgatttcggcaaattaaagggatttataagccattggaccatggacgcgcaacagcttcaacaattgctaaatgctctccagcaaatggtcacaaatgccgcaccgcaaaacgccacaccggcaaatttgagcaatgccaatttggcaagctccatcgatgctcgcctttcaacgttccattacaatccggaggtcggcacaacttttgaatgctggttcaaacggtacggaaaattgatcgaggacgacggaagcacactgccggaggcctcaaaagtgcgacttctcctcggcaaactcggagaggaggagtacagcaaatatcgggacacgatcagtccaacccagccggaccaagtgaattggaatgacaccatttcgcacctcaaacagctttttgccgagacacgttcgctgtttgtccgccgctacgaatgcttcaaaattcgacagcaaccaggacaggacgtgtcgtcacttattgcgcagatcaacgcgtcatgtgaaaacgcagatttgagcctgacaaaggaacaactcaagtgtattattttggtcatcgcgctcagcgatgaacaccatgatttgcgacaaaaggcattgaaaatgttggaggacgctcagaaaaatggcaccaacattcgctcaagaa

SEQ ID NO: 15575 - DNA, 2924 bp, Heterodera glycines
  unsure (1)..(2924): unsure at all n locations
aaaaatgaaatgaaaattcgaaaatgtttttggggaaaaaaggaaanaanctcttngatgaaataaaattaggtaaatgaggaagaattaaattttgaaattaaagagcagaaaaattggtcccataaaattaaacaaaagagaaaacaaattttaaaaggacaaacggacactgaaagaattcgggaagaatttgagcaacaaatggaaaaaatgtgtgaaattgctgaagaaaatgccaaagaagaaaaggcaaaattggaaaaagcaattgaaaatgcgacaaatagtgaagaaaaggaagttctgggacaaagaatacaatgacaaatttggcactttcaattcatcgccatttattgacgaaatttgacaaatttggcactttcatttcgtcgctctttcataaatcgttccttctttcccatcagatccatggcatttctgatgatgtgtactattttttcttgtaactttcattcatagtattatttttagtgtttgatttactgttttatttctcttatacttttgtctttatacggtgtaaatttaactatttccactgtagtggaaatataaaagtgtcaattaattgtttatttcttaaaatcatttaattccattgtttttctgattatttctttctttttcttttcatttaaattgtatttgagaaagaaccatattttccagttttttgaaaaatattagttttagcatttttgaaaatttcagttcaatcctgagttggaggtgggcaatctcaaaaatagaaaaggtcctgatttttacgatttgtcctgactttttatcattttgatattaaaatcagagagaacctcacttggaatcaaatgccggcttattttcttaatatttaaaccctcttccgggagcttggcttgtcatcgttaatttgatgcgatagttgaccaaaggtaggggggggggtcaaagtgacagatgacaaattaaaaccaaaacatttagggttgttgatgatcaatcactattataaataattgcataataattacataataatatatatatataattttattaagtaaaaaatagatttggttaatcctacttatggtcaatcaccattttcaaaaattgcatcataattaaataatatataaattctattaagtaaaaaatagattcagataatcctactaatgatcaatcccaatttttaaatattgcatcattatttaatataataaacaaattatattaagtaaaatatagatttggataatcctactaatgatcactcccaatttttaaaattttcaccatttataaggcgatgagatattctttttttatttttaataattactttgctttttctcatatatgaaatagtgtaaacttaattttctttaaattttcaaattttaccaaaacccttaattcaaaaaagtattttatttttttatatcccttttttaaacactttttagatataagaaattttatttttaagcattaaaaattaaatggttacattacaaagatttttgcagaaaatggaaatatttcaaaaatgcgaaataaaattgtattaatgaatttcagtctttttttaaaattcatataatatgtagtttttattataaataagctttaaatagagatgcaaattccaataagttcatatttctttccctgtttaaacgtgttcaaaaagtagaaaaaaatttcgtgtttcagaatgaaagttgtgatttctatttttttaaattttttggtttttctgcatattaattatttacgtatttttctaaataaattcaagtaaaaatgtcactatttaatataaaaataaattaaaaaataaatagaaatttggatgattcttctaaaagcaatctatttaataataaatgcatcaatatttaatgtaaatcttaaagaaagaaggaatttaattatttaacgcattttcattttcattttttgtatggtaatttatatttcagaaagaaagacataatgttgattaattccgtttttatgattcctttttttattagtatttttcaacaatttttaattacattttcaattgcaaattcatcggtgagttaattataattttactaatttatttcattaattaggttgaggacaatatgctatttgcatttttgaaaggacagaaagaaattcaattcagtgagtattcaagacaaaaatatgaggcacaccttggcattatgcattttatgagaatgaattggcaatgtgacaaaattgcggtgaagtttgaagaatatgaacggacaaaatgcccaaaatatcgcaaatatttggacattttgcacgaatatttgtacagagaatacatcggaatccccacagtgaagccaaaatttgtgtttaaaaaacgaattgaaattaatggaccactgatttatgcggtgaattgtctcgtcgaaatttggctattttattttaaatactattggttaaacacaaatttcagaattttcatttttaatcgttttgaactaaaattgttgaatgagaagagattaaattataaacaaaaattgtcaattaatgaaatgattttggaattggcaattgacacagcgaatgaatggcaaacaaatgaaagtttagacggaataatccaacaaaattgtggagaaaaatttgaagaatatttaaaggaaatgttcaaaaaatcggaagaaaaggcaaaaaaagataaacaatggaaagccaatgaaataaataatggcaaacatttaataattaagcattcgaaatttgatgatcaagggacatgggtgaggagacttaacatcaatgaaagtatataaatccaaattttagactgcagatgctctattttcngaatttgtcaaaggtttagcgacaaatcagaagaattttttaaa

SEQ ID NO: 15576 - DNA, 2979 bp, Heterodera glycines
  unsure (1)..(2979): unsure at all n locations
tctttgcanaacaatcgctttcggtttcccgtcttttctcggagtgtgcaaccattcggacaacacttgctcaacagaagttccattctgtccatcatcagcaatcacatcaagcatcagctgatcgaaatggattgaaaccaattgatcaagatcagtgagaattgtcggtaaaatgcgacggcacaaagcgtcaaattgtccgtcatcgaaaaagcccaagtggcgaatgcttggtgcaaaaattggccaaatttcgcgcgccaaaacatcccaaatcggctcttcatcattggtttgaaacaattccaaattggtgccacttctgtcccaaatgtgcttgttggcatggagaaatgtgagcacagagtggtcaatgtatctgaaaaaataaaaaatgctttaacataaacaacaattttgaaaaaaattactcaatctgaaggcactgaaatcgaacattgttgggcagcggacgatccggcaacggaaaatcgcacaaatttgccatcaattagaacagatagttgcggctttggtccactgtctttgttaattttcatccatttccaaagcgtcaattcgcttttgccatcgaaatgcgtgtccaccagcgcattgaaacggggcgaaagcaatgccaatttgaggccgagttgagggcggtcaaaaaacggaagaatgtccatcaaaacctcgctacaaatccatctgaaagagtgttgagtttaacataaatttttggggatcattaatcatgaatccggcattaatttcgaccaatttcgaacccctgtaccgaattcgaacaaaaagtcgaaaattcacttccctgtttagatttaatgcggaaattggtcgaaattccccaaaaaaacaaagattgtcaatgccattgtttggctcacattttcttcaaagttcgcttgttcattttcttcatttgttctccaaatgctgtcaccgtaaatgaacccggcaattgctgctgattttcactaactgtggcagaagaaattaagcaattgtcggcggaggaaatttttttctttttttcaacgggcgattccattaagaattaaattcgcttcaaattttgtgtgaattaggctaaaatatttcatatcaagtatgtaaaagaatttggagtcgaatttttgagaaaatttttcatttattaggggggggggtgtattttcagaaattttaggttcgattcttagacgagtatttttgctttttattacatttttgttaaatgacaaaacgccaaaatttgttaaaatatgtttatttcaaaatttttttggtttacagatatttgtaaggtggaaaaaaccggggccaggacgttttcgcgtgagtgcctattaggactgaaattggtcggatgtgtgccgaacatacatttcagacctatttcgaatcccaaaccgatttcaaacaattttttgcttttatttactcaaaagcgtcctcatttttatgcttgtaaagattaacaacttcaaatattgacaacgtgaatgagagacacagaatccgaccatcggcatcacgacatttctttaatttttttctttttccggggcggatgacttcttttcacatacatattgacccattgctgaccccccccccatttttgttgtttatctttagtaaaaatttgcccatgggttgatttggtccgatctggcgaaaacaatcaccggcgaattcacttactggcgaaatcaaatacagacgccgagaaaaagagaaatagttcactggcgaaatcactcactggcgaattcactcactggcgaattcactcactggcgaattcactcactggcgaaatcactcactggcaaattcactcactggcgaaatcactcactggcgaaatcactcactggcgaattcactcactggcgaattcactcactggcgaattcactcactggcgaattcactcactggcgaattcactcactggcgaattcactcactggcgaattcactcactggcgaattcactcactggcgaattcactcactggcgaaatcactcactggcgaaatcactcactggcgaaatcactcactggcgaaatcactcactggcgaaatctaacagcgccgttatgtcgtcataaaaaagccaacaaaatgggtataaaaaaccatcaaatgaaaattttatgataaaaaacttcccttaacattggttaaaccaaactaaattttaatttttggtttaatttggtagccctatttctctctattagcaaagttatggccaaaattacacaagcaaccaacctttcatacattcttggccataacttttttgagctgaaccagatagaaaacacttacaaattagggctaccgaatgatatcaagaattaaaaattaaatttgagctaagttatggagagcttgtgcgctgattgaatgagccatttttgaggcattacttttttcttgtcttgccaaattttgttaagttccactggaacctccaaaattaaaccatgacaatccttacaaaaattcaaaatagaaaagttgtaacattttgttataagtaaaatatttctgttttgataaaaattaatttaaaattttttaaaattaactaagaagtcagttttctttcatttatttttcttcccacgacgcctaacggcactccaaaatcaacattattgatatcagtcgagagattaacatgttttttccaggctttaaaatctttttattttttgttaggctaatagaacacattaggctaatagaacacattaagagctttcgaatgataccaagactgttggatttggatgccaaagaaaaaagtatactggaaaaaccttcgggcgcccaaacgccagcgcaaaaacgcgtgggtcccacagtatgtttttataatatgtaaaaacaaaaacatataaatcccgtccctgtttattgtgtgttagaaaggtt

SEQ ID NO: 15577 - DNA, 3735 bp, Heterodera glycines
tctttcatcagtaattagtctcattttgattatgtcctccctgtatgctgcattatgcactaaacgcaccgatcttctgtttgtttcgcaccagaattcggcccgttcgccctccaccacggaaaggtcttgcagcggtcggataaactccgagaacggctccactgtttggcgcgcctcgcagcgcgccagtcccgcgtcgttggcaatttcgcacgcgtagtcgcccgtgtcgtcctgcagtgcgcttggcaccaccagccggaagcggtccgggccgagcttttccatgcgcgaccgatccgacggggacaactgctggccgttcttgtacctgcagcggcgggggtgggccatgttaattaatggtcagtggattggctgctgtacccaccatcggacggtgtgcggctttccctgcgtttccacttccaacaccaactcgtcctcttccggaatggtctgttcgcgcaacggtcgctcaaaccgcggcggttccgccggcatttcctctggcaacagcacggtcagtgcgcagctgcactccacgccgggctcgtcctcgcggtcaaacactttgatctgtggtcagcaggacaattaattattgctttaattgctgctccctacggagtattgggcggtgtcgtccgcgtccgtgtccggcacttcaagccgaaactttgtatccgacacgcgctttggttgtgctttggtttccgcctcgcccggcaccagctccttgccctccttgaaccatttgacagcgagcgctggtgagcggtccgtctccgccactaattttaatttaattgttttgccttaattatttgtccgcctcacttagcactgcccgatgaccctttggcacagttacatcctcaagcggacgtacaaagcgtaacgatttgatcagcttcagcggtgcttcggactgtgcttcgccgcccaaattggacagcaccacctgtgccatttcgtgcgaattaatatagtaaagggtaattaaatattcaataatgccagttttcgttatcctctaatccatgccatccctgcttagtgccattgtcccaattgtgtgccatccccgtctttcctccctcccttgcctccggccaccttataatccgcttcatcgtcaggaccagccgagtggatgatcagtcggtaacagttcccgtcctgctccgtctccggctgttccatctcccgtccgtttttgtaccatttcaccgatcgcaccggtcccttcacctccacttcaaatttggtcggctctcctggccgaacgctgaccggcaccaaaccacgcacaatttccggcttttgctcttccggcgctaaaatttattcggaaattgcattattttgaaattcgattcgatgactcaattgctaagaagaacatttttgatcaacaattgaaggggaatgattggcataatgtcagtcagtcattcattctgtcggggtacgctttggtttggcggctttgacaattatcgcattaattgcgcaattattggcacttttcggagcgaatattgggcaaagcaattacattgttgtgcaataggctaatcacagcaaaatacacacaattatcatgttcgatatccaccgcttctcccccccccccctttagcgaaaattgcggggaatggaaaaaacggcgcattttgccaaaggcggcggaacgagtttagcagaaagggaggacagaacacagtataaaagcggcactccgaagcctgacaaatgcagaaacattcacctctcaaaccaaatattttattttttttatatttttaaaattaatttccgcggattttttaacataaaaaccctttcactttcaaataaaagctcgtgaaaaatgaattttgctctgatcactttgccctttgtactgatcggagttgcttctgtgtgtcttggctcgggtaataattttttaattctgtcccaatttccctggggtttttttcaactatagtaattaaagggctctacggtgacgactacggtggctacggtcaccatgacccgcaccacgacggacaccatgacggaggctatggttatgggcacgaagcaccccattacggtggcgactatggctacggtctgcacgacagacactacggcggttatggctacggttacggtggcccacaccatgacgatgggtacggtggctaccgctacggatacggtcacccaggatcgcacggatacggtcacggatttgcggggttcgcactgtaagagacggaaacggaaagcagcgaaaggagagggaagaagctgtggggagagaaagaggagaaaaagcagtgatcgtacaggatcagcagcatgttaccgtattagcaaatgtccaccatcattacagtaatcagcattttcactttcatttcccaacgaaataaacggctgataggcataacaaaacagaggtacaatattaaaacacaccaagcaaattaattagtagaaagaatactgaagcaaagccaattaatgaaaatggaaagggacggcacgcaaatgattaaagggtcaatcaacaaaaaacaactgggcaaataattcattcaaagattgattagtcacaaaaatcacctgccaaacaaaactgatcagaatatcattgcgaaaccgatcagaacatcattgagaactgattaaatggcattgagaaagtgatcagaatagctgatcaaatgccattgacagaatatcattgagaaactgatcaaatgccattgagaaagtgatcagaatagctgatcaaatgccattgacagaatatcattgagaaactgatcaaatgccattgagaaactgatcaaagccattgataaattaatcagaatatcattgagaaactgattaaatggcattgagaaagtgatcagaatagctgatcaaatgccattgacagaatatcattgagaaactaatcaaatgccattgagaaagtgatcagaatagctgatcaaatgccattgacagaatatcattgagaaactgatcaaatgccattgagaaagtgatcagaatagctgatcaaatgccattgacagaatatcattgagaaactaatcaaatgccattgagaaactgatcaaagccattgataaattaatcagaatatcattgagaaactgatcaaatgccattgagaaactgatcaaaataccactgacaaactgatcaaatgatggaagggatgagcagaagaatcttttttcattgtaccataaacctggcaatcctactatataaacgtgcttttggtccacctttctccgtgatgttggccaccgattccgcgtcgcccgcttcgttgctcactttgacagcgtagcgtccaaaatcgccgtcattggccaattccggcacggtcaaacggaagtgaccatcgcccaaatcctccgcaataactcccgacgcctcgtcaagcggacgtccgtcgcggaaccattgcacgtcggtcggagttccgcccacttgaatgtccagcacaagcggagagccctgtgccgaaattaaatctttttaaagttatttatgtcctccctataccttcggcaggctttgatcctgcatgccttgtctgatggtcggcttttccacttcaattgcttttggcttttccgcttcttcctccaccttggcttcttcttccttcggctattcctcctccatcggtttcgcttcttcttc

SEQ ID NO: 15578 - DNA, 1967 bp, Heterodera glycines
ataggacttttttgcttacatacttcgaatgggtaaccccccctagtcataactcgctttaattcgaaaatttggtagtcataatctatctatctattttatgcttcgtgcataagatgcttgctatacgcataaaaaataaatttttaaaaaacttagaaatccgttcgcccctgttcatgaactcaaaactaaaaataataacatatattaaaataaaaataagataaaaatatttaggagttgaaacttgtttctcatacccttcccattgttcgtcttcattgtcggttccaaatgttccgccaataatgcttccgaaaatgacgagaatgaaataagctttggagaacatggaaaatttgggaataatttttaaatcaaatctgtaaaataattttcattcatttttatatttaatatcaaacattttatataatttagagagttaaatgccaatataaaattgtaaaatgactataaaattatataattcatttttattaaagcgtttttcagcgttttaatgcccaattttgcttttcgcgtttatatgcacacgttttaattttcattttcatcatgcttaacctacgacagcgaaatcatatgaaaaaatcaattatgcaattaattggccatgaaattcacattaatattaaatatttttgccaaaccatgatattacttatgataaagttgcagaatgtatgaggaaattattaaaaaaaaaaacaacatccgacgaagaatttccggctgtcaatttttcaatgttaaaatttccggcgcaagcgcaatttttttaaacccaaaaatggggcaaaaatttgaaaagttgcaacagctcatgaaaaaggccaaaaatccgagcctcaaaaatagaaaaaatataattatatttttttcctcaattttacatttttccttggggtatccgccatgcatttcttctttaaaaagcaacactttattgatgtttcgccaatttatgcaattgtctcgttcaatacaacacaattaatcgacaaggggacaatttctaaattactattttatttttccaaatttcattttcaatttttcttcccctttgtttttgctccattctttcgcctcacaaatcagcttcttattattctctggctgatttgatcacattaaagcaatcattgtggatcagccatgcgccgttgatttttttccacacctgcaaatatgctcccgactcggtgccacgagcactaaaagtttaaaaaaaaattaatatttaaattttcataatttgggatttttaattaaaaaataattatctttttatcagaaaatgctcaaatttttaattaccattccaagtgatagctgccacgctcgaaggcccagtcgccggagccatttacctcctcagtgattatctatatttatatttttatttaataatttcaatttaaaagtaaatattcttacgttaattgacattattaaaagggaattagttaattagtttatgtttatttttacctgagcactgctcacgccatcggccatgtctttctgaaagaacttctcaattccgctacgtcccttcactgggctatgaccgttcggcataaaataacctaatgaaaaggattaatattttaattaacaattttaatatttttttatttcctttgcttaccatcggggtcataaatttcggccgcccctttggcattgccggcgttaaacacgcgcatgaactcctcctggcgtcctttgatctcttggaagagcgcttaaattttaaatatttttattttaaaaaaaccatattaattatattttttgaaatcctttaccccggttcatattttcaagaagtgccgaattaagtggaatatggtggaaaaggttgcgttccttttctgcaccggagtgcgaaatgccattctctctttgcatcatttctgcgatataattaatga

SEQ ID NO: 15579 - DNA, 2779 bp, Heterodera glycines
aaaaagaatttaaaatcaaaaaaaaatctttgtgcatgagctaataatgctgagaaacttttataattttacaccataaaaaataaattttaagcgaatgcgacgcaatttatattaaatttatttccggtaaattcgtcatatatttttctggaattaaaaaaaatgtttgttgcgtaggcgagccaaataaaaggttttttcaaaaaggcattcccaaatatgtcagtgccatccaatcatcggtgccgtaccgacagcttttacaaccccgcgaagaaggggctaagcaccacttttcctcccctctcttctcaacacattttgatgagaaaatggcatggcgcgcaaatggcataaaaaagaaggaaattggaaatattccacggaaaaacttacacatcgttttgcggatttggagttcaaatttcacttcagctggcgctgaaatattcgacggtttgagtaaaatgcaaaaaaaaagtgggggaggagggcacttaaaagagaagggaagagctgctgaaatgagatgaaaattgtgccattttcacataataatggcgaaatataatgatattaaatctgcgtacccttcagacatgagctcacttaaatatgtcatttaagaaataacaaattttaggagtttttatgtggaaaaatatttaaataaaaatcttttacgaatcttaattagtgttaaaaaatattttatcgcaaaaattattgtatatagaaataattttaaaaaaatttgtcttcaaaagcaattttcttacgaaaatgaaacgcttaagaggttccaaaatctcatgaaaaatgagcgttttccgtcttacaatgaataagcccggaaaggaacggcccggcccaatataaagggccaattttggcactaggaaacataaaacggcacggacaaattggggtaacatttctaccgaaaacatggtgtgatggaagagaatgtttatgccaagattggttcccaaattggcagcaccccaaaagccttattattttcgctgtttgccgaatattatgtgtccggttgggcttggattttggtggcatctttttcaaatgcttcggcacctctcattattattattatctttttggccaaaaatgttcccacatttgtgacgaagaatggatggacgattcattatgcatcacaaaatccattgaaaacaaaattcattttttgtggatttcaaataggaaagtgcacagctttctcaaaaatagaagggagtaaaaaaaaatatgaaaaacaggaaataaagctattcgaaaatttggtttattgaattagttaaaaaggataaaatagttattggttaatttttataaaaattaattttcacacaaattgcttttcaaaattttagcaatcaatacttaaaaaaagatttatgatttgagagcggacttatttatttatttcaataaaagaaaaagccaacaaaatggaaaaatgcgtttacatttagtttgaacataaaggacgggggcggaggttggcgattagtaggagcgacttggccacgcaaaaactgccgtttacgggggtccaattcctgctattttggccaaaaatacgggtgagcggccgcaaaatccccgcaggggcccttctctctcgagttaacactaaataataacccagtgtattttaaatgaatattatatttttcaactaaaaatggggatatagttgaaaatatgaaaagttttaaaaaattaaaatttttttaaaaaaatacattgttttactaggaataatttaaaatttttttcataaacgctaatcttgttgaccatgcatttccaaacccctatgttgggatttcaccccttctaccggtatttaaaagcaaaattttagagaattttcagtcaaatttgattttataatttaatgataactggccattttccttaaccttgtaacaaatttttgtcacacatatctaaagaaagtccaagacacgtcaaaaaaaaaagaattcaaaagcaaacactatttactatgataagattgcgttaataaaaacgatgataataaagaaaggaaaataatgatctattaatagttaaaaatcctctataaattcaattatgccgttgaataacatacaattttcatggcatttcatcaaagttattgggcgcagcattggtaaacaacaggggtggggcgcgcacagaaaaatcccgcggtcgcggatcgctcatcgcggattcaatttgccgcggtcgcggatcgcgcaaaaaaaatcccgcggtcgcggatcgcgcatcgcggattcaatttgccgcggtcgcggatcgcgcaaaaaacgccgcggatcgcgcaaaaaatgccgcggatcgcacatttgtaaaagcataattagaaaattcccatattatcaataatcaaaattgtaaaggataatattatgatgaagaaaaataagccgttcgagattttcatgcgagatactttttcggaggtcattcaaaataaatcctgcatacaaagtagagttccacgggaccgggaatttttgccaaaaccgggaccgggacttgccgggacctgagaagccgggaccgggacctcgattttttttcgggaccgggaccgcaagaaaaaccgggaaccgggaccaaccgggaaattttaaaaattcaaaaaaattttaaaaattaaaaaaaaaaattcaaattttaatttatatcaagtgaaaataatacaaaattatttggttttttatttaataaatta

SEQ ID NO: 15580 - DNA, 1653 bp, Heterodera glycines
cattgatcgaaatatcagtgctttgatcaaatcagaaccctttttgcaaattgatcaaaatttgttgtgtgaaattctcggaagagatgagctgagaagcagtgaaatcgaaatttggaatgcggtaaattaaatattataaattagaattatttattttctaaaattaaggcactccgttggtccgacgaacagtgccgtcaaaatgacattgaatgttccgctgaaaatcgacgcgaaatacttggcccggcattgttaaacattcattttccactaatgccaaaagaggattttacaaaaagcgttggtaataaataatattttgatgattagagagtttgctatcttgaaaatgcttgaacctggcttggattccttgttggacctggacctgtaatggttccaagtctggattaagggcttttcataattataccgtatttcatcggataaaacccccttcaaaatggggttatactcgagggtggggctttaatgttcaacccttttttacaaaatttcaatgtttttatgcaaatttttccaatagcaaatttttattagtttttgaaataggtcaaaattattgctacaatttaaatcttaacctgaaatttttaaattaaaaagatttttcattttttggaaccttggaaatttaggcgaatgcttgaaaattcataattcacttcgaaatggatcaattaaagtgcaaaaaagcactaaaaatagagaaaaatctggagaatttatactttttttaaggattttctagcttaaaatgaagaagttagctgataataaattttggaaaaattcgtttttcggaaaataattaaatcactgttatgaaaaggtatttttgaaagaaatatacgaaaaaaaatctgcaattttttccactataagattgtctttatttcttatcgaatcggaatcaaatttttattttgcactaattataattctaataacctaattccatagacttaaaatttaaaagaccgtatgtcgtttttttaatattacaatgcaccaggtcaaggccaaacttaattgatgactcattttatgaatgaattaattgtctaattaattatccatttcaatcaaatttcagttccaactggtgtgttaacaattgaagaagtgaacagcgtgtatcagcattattcccatcaaaatttaagtgatgccactgggcttttcccattgaaatttccaacgcaccgacggaacaaaaacgaaggcacaattgagatggaaattgaaaaagtgtccgaatttgcgctggagccggtgggaagtggccgatttagcgatgccatggacattgggggatttccatggaaaataagggcacaaatcaaaacgaaaaacgaaagcaatgagaaatggttgggcttttacctttgctacgatggccctaaaaaaggtaaaaacaaaagtcattttcgtaaatctgtcagggaaaaacaaaaaaaatattatttcttacttgttttaagcggaggaatacatttactaaattcttttttccagaggtttttaaatattatttaaatcattcgaactaaataaacgattatgtagacaattttctacaaaaatagaaattcaaaaattaaaaatgcatgtgaaaaggactag

SEQ ID NO: 15581 - DNA, 2074 bp, Heterodera glycines
  unsure (1)..(2074): unsure at all n locations
caaaaaagcactaaaatagagaaaaatctggagnaattatacttttttagaattttctagcntanaatgaagaagttagctgataataaatttnggaaaattcgtttttcggaaaataattaaatcactgctatgaaaaggtattttgnaaagaaatatacgaaaaaaaatccgcaattttttccactataagattgcctttatttcttatcgaatcggaatcaaatttttattttgcactaattataattctaataacctaattccatagacttaaaatttaaaagaccatatgtcgtttttttaatattacaatgccccaggtcaaggccaaacttaattgatgactcattttatgaatgaattaattgtctaattaattctctattccaattaaactttagtttcaactggtgtgttaacaattgaagaagtgaacagcgtgtatcagcattattcccatcaaaatttaagtgatgccactgggcttttcccattgaaatttccaacgcaccgacggaacaaaaacaaaggcacaattgagatggaaattgaaaaagtgtccgaatttgcgctggagccggtgggaagtcgccgatttagcgatgccatggacattgggggatttccatggaaaataagggcacaaatcaaaacgaaaaacgaaagcaatgagaaatggttgggcttttacctttgcaacgatggccctaaaaaaggtaaaaacaaagtcattttcgtaaatctgtcagggaaaaacaaaaaaatattatttcttactcattgttttaagcggaggaatacatttactaaattcttttttccagaggtttttaaatattatttaaatcattcgaactaaataaacgattatgtaaagaattttctacaaaaatagaaattcaaaaattaaaaatgcatgtgaaaagtacccgttcaacttaataagtaccggatttaatgataatggtaattttattgaatatttatttattgtgcagaaaattggtcttgtaaaagttcggcaacacttcgaattgtttctcaaaagaatggcacggaggatttaattggaagaattggtgatcgcatttttaataaggaatggaacaattatggatttaattatttcattagttttgcggtgagtgggattcaaataaatttaataaacttcatattttgaaattaaaatttttaaaattttaaaaaagaaagtgacaaaaaattgaatagaattttttgaaattttttggttataactctttgtaattttttttctagattttaaaaaattaaataagataggatttgataggatatgtaatgcatcgcgtaataccaatttttattaatttaactaaattcaagctaagttatgctttcttattagcaataaaattaaaactaataataaatttaaatgtttctatcattgacacttttgtaactttggctcaccatgattttatattacataattgatttaaaattaaagttataatcggaaacattgctgattttcatgttaaaaaaaattaattacaatatttgtcaaatttttgtattgcaaaataaatcactaaaaattaaggaattgttgaatccgggcaaaggattttacgacaaagatgaggacaaagtcacattggccattgatgtcattgtggatgagccaaaaactgagaaaattatttccgatccaaacaaatccaacggcacactttctatggaaattgaaaaactatcggaatttgcacgagaagtcattagaagtgaccgtataagcgaaactgctgtgtacataaagggaatgccatggaaaatatcagcacaaatcaaaacgaaaagcaatgagaaatgtttgggctttttccttttgtgcgatgcttctaaaaaaggtttggttataaaattattaatagaaatataattattttttttataaaattggtgtaattaattattgaaaagacttatttaaacagtaattttttaacataaaattagaagtgattttttaaagcctaaggaaggtaaaatataaatttgattattatttaatttgctttaa

SEQ ID NO: 15582 - DNA, 1630 bp, Heterodera glycines
  unsure (1)..(1630): unsure at all n locations
gtcaatgtcagcttctcattggtccgttcgttcaccaattcaaacagttcaattggtgttgtctcgtcaactccgcaataaatttgtcactggcgaaatcaatcactggcgaattcactcactggcgaaatcactcactggcgaaatcaatcactggcgaattcactcactggcgaaatcactcactggcgaaatcactcactggcgaattcactcactggcgaattcactcactggcgaaatcactcactggcgaaatcactcactggcgaaatcaatcactggcgaattcactcactggcgaaatcactcactggcgaattcacctgccaccttttattttcagtggcatcaataaagaaagcaaacaacaatttgtgctatttgtagcagtgaaaaatatggaaaacattttaaaattgttagatagatgacaattaagtgcctgctatacacagacaggcctgtagccagcgaaatgaaaaaaaaaaataaaaaattttcaagaaaaaatgggcaaatgttttaaaaggaagaaaatcaagcatgaaacattcgcaaattctttgtttgccttgtttttcatgacaggatcaggcacgtattcagctgaagacaaaatattacaccaccatttgaagaactgtgccaaaacggcaaaaaaataaaaaattttttttttttgaatgttttgtgtatttcaacaaaagcatctctgatgagagaaaatcaaatcaaatgccaattggagagatcgtcgaccagttctcaaatttatgtaattaataattcacttccgcgcagtcatagacggcattttcaaaaagaatcactcattcattccgctgatcactgctgggcccagccgcttggaccttccgccggtggagacaacggcctaaaattaagaaacgcgatttgatttgggtgaattttgcacatgtttttcgacaaaatcaaatgcttttgttctgctgctcacttagccaatggaatttttgccagcaaacctattaatttgacccaggttcagtttttcgacccactcttcggaatttcccattgaaccgccccgggggattgnnnntcaatggggaaaggtttttaaggccatttaccctctctctcctcggtctagggcggctttccattgggtcgttcggttcccaattaaaaaatataaatgggggttcgccggaaaccccgcataattttgtaaatgggagaagggcgggaaagaaaattggttaacgatggacgccttctcccaagaaaaatttttataggggagggataatattccctctaaataaaaaaaaaatttttttaaactaaaaatttaaaaaaaatttttttttaaaaaacataaattttataaaaatgttcccggtttttctcaatttttgggagaaaggggctcaccaaaaaaattatggggaggggcacaccccaagaccaccctcctcatatagggggcccccttctttttttttacaaaaaaaattaaaaaaaaacccctgggcggcggccgcgtccccccgcggaacccccccccnngccctactttttttttttttttttttttttttttttttttttttatttttttttttttatttttttttttttt

SEQ ID NO: 15583 - DNA, 1174 bp, Heterodera glycines
taaggggggacccttttgttttgcaaaattttttttgtgagtcataaaaatttattctctggggtttttggggtccccgatcacgaatccttcaattattttgatcaattccgatttcctaatctaaatttgaacaaaaaatcataattttaaaaatgcaaaatttcgatttttattcgagttcgggtaagggattagaaattagtcaaaatacttgtcagattcgtccaaaaaattgccatcaatccgtacagaaagtctcggctttggtcctttgtccttgcgaactctaatttccctccaaattgttaatcccgtcgttttgccatcgaaatgcgtgtccaccagcgcattgaaacggggcgaaagtaatgccaatttgaggccgagttgagggcggtcaaaaaagggcagaatgtccatcaaaacctcgctacaaatccagctgaaagagtgtgaaacatttgttttgtttctaaatgccaaatttgaggccgagttggggacggtcaaaaaagcggaaaatatccatccaaatgtcgttgcaaacccaactaaaatgcggaaaattgctttacctaattggggaagcccaaattcagaattcggaaacgaaaaattgccaattttgaatgaccgtttcaaatttgtccccaaccgtcgattcattttcttggccattcgaacacttcgccgttttccaaatgctgtcacagtgaacccatcggttgctgttgttcatgttcactaatttcggttgaagaaatgaggcggcggttgtcggagaaaaaatttttcctttttctgatgggcggtgccattaaaaataatttcgctaaataattgaatttttatcaaatttatgctgttttcgacacaggcgagtccgtttttggctccaagcgcaaataagttcactatgggcactatgggtgggaccaggtcgtttcggcgctcagccataactcgcttcattcccaattaaaccgaacaaatttgagatcaaaacattgcaaatccagctgaatgtctgcgaaaaaaaattactcaatgagaaattcatttttctgtaaataaaccatggtgagcttttatgcacggcgagtcaattttgggctccaagtacaaacaaatttattatttatttagtaatcagaacgccaaaactttgcaa

SEQ ID NO: 15584 - DNA, 3752 bp, Heterodera glycines
aaaaatgaattcaaattttgaaatgcttttattttaaattacaaatttggttaatcgttcaggtctcgtggtacggtcaattcgaacgctcggattagcggccctttacccggtttacaatctttggacctcaaccgggacgaaacgtcatatgagtttttttattaaggcaggcatatttaattcgttttttaattacattgtttcttattttgatgtgataattatgagtcatttttcaggttaacagtctattgcagaaggctttggtgggaatggcaaatataaaaactggcaagtgtctgggttgggcgagaaataatttttaatttcaaattaagctgggaccatcgcgcaaatcgtggcccttcagaacaagctctacgacgaccataccaacaaaatgcgtgacagccaagccaaattcgacgccctaatggaagagccgcgcctagttcacggcactaatggagcaaagccgagtcacccattttgcggtgcagaaccaaatgattgaggccatattgaaggtgagcaaaatgagaaaagcagaccaaaaacaatttttctttttttagaattaaaaaaatttggtttttctaattatttttgacggcttttgaacgaaatttttaaagaaaaatcgaatgaaatattttgttttggaaaagtcccttttcatgggtattttaagaaatttggagggccaattcttagtgttttatgtttaattaacatgataaatcataaaacaatttccatctgatcaatcattcattgtcatttttagatcttcgaccgcaacgatggcaaatgaatgtgcttccgcgggggcggatttgttattattaagtgccggccttttaattgccagccattgtttgttgcctaattaaggcgatgttcttaactaattaattttatcacttattatttaactttttgttgtcttttttaaatatttaatctcatttcgggcaagccataagctgcttaacaatcttttattcttttctcatcataatatcgctttttgttttttttccattttgtttcatgttggataatcaaaattttattcatttttgatttggtatcataaatttaaaattcaaaatgcgcggggtggtaattagagaaaatacggtatgtgtttttgtttatttagagtcccggagaatgaatggattatcattcttttttaaacccattgccgcttaatgtgatggtcagaagttttttgctgttctacagtagaatttaaaaataataaagtttaatattattttttgtatattcaaattgcaaaaatttattttatttcactaaactttttttaatttgaaatttaatttgaatttccccaatttcattctgctcgagaaattcagctcaaaattcgatttgtgagctttcgattgatactatatgtattgggttgagcagcataacaaattaatgaccaatcaaatcaaatgatgaggtgaataaccactgaaaatattttattaaactgagaaacatacagaaaataaatgagccgacttggtgacacaattttgacattttttcaattcgccattttacaaaattaccatattttggataattaaggttgggtaattaacactaattaaattttttttttgtctcaataattcgcctgtttagtctcatttatatctattgtaatccataagctaattgaccattaaagcttcccgtacatttgtccgatttataacggattaatttcgtttttaaaataccaaattcaattatttaagactgaaattgtttcaatcaaatggtgccgacaatatttaatccctttcaaaatgtgaaccccaaaataatttagccctattaataattcatttaccaaatttatatatttaattcgcgttccctcttctgagtttatccatctgtcatctgtgttttgcttgaagccaatcagaaattgtctatttaaagagacaaaatttaattaaatattcatttttatttataaattgcaaaaagaaattacaaagcagtgaccgtatgatgctccgttcaatcataccgtacacccagaactgtttccaattatatgtccttttgccataaatgcaaccgctttttttgattttatatttaaaaaattattatttattccttaacacaaaaacccaattatttccaatatttttaaaattaaatatttacattaaactattaattaattaagccgaaataatttcaattgaatttgctactaaatatttcgcagcagagatggaaaagcagcagcagtcaaaaagtgatgatcaccagcaaagtgatcagaagcagcagcagcagaaaaaggccgtcgctgttgtggtgccgcgaatcgtgcggaaggaaaacggtgggaattttgtaattatgtacagtaccatttgggcattttctaagacataaaaaatataaataattcaaattaattgctaagggaattcaactgccaaatatttttttactaaatagcatttaaaaaacaaaatgaaaagaaataattttggaaaaagcaattagcagaaaagaaagaattttgtttttgtttataacagactttattaaacatcattttgctgtttttacaaaaataattaatttgaaaaaattttcggcatttgacttattttacaaatccatgtttttttgaaaaataaatgataaaaatggaaaattgggggattttgaaaatgcttcttctcctcggacaatccctcagaaaaaaaatttaaccatttaataaataagaatctaattaatgaagggccttaattacggcaaagttaattaatggaatttgaatattcaaaccagccttaattgttcgtttgtttgtgttattttgacttattgtggtcatttactgtgcgtgcgtgcgtacgtctgacccccctcactctctctctctctccgtcccgctctctctctgcccaattaatgatctaattgaacgcccgcccattggacgttctttgatactctccctccagctagacacggcacacagtccaattcctagcaaaatgtacccaaaagataatccccacctgctgaactgtgatgagagaaaaacaaaaaatgaatggaatgagttgagcggggcggggcggggtcaacgccctcacttcactttttaccgcacaatcatcattatttagaacatgttaagatgcatgttcccacaaaataattattttctttagttccatacaattgaattgttttccatttaaatttaaattaaatttattaatgctttttaaaaatcatttagtcctcccccgcccgtcctttccaattcttccgatgtttggccaacagcccatggaaattgacgccgagtcaccgaagggcattcggccaacaggaccaggttggatggcatatatatatatatagatatatataaatctgagagtatctgggttgggcgggaaataaattttcaaattaagctgggatagtcgtgcaaatcgtgaccctccaaaacaaactgtatgacgaccacacgaacaagatgcgtgccagtcaagacaaattcgactccttgatggcggagagtcgcgcaaatttcgtctcacagatggaagaaagccgggcgaatttcgtctcacagatggaacaaagccgggcgaatttcgtctcacagatggaagaaggacgtccaccacagttcgcggtgcaaaaccaattcgttgaggccattctaa

SEQ ID NO: 15585 - DNA, 1375 bp, Heterodera glycines
caaaatttaagggtatttaaaataatttttttaatacaactataaaaaatttgaaaaaaaactagaaattgtcatagtttttctgataattttttcggcaaatttatccaatttttcttataatcatcctttcaatcttcaatgattcttttatccaaacagtttcttccattttgaaatgttcgttctatcaattttcatcatttttgcaattgcccgttcactcatttttgggttttctttttttatttcccaataaatttttattttttccattttttcttccttcgttattattttcttgctaatgccaaattgtttcttccatttgataattgtccctttgcttactccaattttcttgcaaatttcggcataatttttgttccattcttttaaagaatattttcctttttgtttaaattcatttgtcatttcaatgaatttttgaataatttgacgtttttcttcatcagtttttgatttgtaagatttgcgtttttgaagaccaaattctttgatccatttataaattttgtttcgatttgtccccaatttcttagctatttttctttcaatttttttccattcttttcttgggtattttcttcctttttgcttgattttctcttttattttataaaattttgcaattatttctctttttttgagttcatttcgcctttcttcttccttttcttcccatttttctccaaaaatttcgtcaaatgacttttgtttcaattttttcttctctgctccaaattggtcaattttgataattaaaattacaattaaaaagaatagtggtaataatttcatctctttaaaaatattctcaaattggatatttttttaaaaagaatgatttttattattgatgggtatttatttatgcaaaaattttctgtttaaacaaactacaaaacattaaaataatcttagagctctgaaaaaatatttttaaaaataaaaaattgtgatttatattatttattttttattctaatgcagggcttccatcgaaaaaatttcaaaataagaacatccaggccataaaataagattttagggtcaaaaataagaacatttaacaaaaaatacttaaatcgcttgtataacactttatacaattaatatagcatcaacttttgtatttttcgcctccaattatcatatttaacgattttgggaagtaaattagcaaattcagtgcatttttaatctaaaaaaacaaatttttgcggcgcatttttccaaggaattttggagaacgggggatgggagtgggtccggcggtgccgataggcgccgccggaaaaattttgtaatttttaatgcgatttgttaacagattttgtctaaaaattgcccc

SEQ ID NO: 15586 - DNA, 1129 bp, Heterodera glycines
tttatctgctccatctccgcttaaactccgcctaacgagagcaattaaacttctcaggccgcgcaaaaatgaaataatctcgctgacgaaagtgcggcggcacgtgatcacgtgaatatttttatggcgtgagaaacgaaagaaaaatgaatgaagtgaactttggaactctgaaaattgtaactcatacggtaaacaaaataattgggcataattttcatttttcaattggttctctattttcagccagttaaaatcgcacccctttgattggttatcagcccgggcctttttgctttaccgcaatttatttctcttttttttgtctcactttttctctctctttttttgtttttggcctctttctctcttgtttctggcctctcattcgttcaaaaagtttttaaattggtcagttattcggctgctactaggcctttttttggttatttttggcttctttaattcctctcttttctctcatccttacaaatacgcccctttagcgtttagactagactgggcaaatttttgtgtacctctttctcttcgtttttcagtgtccctttagttttcaactagcccggacagattttctcaattcttttctttaaaagtccctttagtcttcgactagcccggacaacattaaatctcagacttctttgtttctagccctcaggccagggagatctcccacaaacttctgccggcttacccaattctcagcttcgtcgtcaatgatgggtcgtttctcaaaatgggaaccatccggtgctaccagtgagggaagcgcactgtgccctaagaccaactatgcaccgtttatcccggatggaatttgggaggaaatgaggaaaagccaaagcgcctttgaccaagccccgaacccccaaacgactcattgactgttaaagatgtgtttattcattcgttgttggatttacagaagcgagaaattggaataataattgaagtctgttccataactaactgactaaatgatcactggggaaggagaaaatgcgaagagaatgggcggagaaacattacaatgagaaaaggaaaaacgtgtgaaatggataaatgtgatgaatgataatggccactagtgaaatgagggaaatgc

SEQ ID NO: 15587 - DNA, 2433 bp, Heterodera glycines
  unsure (1)..(2433): unsure at all n locations
gagaccggacagctggggtcggattgatcccaagtcgggatcccgaatttaatcccgcgggatcccggccggtgtttaataatcagggaacccaacccgcccccccccccctcaacctttagaaatttctgcatattcaattattaatgtgcaaacatttatttattttgttatattgtatttgtatgctttgtgtataattctagaactaattaattccattgacaatgtgcgctcaaagttgatctcggatggagtgttcaaaaacacgtttaatcgcaatgccaaagcatcaaatgaatttcaacaactcattaacacgttggagcacaaatttgtggaacaaattggccaacaaaatgaggaggatggccaagaaaacaaacgctacagcctcgtggacaaagtcactttttggcaaaacagtgtccgggtttcggagaaagccggcaccgaagtgctggatgaattggaggaaatgcgtgctaaatttgtacagaatgcggacgaatttgatcagcaggaatggatttttaacagcaaaaaaggcttttggctgatctgagtgttctcccggaaaatgcgtcagtgaaaaaagcatcttagaaatttttaagaaaaatttcagaccttttcctagcgtatttttccagatttttgaaaaaaaaagaattcttcatacaagttcgaaaaaggttttaaaaacttttcacttgaaattttcatataaaaaattttttcgaggcggggggggggggaacagtaaatttttcaaagtctaataaatttttcaatctaagtcaaacaaactaagaatttttttaaaaagaaaaaaacagaaattctttaaatccagaatttatgtttttgttgttttggtaaatctagagcttagatgaataatgtgaaaacatgaaaactaatttcattatatagaggccaatatttggtaaaatttttcactttctccaccaaaaattaatttcttctgactagagttgagcgggaccgggaaatttgacaaaaaccgggaccgggacttaccgggaccagaaaagtcgggaccgggaccaggtttttcgaccgggaccgcgaaaaaacccgggaccgggaccaaccgggacttttcccaagtgaaaattttttttgaaaaaaattgaaaatttaagtgcactttgttacgaaaattgccaatattcaaaaatgtacccataaaattttgtatttacgttttgggggacgagttcgaggaaaatttttaaaaattttgttttcagggggggttcatggaattttctgagtaccaaaattatgtatttttttaaaataaatttacaatcttttaaattttttgcttttaaatcgctgtttttgtggcaatgttttttcaaaaaacttttttggaacagtgggagagggggcggggtccggcggtgccgataggcgccgctggaaaaattttgaaatcttgagcgagatttggtaacagaatttgtcaaaaaatgaccaaatatttggttaatttatgggtttttaggctattaaaaatgaaaaaaataataatttaacttaaaatattttttattaattaaattcaattaaaataatggtaaagaaaatataaaaaaattttctgttccatcagggaattgaaccgaagagacaaataatgcaagtaaaaaggtttagccacttgaccacttatgcagatggacatatgctataaatgaaaataaataatttaatttatttttatcaaaaatttctgatccctcaccaattcccttctcttttctcacccagacccccattcttaccagtccttatttagtcccgccgggaccgggactggcaaaaccgggaccggatttatctttttccaaaaaccgggaccgggacctgaaaaaaaccgggttttcccgccccggcccggtcccgctcaactctagccaaaactgatgaatgctaaatattaaaacaataattttataaattattcttcattatactcgaaaaatgaaatgatttttattaataaaaataaaatttatattttaaaggcttggaaaacaataacaataataaaatataaaatagaatccattccgccaaaaccatacaaaaacataagtatcagtaacaacacgaaaaaaaatatacaaaagtaaagcagttttaatcgtgagaaactcatatttttcttttattattttcaaaaatgtttaaaaataaatagcgtaaaggtaaagaaagaagaatattngnntgnggtccaacatgggggaattccgacctaatgcagcttttggggattaatactgnggtcagaaatacgatttttggaaatatcgggaatgcaaaagatcaacaaaggacaanagagtcgaagtgggcacgagggaattcgaaagtcccaatgttgtgtcgaatgtg

SEQ ID NO: 15588 - DNA, 1499 bp, Heterodera glycines
ccccccaaggcccctccgcacgcgaaatttttatggaaaaaatagtatttttgctgaaaattttatattttccttttttgatgaaaatctgctaaaaatggctcaaaatcacaaaatttttttcggacaaaattcgttaacaaatcgcattataaaatgcaaacattttcccggcggcgcctatcggcaccgccgcggacccctgttccccaaaagtttttggaaaaactgccgcaaaaaaaagtggtgtgaaaagcaaaaaaaaaaaaaaagaaggtcgtcgcccggaggtacgccctccaagcagccgaaatcctgggaccgtccctggacccctcccaatctcttttttgtatgttttatttaaaaatatttaaattcatccgtacattccttgaatttgtcactgttgcgtagtttttttgctatatgttccggcactgattgttcacctaacaatgctttcagtacgcaatcgatcgttgaacgttcgacaaattccgccaccatttcaagcgcattaatataactcaaaggctcccaactttcctggccgacatattctataaaaaaaaggatttttcaagtacaattgtcctgggaattaggggtgttttgtaatacttcaataaaaccgttttataaaaataaacgcgttttcatatgaactttatgtaaaagcaacaaaaatttgttttttttgtttacaaatttattattttaaaaaatggggtagccctaagttttctctatttgcttgtaaaatttctaaaaaaaaatatttttgtttcaaaaagtaatgccaaaatgttcgaaaacctaggggtttttaggagtgttttttttttcacaatttacaaatttttttaaatttaatttttctaattattaccaattatcagcacacaaatttgtttttaaaatattaaaaattactaattaaattaccttctccccaatcaatatagtaaaattgacttttgtcccggccgacgaacattgccaaaatttttgaaacagtaaaacattgcgcagctttcttttcatcaatgccttctttttttgcctccaccatttttctttttctgccttttgattgacacattttgttttcttaaaaatatgaattaataaattaatttagtttcttcttttacagtttaagtcccatattttttttttcacatttcaaaataaaaaagccaaattaataagctttcgggatcatttatcaagatccggcaagcaacggttttcgaccctatttgaacatcgggcccaaattcgaacaaaatccaaaaaaatttggctgaacattcgtcaaacccccagaaaaaatggcgcaactgatatagttatggtcgaaaattttttctatgggttgacacagcggcccaattttgggctctcagtgcaaataggtttattatttatttagtaatcagaacgccaacactttgcaaaacttaaaattttttttgggattttcccttgtaaaa

SEQ ID NO: 15589 - DNA, 2552 bp, Heterodera glycines
ccgaacatttacaaaaaaaaaaaaaaattatttttattttttaatttcaccaaaattttatcttttcgtattagaaattttccgcgatggagaacaaaaaaatttattgtaattggttttcttctaacgaaatgtttgtccataacacaaattgatcgcttaaaatatatagggaataaaatggcgaattttcaaggctctaatgataaactttatcaaaaataagacccaaactatcggtaaatttatttaattttgaataaatttttttaaatatttttttgtggctaaagtgttttcgtataaaagccaatccatctccatcattttttcccgcaggattattctcattggctttcgttttgttgtaactgatcattgaattctttttttcaaaaataaggtactaaaaaaaggtaatgagcgcatacagtaaatatacggtgcctgttactaggtgtatttcattcttctccatatcaagtttaagcaaaaaattaataaatcaacgaatacagtaaaacataaacagataatttaagtcaaagtaagaatcaatttaaaaataaacagaaagtcaaattgagaatcaattaaagtgggatggtatagatgactcaaccattctcgccctttcactgacaaagcgacggatgaacgtcgagcagtgcagcaagacgcatggcggcacgcaacgtggagaaaacggagccgatattgtacgcctcgagaatggactttccaagcccggtggccggatcaatgacttctccattgacatcgtccacgcgaccctttagtgtaaataagcaacatcatcaaatttgacagtattttcggaacgaatttcgggacgcataaaaagaccgtcacttgtcacagaattttgccagttacctaaccttgactgactgatctcgtaaggtggaatcacccaaataaactaaattttatttcgctgggacggggagttctcacctggtactgaaaatgatgaaaaaaatgtgtttaaaccatttatattattacaggcacagcaaacaaaacgtactttgagaaacgcgcggaccaatgacaatggcagaccattgttggacaagccgcatggagcgacgagaatttcggcgagtcccgaattgatctctccccgggccgatgcttcgttcagtctggtttccagcccatcgaattgaagctgcagaagaaaacgaacaaatgaaatatcaacaaaaaactcatcgattgcatcggcccatccgtctctctctgttgaccttcgccccttcacccacaaaaattaccaaaatcaaaaactaaacttgtccacttttgtaagttttttaaatttcaaccatcgactggcattactaagtgccccgtaaaccaccaccacacctgaaggattcccgcatcacgagcttccttgaagctcataattgaaccatccgcagcatttctcactccttttacatcgaagatggtgtgtcgaacacggctggtcaaaaggccccgttcgtgcgccatgaacaaattaattttctctcctctgtgtatgccaacttcacccagagtcaacacaatttctcctttcggcgtcaatcggcctcgcttcagcgcctctccgatggaaatcagctcatcgcctggtcccgctttgatgtgcgccacatccgggtcgagcattcccgaacaaatcgcctcgagcagagtgcgaggtttaacaccatcgatgaaacgaccatcgttgtccagcgagccactatcaatgacctcggccaaagtctgcggcttttgaaccaatttgagttggtacgcatcatgcagagacatttcggtgcgtccgttcaaatcgatgaatcttcccacccgcatacgcaaaatgttcgcatcctccgcctccacaacagtaagccgtcgattgtttgccatgtcaatgatttctcgtacgttgtttttgaccagcggacgaggttgatggatcgcatcgaacaatgagaactgatcatcggaaaaacggtcactgaatttgccggtgttttcgtcgatgaaccacataacgcaatcggtaagtgtcagtgcgattcccgttgccatgctcggcaatttgatgaaaccgcgccgcagcgcttcgtccaacgaaattggatgctcaacgcatgcacaatgataaaaaattccatttgatggatgaagaaagtctaaaaggaaaagccattgcaacatgaaattatgtgggcgcctgtcggtagctatgcatttttctaaactaactaaaggaaccatagagccaaaacaggaacaaagcccagaatttaagggatcatttatagaatcacctaaattaaacattcttggtgtcattcgatagctgtaagagtcctcttttagtctatcaaaaaagttaaggcttgtaaacttcaaaaaactcgtttcccggacatttttgaccgtaaattttttgaaacaaacaactatttttttaattttacaaactaattgaggactcttagggctattgatgattccaagaatgtttaatttggaagattcta

SEQ ID NO: 15590 - DNA, 1076 bp, Heterodera glycines
ttccatgtttcagttggctttgtagcgacgtttggatggtattctcccatcatttgaccatgctcaactcggcctcaaaatggcattgctttccgaccgtttcgatgttttggtggacgcgcatttcgatggaaaaagcgaattcacaatttggagaacaatcagaattgtaaaggacgaaggaccaaaagcgaaactgtctgtatggaccgatggcaatgtatcgatcgatggcaaaagggtggaatttccattgccggaccattcgctgcccaacaaaatttgctttaagaaccttcagattcagtcagtcttaacttttgtgtacgctaaagcatttttatctttcttcagttacattgaccattccgtgatcaaatttctccgttccaagaagccaatttgggacagaagaggcaccaatttggaagtgcttgtggatgcatttgatacggatgtccaaccgatttgggatgtttttgtcagtcaaatttggcctatttttgcgacaaacattcgccatttatgcattcctaatggtgctcatttggacaatttgcgtcgtctgatttcaccgacatttctcactgatcttgatcaattgatttcaatcgattctggtgctctgttacgcgatggaattgctgacgatggaccaaatgcaactgctggccaagcgttggccaaatggcttcacactccgacaaaaaatgggcaaccgaagcaattacgtttccttgcttatgtgagtccaccaaatctcgaatggctcaacaacttcaaagaggtggaccgccatattttcgtttttttttaccaatttttgtgtttagacatttcgccatgccaccacttctgtcagttacaatattcaactttattttcgtatggaaccaacaccaattgaatcatttgaattgttgaatggacggacgaaagaaaagctgacactgaaacaggagatcgaagcattatccaacggaataatttataattggctgttgcaacggtgcccaattggggagacggcgatggcgccagttaaatggaaaaaccgtgaaaattcggatgccaat

SEQ ID NO: 15591 - DNA, 2408 bp, Heterodera glycines
ttaatgcttccgcagaatccgagcactttgtttggcttccaccttttcggaattggcaaaggtttcacattggatttgactatttgcattttgttcgtgccattcttgttaatgtgccattgaataatgaatcttttggtcaatgcccatttgcgtgtcttgaaatgttcgtccacgtagaagtcaaatcgatgactgatcattgcaattttgaggcccagcttaaaaggcgaaagaaaatggaacacttcgagccaacaatcggcagagataaagctaaaaaatgaagaattttatgaaatatttaaatttttttgtttaatttttacatttttttgcgagttcgaagccttttgacatgatcagaaaataaccaaagaatgcttccacagccgaccaacagaacagtcacggcaaacaaactgaaaatgaattgggcaaatgaatgaatgaaagggtcaaagatcaaagtgaaggaggaatcagaatgtgaaattttagttgtttttgaggccgatgaagctaattacttcaaaattggttttggaactgtttgaaatgttcatcaagcaattttggtaaaaaaaaattaagcaaaaggaaacaataagcgtaccgaagtgctgaaggcattttgcagcaacaaaatgagcggggaaaatatcggttaaaaatgaatgagcgaatgaatggaatgaggagggggagaagaaaaaagtgcatttttatatgaaaaatattagcgtacatttgagtaacgatgagaaaaaactagagcaggtcgggaccgggaattttgacaaaaaccgggatttcccgccccggtcgaccagccctactccttattgttagtcaattctatcattcattcttccgatgttttccctggtcattctgttcctgcaaatgccttcagcaattcggtacgtttattgtttcttttttctgactttttgcatttcttttgctcaatttttgaccatcagaattggcaattttttctttatcgataaataaataaaataaaattcaatttgcggatcctgttgcaggattggaattccgttttcgcgtggccgtcttcgcgtggggtacgttttcgcgtgagtgcctgtttacgactgaaattggtcggatatgttccaaacatccatttttcgaatcccgaacccgaattcgaaaattttctttactttttttgtttttttatttcctgaggctggtaccttctttaataatttgtcatgttaatcccccagtctccaattacattgttaaaaatgactggtgataaaaccaatttgattacagaattttacaaaaaaaacgggaattaatgtacgaaacaacctttttatagcttcgaaatttcaagctggaaacttccacaaaaaatggaccttttttggtgtataaatgagaattttgtcggaaatttaattttcaactctcgtttgagtccaaaagttgggactttatttacatattcggggtttgttacatattttacatatttcgacgttttatacttattttttacatattttgagcggaccgggtcagtttagtacggccggtttagtacggccgttttagtacggccgttttagtacgaggggtcggtttagtacgagggtcagtttagtacggcaagctgtttttgtccaaaatagattctactgattttttccgaaaaaatgtttaaaattaataacataacatatttattaatgtgttaacaacaaaaaaaaataacaagcattgaaaaattacgggcgcatttcataatttcgagaaataccaacctttggcataaaaatttgcaaacgttgacctttttagtcgcagctttggtcggaaaagcagccaacacgggggttgcagtgttctgcaatacctgcgcacggattgtagccggcgcttcgcacgtctcaactgcacgccgcttgagctgggttatacgtcgctgacactccacttgtgcggcactcatgtcgcatgtgtggcttccaattattttgaggacattaccattaatgtcagtgtgaaggcgccctgaatttgaaaaatagtttttattttattttatgcatttacctttgcatttgtcgttagctccgaaaaactcgcatcgccaatacttccgaagttcatcgtcactgagtttgtgaagaacataaagtgaaccctcatgttccagcttctccttgtttcgctttgtctttatttcctgattgggctgttccatttgtattgtagctaaacatagatattataagtttttccttctttataattgacaaaaaaacatttgtaacagttatggacaaaaacagcttgccgtactaaaccgaccctcgtactaaaacggccgtactaaaccggccgtactaaaccgaccccgaccg

SEQ ID NO: 15592 - DNA, 1466 bp, Heterodera glycines
ttatttcatatattttggcatttatgcccatattttgcgattttatatccatatttttgacagccctactgatcaccttaagcaataaacatcgaaagtaataaaaaattttatttttaagaagttaagtttccattgataaatatagtatgtagttgctcgttcttaatttcggatccatagttttataacagcaaattacggacaatgttagggaaaaaggtagaactattttgagttttttttaaatttaattgcttgtcatgcctgataaaaatttaagctctaggctaaccaaagcaatttatttttaatttttttttctttattacacagttcaactgagcaatagcggccgaaaaagtcggtccgcaaaagtcggtccgcaaaagtcggtccgcaaaagtcggtccgcaaaagtcggtccgcaaaagtcggtccgcaaaagtcggtccgcaaaagtcggtccgcataagtcggtccgcaaaagtcggtccgcaaaagtcggtccgcaaaagtcggtccgcataagtcggtccgcaaaagtcggtccgcaaaagtcggtccgcaaaagtcggtccgcaaaagtcggtccgcataagtcggtccgcaaaagtcggtccgcaaaagtcggtccgcaaaagtcggtccgcataagtcggtccgcaaaagtcggtccgcaaaagtcggtccgaaaaagtcggtccgcaaaagtcggtccgcaaaagtcggtccgcaaaagtcggtccgcaaaagtcggtccgcaaaagtcggtccgcaaaagtcggtccgcaaaagtctatccgcaaatgtcgcactacggattgggccctacaaaaaaattaaataaccaaaattgttttttggtgaatggaattaaggttgatgtttttcagggtcaagaatgacaatgaaaaatgctgcatgaataaaaaaaattgacaattcgcatgcgctagcgtttttggcatcggaaagagatggacaaaagtaatcaatcatatttaaaatcaaatatttttcgatttttgaacatttttctgaggatttttaaaaatatgaaaatatttatcaaaaaatgctaggtaaaaaattttaaatccttctgattatatgtaaattcatttgttaaccaatttcagtggcttaggcaaaaattttccattttttaaaattgaacaatttccatcagatactaattatcaagcaacgatcaattaagtgttttctgacaacaatgactctccaaattcgagtacgacttcaccccgaacttatttcacgcgctaattttgcttaaaaacattcagttcaacgtgatttaattttcacctcattaaatttagattgaaattggtgaaatgccggaccggcccgactcgcccccgtctctgctctgattctgatcaatcaatgatcacacgaagaaaacagaattctgtgtacgggggactaatcatttacaa

SEQ ID NO: 15593 - DNA, 1231 bp, Heterodera glycines
caacattgttggtataattcgaaagctcttcaaatgctctattatccttacaaaaagcgaaaagattttttcaagtctgtaaaaatttattaaggaaaaaccccaaaaatttcgatttttcgcaattttcatgtataacttttttggtaattgtctaatggcgaagcaatattttagaaaaaagcttcaaaatagattaaagcttcaaatgataacaaattttatttttcgtttcgtatttcgtttgcgtatcgaataatattcgcatttcgcgccaaaatgcgaaacacaaaagcgaaagtaacaaaaaaagcgaaatatgcgaaagcgaaagcccgtccctggtgtaaatgacaaaatttattcaaaaagacaacaaagttaagccaaaccagtagggcttctttttttaggcaaataattttctcaaaaaattcgtctccacaatttatttatttattttcataaaaatgcttgatttaaaatttgtcgttattcgaaaaaactaaaatattcgataatttcacggcaccaatgccacgcatagcaatttctttgaaactttaaataaacaaattcataaaattacgttttttaaaaaaccaatccaaatttttttataaaatttgaccaacaaaaaaaagataagatgttttatgtaggtaggtctggaccggggccaaaacgcggaccgggacagggaaattcccagcaaaaaagttccgggttttcaacccgaaaagtggtttaattctgttttcatgaatttttctaaaagttccgggttttcaacccaaaaagtccctgtctcggttttgcccaaaattcccggtcccgacctaacctagttttatgcttggctcagacgcaactgacccctaccgtcaagagctgtcgaataatacgaaatttgtccggattagaccattttaaaaggttagaagtgccccattctgttcaattcgaaccccgaacccggattcgaacaaaaagtcaaaattcattgttcaacaaaattcacattttatatacataatttttttaaatttacattttgaatttcatccaattttcgcagtcatttttcagtgccatttgattcgcatttggtgctcagttgcagcttaggaaagcaaatgagtgaccaaacaaatcatttgctaaatcattcctccatttcattacattcttttttagtggtcagtcaattcgctggcataacaaatttaat

SEQ ID NO: 15594 - DNA, 1332 bp, Heterodera glycines
gaagaggaacagaaagaggaacagaaagtggaagagaaagtggaagaggaacagaaagaggaagaggaacagaaaaagaaatagaacaggaacagaaagtggaagaggatcagaaagagaaacagaaattggaagaggaagagaaagtggaagaggaacagaaaggggaacaggaagagggacagaagaggaacagaaagaggaagagaaagtggaagaggaacagaaagtggaagagaaagtggaagaggaacagaaagtggaagaggaatagaaaggggaagaggaagtggaagaggaagaaaacagagaaacagaaagagcaacaaaggcaaagaggaagagaaaggaaatgggaaatggaagagaaagataaagaggaacagaaagaggaagagaaggtgaaagtggaagaggaagagaaaaagcaacaaagggaaagaggaaggaacaaaaagagaagagagcaagagaaagcgagagtgatgaagtgaaatgggaaggtagaaaggagggtgaaaggggatgagaaagaggaaaagtaagagattttaagtgatcatattaaaaatttgagttttaagaaaacgttaattgaattcccggccattaaaaaaatcacttgccttcatacatataaaagttttttggcgcgtagcgccctctagagactgttaaatagcgaagctatttcaatttaaaaaaaataaattaaaatcaatttaaataaaaatatcgcatttaaattaaatttaaaacaatatcgtttttaaattaatttttgttcatttccaaattctcatattcctaaactatgaggatcgcttagtggccaatagatgctttttgcacgccccaaattatatctcccactagagccagcgttgaaagcgcctccggcgctttcacagggcccgcagggccctggtttgaagccgaaagagtcgccgaagaaagcgaaggcgacgcaaaagcggaagaagaagaagacggaggagggaaaggcgagacggacgcattggcacctttgaaaacgaaaaaggcacttcaaaaaatgaatttaaaatttcaaactgcgcaaaaaagggacaatttgaagacaaaaagcaaaaacggaggggggggggggacactgaaaagaaaacttagtccaaccaacactaaggaatacggtataatgaattaggaaaaaatatgggatgacaaacagtagacatccttgttacggtacagtaccattggcacaaggaaatgttccgtggaagccggtcagcggtgggggtacggtaggtgttgtggactgaaacagtcactgactgatgccgacaagag

SEQ ID NO: 15595 - DNA, 1531 bp, Heterodera glycines
tcctccaccccctccccattccaatgttaatcagtcgttttttgcctttgtccctgccgacaaatgttccgttccgccgccggcaatttcacacacacacatacaacacaacgccaaccgagcagagagggagagggacagaggtgatgattaattggtcgtcgtcgttgtttttgtcgacaacgacgatgaacatgaacaacgattgacgaggggagagggagagatatgatcggatgatggagaggaggaggagggggtgatcagatgctggagatgctgatcggaggctcatcatccgacccagcgacgaccgatcagcagcctcatcctcttcatcatcggcgccaaacattgtcatcgcccccctccctgtgctactccgcctcggtggcgttgttgcccgtccatccgtcagtccgtccgttcccctcgccgcggctcggacgggttgcaatcggcggatcggccctttgaaatgatggttggcgagttaaaaaacattggaaaaaagcggcaaagaatgcacattatcgtaaacgagaccgaacgactgactactgctgctgctgactgactaattaacgaattaattaattaattgatgagagcaaaaaggagggtgggggacggagccgtcccatggcattccgtgcgctgtcctttttcggggcgctcgctcatcagtcacattttgggtgtcgatcgggttcagcggttcgcctccgccgagtgggacgaagggaccggaagggaaagaaagggacagcgaatgttgcgctttttgatcagtggaaaaatgggactgatcagagaagcggggacggagccgatcatgcaaacagatgctgatcagttgagcggagagagagagagagagaaagaaagagagggagagagaggggggggcggagagagagagagagagagagagagcgacgaggaaagagagagagagagagaaagaaagagagagagaggagaaagagagagagagagaagagagagagagagggggggggcggagagagagagagagagagaggagaggagaaaggggaatagagaggagagagtagaaagagagagagaggagagaggggaatagagagagaaagagagagagagaggagaggagaaaggggaatagagagagaaagagagagagagaggagaggagaaaggggaatagagagagaaagagagagagagaggagaggagagaggggaatagagagagaaagatggaggagagagagcgacaaggagagagaaagaaagagagagagaggagaaagagagagagagagaagagagagagagagaggggaatagagagagaaagagagagagaggagaggagaaaggggaatagagagagaaagagagagagagaggagaggagagaggggaatagagagagaaagatggaggagagagagcgacaaggagagagtagaaagagagagagaggagggcggagagagagagagaaagagaaagaaagagagaggggggcgaagagagagag

SEQ ID NO: 15596 - DNA, 1151 bp, Heterodera glycines
tcccctactaatttaccccctccccccatttcttgccaccaaaccgtttgagcaacagcagcagcagacaattattgagccaccaacaagagcaccgacaggccatcatcggagaggattcggcaccggcagctctccgaactgtccttgatggaacaggccaagccgctaccggaagacatcgaacattgcgccgagtacaacgcgcatggattgacggatgtcggctggcttctgcttggttggagggaacaaatggtgatatggtgatcagcgggcggcggtttctgggggggggggcataactttcaaatagctttttggtggtggtcaacagcgactaattttttccgcccttttttcagccgcttgaccggcgtggtcgcccagtcgtgcgtgatgggcgggccaaacgccaaatttcgaggccggaaattggtgctgcagttcgaccgcgacggatcgcagctcttgtccgtcaaggaatgggagcgcaatgatgggcgccccagcgaattggcacgcgcgcaaccgggtgaccgcgtgttgctgcaacgactgaacgtcacgcaaaacaagggcgcggccgtcacttcgcacgacaacacctttttattttcctgctccttcggacaattttccgtgttgcagatattggcgcacaccggaaatggtaataaaatgcccgggggtgggggggggaaaggggttaatttgtttgacaaaatgcagtggcaactttaaagaaaatttagaatggacaccgacgagtgctcgagtgttggggggccgcgttttggccatcaccgccgcgcaacaggaaggtcggttgggcggcggccatacccactttttcgggcgttcatttcaaaaaaaaaaaaaaatccaggaatgcagcgacagcagaagcagcacattttcggggccatgccagcacaacagcagcagcagcaaatggacgaaggcggaaacgccgaatgtggcgaatacgatgaggatttgcaagaaattccggcgccggtccaggaacaacagatgaacatggtgagctgagaaaaaaaaaagtcgcgcgcgccgcatcgatcacacaccccccacacacattcccccatgcttttatatattatgcccatccattattacatcatttt

SEQ ID NO: 15597 - DNA, 1307 bp, Heterodera glycines
acgcgcgtgccccaaaagtgattgagtcgcacgagggcgacaccaaagtgatcgggccactcgcgtacgacacaaatgtattcggaccgctcgcgtgtgactctaaagtgatctggccgcacgcgcgtgaacccaaagtgattggatcgcacgcgggcgacacaaaagtgaccggatcagacgcgggcgacccaaaactgacggggccgctcgcatgcgacctgaatgtgatcggaccgatcgcgtgcgacctgaatgtgatcggatcggacgcgggcgacccaaatgtaatcggggccgcccgcgtgcgacccccaatgtgatcgggccgctcgcgtgcgtcgcccaaaacttatatatggtcaagtgtcggtcacgcccgcacgcgtgcgaccaggcatacccgggtggcgcgattctcacgtaaacgagcgcgccaatggtcgggcatttgactgagccgcacgcgtgcgagcccgaaatgcatttcagcttcggagaagcgcccgactccaggcgcccgactaccgcccactgtaccgcgtcaaattccaccactcatcgacagcagacgacccggctgccgcacgccgcaagcagcagcgccgctcgcggcgacggcgtcgcgaacggcagcagcgtcgccggctgcgtacagaacacctgccgttttggcgactgctggccgtcactgctaacaacaatgccggagagccggcagaagacgacgcggactggacggcgttcggtgccgatcagatggctaccgcccgggacctgctccaggctgaggggcgtacgctcaacgactgggtgcagttcgacgaggcgtccgccgactgggtgcctctcaccctagcggagctgaagcagctgtcggacggagtgcatcgtggaagcgactcgacagcagcgggcgaccgcacgtgccccgtatgcctggaagatttggaaggcaaagtgctgctgcatacgggctgctgccaacaacagttttgcgccgcatgcctgtggatgcacgcgggtgcttcccgctgctgtccgctgtgccgacggcatctgctgagcggtgccccgctggcgccggaggaggacgcctcggacagcgactcagtggccagtgatgaggcccataacgacgacgacgacgatatggtcgtacagtcaacttcagctggacgacgacgacgacgacagaggcgcagcggggggcggacgggtcccagctgctcgggcttcggctcctttggcccgccgtcgtcggacagcacaaaaggctcctttgtggagttggctgcgggagtgat

SEQ ID NO: 15598 - DNA, 1551 bp, Heterodera glycines
  unsure (1)..(1551): unsure at all n locations
cacattttatcacttctcatatttcccatgaccaaataggggctgaaatttttttcagaacttgggaatcgggcccgggataggattaacagtgccgggatcttgaaccgaagtcgtgatcagtatcactattttggaaccgggccagggaaagattaccggtgccgggattttgaacaccaaatcaggatcaggatttgggaaatatttcaaggacgtgttgttttccggcattcaaatcccagttttaccgggaacctgaaaccaattctgggtcagtatcccgggaaaatcgcgacagttaagtgcctgatcctgtcctttctcgaatgaaaattatttatttaaaattttcaatttgttaggatgtggcattggagctgatgaaattgttgtcattccattgtcatgaattgaacgatgtttttacattttttcattttttattccttctttttaacttttatgcatttttgagggcttgaagaaaggggctcaaaaatagcatttctgtattagaggttcttagtgcatataaaagcatattttgaggttttcgagaataaatgcatattttgccatttttgtgtttttagagcatattttgggcatttttggcaaattttcacaagaaaagtgcaaaaaaagctaaaaatatacccccctaatggtcaactttttgggaatttttgaaatatacaccccttaaaaatcgaaaaattttgaattttttgtaagaactcttgaaaaaatttaaacaaaattttttttgcaattgtctaaaaaacttccttagccattgttttgttgtttttaaagacaattcagtatttttacacaatttttggcattttttgagggttaagttaaaagccttttttggcagtttttaaggcatattttagtgcataaggcaaggcatgtcgatattcatttgtttttattcaaaaaaaataggaattttttggaaacttattctttttaaaaatcaacatttttcacaaattttattcatttagatgggcaaaaccaagatcaaactcgaccatccaatggtaatatgaaaaatgaatttaattttgaaaaaatttttttttgttttaataaataataaaattttaatttttgcaacttttctttttctaatttctttaacaaccagacagtttttttcacaattttattcttttagctggacaaaaccaagatcaaaatccatccacctatggtaaggtgtaaatgcattatctttcctaatctgacggcataatgatagtcaaaaaactttcgctaattattcaagcccggcgggacccctactcccacagaaagttggaaattggcattgtttagcacatataaatccgttctttgattattattcaaaattcaattggaaaaccttttctgctgattttggcgataaaccatggcttagatttgttcttacaaatgctgggcgatatgggtcaaaattaggacccgcttatttaccgtaaaatgaaaataattanaatacaaaaaataagtcatatattataatattatatc

SEQ ID NO: 15599 - DNA, 980 bp, Heterodera glycines
ttcaaaaaatagattttagcaaaaaattcatttaaaatttacttgtttaattgtacatgatttatgcatctcccgcatctcttcttgttaaatgatttaatcatcatgctttttgttacaaaaacttttttaccacacacaaaaaatttattggtgaaaatcaattttttgaaaaatttaaaaagtaaaatagtggtaaagcgtgtgccgaattcaatttattttcccagtttaaactggttcaaaaatcggtttaatgacctttctgcaattggagacctaattttccttgcttaactactcgaatcaacacgtttggtacatatcactggtgccattttttgtgtaggaacttcaagacatcaggcgggagcggtacattggacacctgaaaattggatataaattcctctgttaaaaataatcgtgtaattagacgaaaaataaatttaatggattaatgaatattttttaaatctgtttttgaatttttttgtgatgtttttaagctgttgtaaaaacttatcttatgaaagattacgggtatttataaattaatgcagttaataatgaatactttgggtcttttattgtttagatatattatacatatgaaaattagttaatattgccctaatttatttaaactttcctaattttttaatagacacaaatatttttggtattattggagtttttaataaatcattcatttaaatttatttttcttaacagttaaataatggctattttttatttttggtccttaatttaattttaattttagtttatgttttcattttttcatttgttataaaaaaaatttattttttatgaatgatttctttggcttcacattacatttattcgttgatcgccacgatactatttattttgccatcaattgcatagattttgactaaaaaataaccaaatttagagatttttgggtaattgttaagaaaaaaaaagtttttttt

SEQ ID NO: 15600 - DNA, 3930 bp, Heterodera glycines
  unsure (1)..(3930): unsure at all n locations
ttcttttagttgatgaatagtaaaaataaatttaagattattctggtttcttatattttcaaaaattgaatttactttcgcctttaaaaacgaaaaaagcaacgccctaagaaccgacctaaatatttttcaaaactttacccttaattagaattccgcttgcaattgaaataggaaaatttgtctttttggggtaatttgcagcctaattgtttaaaaaattattgcatatttttgtggttatttgacggttttgtgactagatatttcatacgtaattctcgttctttgcctcttcatgtacttattctggaatttttgtacctaaaaatcactcttaattactactaatacttttatatttgaaatattaaatatgaattaaaagaatttattttaaaattataaaataaaaaaaatagttgataaattattgaataatgtaaaagtatagttaacatttaattagcattctacagggaatgtatttccggaatttcagcttttaagttacggaattttcagatttttataaatatttcgaaacaacaagaaatttattcaaaaaatggtaaattttatttccacgccaaaatcgccaatttctttactttatttttaaattcctgttttggtgatttgaaaaaattgtttttttattataaattataatggacaaaatggcgaaataccacaaagaaaacacatgccaagtcgaattaatatttattcaaaaagccaatcgatcgaacatttacagtaccggaaaaaagtttctgcgcctaaagaaaaaaatttgactctctaatctaagagcacagaaataatttaagcttatagctaactttttattctaaccaaaattcttttgcaccaacttgatcagaccactcttttcatggtaatgaaaatacactgaaaatcggaaaaattatgaaaaaattcaaagttcctctatcgaattgccttttgaaggttcagagacgcggaagagagcgaaaagtggcggacgacgctcgaaattttatcttttgtttggctgacgaaaaaaaataatttttttaaaatgtaaactaaaatttagcagtatacaaaaagattaaaatttaaaaatataggaaaattgtcatttataaatgaagaatatatatagaagagaaccagaaaataaactaacatctccagaattgcaacttctattcgaactattttaaaatttattgtacaagtggctcccggacatttcgacaatgaccgtttcgacaataccttttcgacaataaaattaaatatatttttttaaataaaattcaaatttctgcaaaattatatggacggtgcggatttgggatcaatataaaaaagtttttttttcgtttttttcaaaatagcattatgagaatggctttagtttgccaattttcggcgcaaattgcttattttttttaattaaaaattgaaacattgttttacacctaaatagttgataatgaattagaagcttttaccctgaaaaaactattcttgattaaaaaaacaatttttttttgttcgaattcgggtctggagttcggaattgggcaaacccgagttaagatccgttatcagcaccctcaaaaacgcctaaaaactggttttgagcacaaaattaaaaaaaaatgaaaattagggacaaccattcttcaggattgccgcctgggtaaaaagaggacactacattaagttaaataaatggtttcattttggatttatattataggtccgtctcattttgtcttctttcttcactattaatagggctcggatttttaggtgctaaaaatccctaaataggtactaaaataggtgctaaaaaagtgcaaaataggtgctaaaaaccccaaaaaaggccaaaataggtgcgaaaataggtgttaaaaattgaaaaaatctagaaataggtaaaaacctaaaaatccgactcctaactattaataatcatacacaataggcgatagataatgcattcattaaattttaaaaatataactacctaattaaatttttctctttaaatttcatcaatatttttttaaattaatttattattttttatattcattttattatatttaatttgatattttaaattttggcgatatgatatagtcgtaaatggtcattgtcgaaacggtcattggcgaaacggtcattgtcgaaatgtccagccaccaacccaggtgctctattcactcaaccaagtttaatttggaaatcccacggtattttaaatataaaatttagatgtttttttcaaaaagtcattaacagggatcatttaccgtatttgctctttttatgtgccagtctccattaaactgccggtctccaattatgtacccctttctgaggaggttgaaaaataatctaccagtctccatttatgtgccaggggggataaatagaatttttaaataatttgtttggcacattttccaaaaaaaatcaattcaacagtaaaaggggctaataaatgaacaattcgttgtcatctccgactccatccagccctgcatcatcattagagtagggtcgctacttttagtgacggaaaatctcgaaatagttaactaaaatagtgagtaaaaattccaaaatagtggcaaaaagtccgaaatagtgacgaatagtgacctaattttcagtcaaaaattaagccaaaataattttattcactaattggagttgcaaatgaggtacttttcctttgaactattcccttatcaaaatactgaacatttttaatcaaaatttgtcaagaaaaaaaaattgtgggaagaatttttaagaaaattttccaattcttagtggtatttttgaaaaattttttagaccgattctcaggggtgcattttttgaaaaaatgtttaggtcgtttcttaggggtgtatttttttggttttattgcatttttgttaaggaattttcctaaaaatgtcgaaatagtaaattttcactattttagtacgaagcgccaaaataggtagtgatttctagtgcccgatagtgacatcagaatcgaaaaatttcaacgaaaaaatacgttttttgagctcctttcttcaaaacaattgagcaaaaaaattcgttaaatcactaaatgtagcgacactaatcatcagaaaagccaaaaaaaaactaaaaacttttaaaattaaaattaatatttaaaaaaataaaaaaaggcttcttcgtgatcgtttcgtctaactttcaccattaaaaattccaatttttatgcataccggaagcaagaaaatgatagatttttgtcattttggagtcattttcagaagttctttaacataaatgcaataaaaatgtttttttttgacgcgatgacattttttggcgacatgttcaaaataaatttcaaaaattttccactaaataaatcatcgaaaaataatctcccagtctccattagtctaccaatctccaattatctacccccttctgaggaggttgaaaaataatataccatggcatataaaaagagcaaatacggtaatcacaatgcaattaatagtagcggcaatttctttgcaagtcagccattcttcaaccagcagtcaaacttttcaagtgtccaaatccctgtgcttgatagttcggatccaagtcgaactcatgtgcaacacacccaaaccctgagccaagaatttcttagcattggtaacaatagaaaaagcaacaaatttggcagccaacaaccaattagcaacaaatcaaaccaatttggttcttcttctttctctgcaaaagataaggggaaaaagccaatgtattcaaataaacctccgcttcctcctgtctcttattcagatngaaaagtttatgaaaatgattncaccgaactcattgatgcagtttacagattgacagggggag

SEQ ID NO: 15601 - DNA, 1677 bp, Heterodera glycines
aggccgcgcccttatgataccattcgacttctctcagtgaatgagaggaatcgattttattaataaaatcgtgggtgtcactattcttgacttttaccgaagcaaataatgagaaagaacagactttccgaaactggcagacgggcaaaggcgtccttggccctgtcgggaaagtccttctgattcgtgacttgtttgcgcattttccatcgatgatggtttgccgaaacgacgctgcccaatttttgtttgtcgttgtgcggcagaatggggcacgttgaaactgtgcgaggaaagctcgtgccgaggtgccgcctttcgcgtgtttcgctgtggcgtgtgactttgacgacgcaatgattgatggaacacatcggattggggtctctgaagaatgccaatcaaaaaaacgaagggatgacaaaaattagcttaaaaaaattcttttcaattaaataaagatgtgtgttaaaaattgagcatcctaaatgtttgttaaaatataaatttcgacaaatatttttacggcttattttgacaaaaaaatttatctctttccgatagaccttattttcaaagttaattagactaatccttggagagaattggatagacgacggtggcgcatgatcaaaagcgactgcatttgtaggaaaatgtgattctttatctgaattgttaatgtctaattattaaatccataaacataaatttgcctgtacagtgtgttgaagggatttttggtggactttcacgcttggcataaactccactgaattgagagttcaaacatttaggaatttaatccaagaggcgaagcttacggtgtcccttcaaattgtaatggaagtgcagaagatccatacatttttttagcaaacattttattttaatcataaataaacgatgaaacgaaacggactttcaattcttttaaattaccaatcagtaatttatagtaaaaaagtttaataaataagcttgttgttttattaaaagcctgtgtattttttagaaagtaaaaatttaatttttgaggaaatgttttcaaaattatttgattgttgttttgaaaatatctcactcgttcgaccaaaatgtgaaaaatctgtgtcagaacccggtattacgaactctgacaacactttattaactcttggcgaggtggcgaggtcaagcagcttcctgctgttttacataatatcaagcgcaacaccacccaatccaacatttttacactctcttcaaaaggttatcagtgccaaatcacatcaatctgcagatgaatcaaagaaaaattggttatttaatgtttcgtttttttttattttttggttttttagctctccagcaaaattgaaacgcttattcaaattcagcaaccaatctaagaaaaatagtaatgagcaacagcagatttgtgccaagtcgaagcggttggaggtggttgttgtcgacgtaaataatgagccggtcgaagaaaaccttgcatttgtttctgagttggccctgttgtactgtccgcctcagccctatatggttaaggtgttttcaggaaaaggtccatgtcatgcctttctcatacttttctttagtctcgtcttcttcgttccctgaatttcggaaatgctccgtcgcttttcggtgtcgattggggcgatttttctgtgttggccc

SEQ ID NO: 15602 - DNA, 2347 bp, Heterodera glycines
ccttggcttgcgttttccatatggtgacgaaaaactcattcaaaaaattgcgaaggcttacgacatttgcggtgtgttagaaatgattttaaatgtcaagtgattatgttacttatatttcctcggattcgagtcggggttcattgttcgcaattgacacaaatgaattttatttggtcaatccgaaactcctgaccaacgaaatatcccttacacaactaggaacccaaaccaatcaagcacatttgtgcatgcattttatttgaaggcattccttcatttattctcgtcgatgagaacttttcactgctaacgcgaaacgggcgaagcgtttgtttgtcggacccccacggatatccctggagaagaaaggcactctacgaactcactgagcatactgtccaccgcttatcggaaatgccttcgctcattctcttcacgggtatcgaaaagggggaacagtgacgtactctcagaatttaggaagcatcgctgatcacgaatctgacatccatttcgaccaaattcgaatcccgaacccgtattcgaacaaatattcaaaaaatcattttatggtgcgaaaataactcgaataagggttcgggattcgaatttggcagaaatagatgtcagattcatgattagcgaccccgaaacccctagaaattttttatatgatttaaaaaataaatttatttttttatggtcgtatagtgcataacacaccgagtcaaaaaacgagacatgtgtcaataaatagagagtgcagagaaaaaaacatctctctttttggcgtactatttctttatctctgttaatagagaaaaaccgaatttacttctctctaagaaactttttttcccgttaacagattttcttcaaattttgcatatcgatagagaaaaaaattcttcatttttctatgctgatttattaattgtctatgctcaagttcaaaacttgcaagtttagaacacccatatattttttctaactcaccaaactgttcaacatttgcttagaaaaagcttctcctcatcaagagcttttgaatgataccaagatctttcaatttagttggcaaaaagcttccaaaataatttccgaaaatctattttttaaattttttggacaaaaataaataaaaatattcatgttgcacaacggactcgaaccaccaccaccctttgtccctttactatcttacaaaaaccacttcgccacatatgcatttactttttgaactagtggctcaaaattgactcggtgtgataagtaccaaaaatgggactgatttggaacatggtaacaaaaaatcccatcacattcagaagggtcggccgaggacatcgaattttcttgccaaattctcagtccttgtgccgagtcggttttcactcaacagaatgagtcaccgcaaatcgccgcctctttgcctgccaaattagaggacgcgaggtcatcagcatttattaaatttttgtttctttattacgtccggtctacagtttgctctcatttttgaattttatttttcagttctgtcaactcggacaaatcagtactgccactcgttgatgacccattgcagtttttttacacgggcgaagacccaatttgtgatcatgtgagtgtccatacacacttttccaattggatttctcccaaagaaatcccctgtagatattggatagcttgtgtcaggaacaagccgacctacccctgttgctcatctgcgaccctttggccggccattttgtcgtctgtgaccgaccagaagttagtgaaccaattgttttggcatttgtctcggactatcgcaacggacgcgccaatgtgttgtctattcctgacaataaacggcagttgaaggtggagttggggacggatagtcacaggacttaggcacggaaaagggagaccgcttcggacgaagattatataataaaaattttctggaggaaacggcggggacttacaattagtggaccggggaatgtacgtccccctctgaaaccgtccctgggtgtaactgctattatataaccctttattattgcttttagcatcagcggactgtcggaggcattcccgtccaacttttggagccgtttctcccttcaaattgccaccaacaacagcagcaaaagatggaattcaccaaaagtgcttaagctttcatgtcacttggaatctctcactttttaatatgctttttctttttttatcatttatttcatttgtctgcctatttttatatttaatgggtgaataaattggactttctgtttttccaatttttgctcgtcatccgtggcacttcgcaaatgctgcccattgaggggat

SEQ ID NO: 15603 - DNA, 1999 bp, Heterodera glycines
aaatatgagtgactccccaattttgagaaaccaaaattattaaatgataattaattaaaaaattaattaatataatcattaagacgttattattatgttaatctaatcgtatctttcataatgttcttacatttattcttcatccgatgctcaaattcgatttcggtgtgtctttcgcttttcgcttacattttcaattagtccaccattttttgtcccttttttaatcattcgccccttacagtaattttttttaaagtgcgcattgcatttctgctgctgctgcttcactaattgcttcgtgtttgttgagctgtcaagaacagaaataggaaaggaaagacaattccaaaacccccggggggagggaaaatcgaacgaattgaaaaagttgggatgagtcagtcactcattgacaaatgagatgattgtccccttcttcactgcttcattcccaacattcattcattcttcacgggccgtcaaaacaaaagaaaaatgaagttcttaaaccccattttaaacgaaagcttaatcaattaatttgactattttgataatcttcctcagaccatgtgacaatttggccgttcgtcctccaaatgaggcaccccttcgttttttggcactcgctgttcctcgtctctctgatcattttcatcgctttaatcactttctttcgcagaaatcaatggtcacacaaagagtctaacaaccgtgacgatgaaaagagcgttgatcacttcccccacaaaatgatcacttccttaaaaggtgaactcccaaatgccaatcagtgtttgcttttgcccttccgttttttaggggttcggcttgagttggcttggaaagtgaattggacagggcgggcacgggtcgacttccaagtcacattcagcggaagaccgagcagcattttggtcggcttttccgaccatggcaaaatcgaagggagcgatttttgcctttattggccaaatcggagccgaaaagtaaggggaggagaaggggagagagggagaaaggaggtgaaaggcactttgaacagctaatggatggatgggtggacagaaggtggaagttgcgcagggatatgcagcagaattgcgaactgatcagcacgggcacaaatcgaattgaatttggtagaaagttggtcacttgtgacccccgggactatcgcattgaggcaaattcatttggcacacaatgccttcctaagagcaattttttcacttttaagaagggaaccagcaacattctattggccgttggaactcgtaaacgcacaaaatcattggccgacccgaacatggcctatcaaatgcgcttcactcagctgttagtggataaagatgaaagtgatgctgaaaatagccatttgggtgggacggcagcagaaaaatcgcataatttgtttacatgggacattcgggcacaaaatgtgaccattccggcacaagtgaccacttattggtgtgccatcgttgaattgagtgaaactctgaagaggcacaagcaccatgcgatcaaagtcagtaataataggaagagggaaaatgggagcggaaaaaagagagggtgagaggggaagagggaatggaagtgtgagagggagagggagagagaggaaagggaaaagagaggggagagggaatggaagtgtgagagggagagggagagagaggaaagggaaaagagaggggagagggaggggagaagagaagagggagggagagggagagagaggaaagggaaaagagaggggagagggaggggagaagagaagagggagggagagggagagagaggaaggggaaaagagagagagggagaaaagtgagagagtgagcgatactggaactatcgaccaagcattgaccagttacaattttaatccagtacgaagcggtcatttagcccgggaatgccaaaattgtgcatcatttcgaagtttagaaggccaacaagagactcgtccatttgcgggcgattgcag

SEQ ID NO: 15604 - DNA, 1396 bp, Heterodera glycines
gaaagacaaatttgaaaaagggccattcaccgtagattgatttactcagatgcgaattccattccacccgatcagccacatttcccgatcactgggttttgtccggcagaatgcacacaaaaagtgaacagcgagtgccaaaaaatacactgaaattgctctttttccgctcagtttcccatcgatggcatttacatttttgcttcacaattgcactcccatttgacggggcgaaagttgcacagttcggtgatcagaggagggagcaaagtgacggagatcaaccgggacgaccactactcaccccattggcagcacatccgatcacttcggccttttgtgcatgttcgacggggcgatgtgatcagcaccacttgtgtgtatgagacacgggggatgaaacattggacatgggtgagaacaaaagggaaaagggaagaaaaacagtgatggcacacatactgtaatttgaagggcggatacggtattgaggacgaaatgtgcgtcaactacgttcactattacccggcatcggaagtgaattttgacaaattaatttttatttttctcaacttttcaggtcgaagtttgtaaggtaaaaatggaaataatattattattaaatattttaaaaagatattttaaaatactataaatattttcgcttttttcagtccgccgtttccaatgcgtctctccacgcgttcttcgcgcgactgtgaattttttttttttacaatattttcaaactcaatttttctttctctctcccaaaggggcgtcaaaaataagcagatgaatatccacgagaagtattcggcggttaaatgggtgagaagaataaacaaattggcagtttatcatttaccgttaattggacggaattgggaaaggaattgctgaaaggcctattatatgcgtaattaataaactcaattttgggatatttgtttgtttcttgttgtattccaaccccacttcagacaatggctaagttcgccgcgttgcgcgaattgtacgccgttgcctcgctgaacgtcgcctgtctccaacattcgggcgaccttttccccgtaaaaataatcagtgggggcagacgaggattaattaatttattattgcatttgattaatggtaagataaccaaccgactgtccatttacagggccaccccacaaattggagtcgcgtgccgaggcccgagtacggcacggaatcgtcgacaaacgaagggcaagcgaacggcgacgaatgtttggcactgaacgactgacttttgtccctttatccttctttttccttctttaaccttttatcgttctttatccttcctctgttgtccatcccctgactttccatttgcccttttcctttcttatcgttttgctttgtttgt

SEQ ID NO: 15605 - DNA, 845 bp, Heterodera glycines
ttttttgggaaaaaattctttctaaagggtgaaatatgcacaaattgtcataaaatgacctaaatagactagaatcatcttttagtatttaaaaaaaaaaaatatatatattttttggagcacactttcaaaaaaaagaaaattatttttttggagcacattttcacaaaaaatactataaattctcaaaatttttgaaaaaattgcgaaattttggatatttttgggggcatttaataaaaaattccttaaaaattctcaaaaaatgcaaaatatgtacgaaaaaatgcgaaaaagtccaaaatatgtataaaaattgtagaaaaatcccaaaatatgtaaataaaagtcccaacttttgttcgcaaacacaaaaaaagaaagtttttttcccactatttagagcaaggagaagccaggaaaaaaatatgtatttacataaaaatggaagccctggaactaacaacatagaaaaaccctgtattatttggaaaaaaaataaaatcaaaagaaaacgtcaaccggtgtcgaactcataacaaaaagtattgttaatgttgaagcactaaccactaaaccacaaatattctaaaaaatataagcaaatttactttatttcataaaaatttttaaaagatggttaaaaaaaattcaaaattgtataaatttttacctttaattccacgaatatgccattcttaggggtgtgtttttcacccccgtgcccccgcgggggcgaaggtcgcgcgggggcgggggttgcgggggtctgagtcgcggggacgggggtgaggccaaaaaacctgtcccgcccccggggggggggggcgggtgtccgaacccta

SEQ ID NO: 15606 - DNA, 1849 bp, Heterodera glycines
tttatgccccccccccccccgccggacggaggggaggggaaagggggccccattttctgggggtgtaatcttttgtattgaccgaaaggaaaaaagaaggggggggggatgtcccccaaaggaattgatgcacaaaatgttgccggccatttcgcttcgggcgtttgcttcggccgaggagcggtcaacatgtgcgaagttggctttgttgatctacccttttgacaaagtaatttggggcgggggtgaaatgatggacaaaagttttgatgaataattgtagggctaaacttttcatccggctctgatcacaactttttcttttgatcaaatatttttattaatattatttttcattcataaaattatttgtttttatcaatatgacttactccccctctaaattcccatgggtcctcgtcccgaactgtgtttgtccaaatttggacaacgaatgtttgcgtcccgccccatacacccgcccaattctttgcgtaaataaagtgataaaaaatatcacatactttttggccactggcggagaattggagcagggtgaaaatgcatttatttattgatattaattattaataattaaggcggtagctcttctccaagtgcaggcggttgctcaccgccgttggccattgcactgtacgtctgctccatgtttttgattgtaagtctcgtcacggcggtcaattctcgattttatctacagtatacttttttcagctcatcctcttttacgtggcctttcgttgtgctcgcgggcgcaacaacgagtacattttggccaacaatggacccgtgcgtttggcccgcgctattgcgcctcgaggtggggtagggggggggggaagggattaccctcttaattatagtaattaaaatttgtaatcattttcaagtggcttttcgtcgtcagcaccccgagcctttggcgattgccgtgcgccgtcgcgcgcctgcggtaaaataataagaatgtggggatgtaatttatgaaaataattcttgaaaattacaggcgccctgatgtgtcggacggaaggaaggggcgtgaaaagaatgaatgactaatgaaaattaacattaacaataatataattgatcttttcagattttgatcttttacataattttaatttgggattcttttaattgggtcaataaattgcacatatatattatttattggctgtgcgttccatcaaaacaatccattttagtggcgggatttgtatgtaggtcaagaatttgtgcgggatttgatgggttaatgtgataaacagaatgggtgtatttaacgcaaatggactatcccgagttcatcagtcgcaatttcacttaaataaatttttataaaattaaaaaataattttcacatatccttttgcctaatttaaattaaaaatataatgtcaataaatatacaaaattttcaccccagtttttttaagcctaaattttctcaccttatccattgctgtataaaatgtccaacggtactcaaagcatttcagcggatgcagatggacctgaaatgccggatgagcgccaactctggttggaaatgtttgagagcggtgactatgaagtgaagccgcgctaatttattttttctgaacacatttcatcattccctcagctcctcagctggtttggtcgtgaccgggccaagcaaatcatggaggatctgcgcaagtttgccgaagagacgggccgagaatgcacccatgtgaaaatgttgttggacaagatcaatcgcggaatgattaatgggaagaaagagggtgaataatatgcggaaaagcatttttgttgatgatgataatgttgcaattcc

SEQ ID NO: 15607 - DNA, 1597 bp, Heterodera glycines
cccccccccgccatttaagctaccgtaattcggaaaaggaagaggaaaatgcatttgaattttgaacattaaatttttaattgccgttttagttcatttatgtatgtaaatttcctaaggaatgatttctccattttaaaatacttgagcaaggtttatggccggaagccacggcttttccagaccccgaatccggcttaaaacccgggttttttcgggtccctgtccttgattgaaagttgtagtctgatcccgacttcaggtttccaaatcccaattcctcaaccctatgtctgttacggcacacaacaccatagtaaattggcggcggcacattgccaaacatattttttttttcaatttaaatttttatatatgtagagaaatttaaaaaatgaattcacttaagaattcgcaatttaggaatggttttaaaaaatatttaatgttaagtaatttttttttttaaaaataaaattttccaaaaagccttttaggaaacaaaaatgaattcgaaccctactcaaaaattttgtctaatttctcggctttatgctttagttaacataaaattttccaccctcccccctcttaaaattttttttgttagtttttcgtcttggcaaatcgattttattttgtgggtggggcgaaattaattcagcagagagcagcgataaacccaataaatgtgaatggatgacccattttttattcattctttattcacatttattatttattcaatgatttaatggatttatttttacattttttattgtggcaattaaaattttcaattaatttcaacaaaaattcatatttcactgcccattttcagcagaccactcttaattatatttggttgtgttgatttacatatgttttttatttccaaattttgggcccattaaaagtaattaattaattaaattttccctatttttaataattttttttgttttcaaaaaatttaaattttaaaaatgttgcgctctcttttaattttcaatttttatcccttacggaaaattttttttttaattttcatattttcgcaccctaactcaaaaaatttaaaattttttcccaccctaattttgtcctttcatttatcttttgaattttttttatatttcttcccctctccgcgctgtgcttggcctcttatcatcaatttttgatttttcattgaaataatttggcgtttcgtccccacccctctcaattttttttcttccgatgctgctgttacgtcatgactgacactgctgctaatttttaagatgatgagatgagttttggttaatgaactctgctgttccccctattccccgctttcccctccggggattttccctcgtttttcctccagggattcccccccccccgggagggatcgattaatagattaaattgaaaagtgtcaccgagtatggcgacttactcatcatccctaagggaatcacacatcgaatgaccacaacgtcgaaagcaaaactaaggcaaagcgtgcggcaggggagagggcacgtcatattaatttggaaattaagatttgaaaagaaatgcgattttagaggaactactgatcgac

SEQ ID NO: 15608 - DNA, 2254 bp, Heterodera glycines
  unsure (1)..(2254): unsure at all n locations
tcaaagtctctgtctcatttcttgacccgattttctgatactttggatatcgacgacctcgactctcataattgttaatctcgactctcgacaccaattctcaggctcgactcttggcaccaattttctcgggcttgactctcgaaggaaattctcgaccatgagtcatggggttggttcctcagtattgagtctttgattcaatcttggtctcgattctcggggttaattctggacccgagactcttggcatcaatttttaggcttgactctcgaaggaaatctcgaccatgagtcactaggttagttcgtcggtcttgaatattggattaattctctggactttcaaaggaaattctcggtcattagtcatggggttaattggtttgtcggtcttgagtcttggatttaattctcgatctcggctcaactttctgcaatcattttgtcggtcacaataatttttgaattttgttcttgtcgttcggcttcgagtcgagaaaagctattaaatctcgggatttttggtttttcgataacagctttactaattatgtcccccaaaaaattcctccattctaattaaccctccgcctatcacattcgttcattaatcagtcctcgtgtcagcagagcaccctcgtacccctgatgctggtccccatactcattctcggcccaagattgatatccggggacggcggggtgcttaggcacacatttaatccgccccctctccccctcccccgccggggccaaccggataaacccgccactttaatccccccgcttcactggggcgaaattgtttttgcccctctcctcccccgagggggctttgaaccaaaaaattttattggaatgatttgcatagctaagctaaacactacaaaaaattgattgcgaaaaataagaatcggggaaagggggggggcgataaagaggaaaaaacctttataagtcgtaaaaaatttttaaattttactaccaaatttaaattaaaacccggggagagcggggggataacgaggagagagccttcgcatgccttcaaaaatttttaaaattttattaaaatccaaaaaatttaaaattaaaacccctccggcattcgacccacaaaatatatatacttaaaagtcggcttatgtgaggggatgaattttgttggtcggcttacttttgacctgattatgaaatcgcgtttcgctggctatcaataaatttggttaattatgcaaattaatcttttttaaattattgtgccacaaaaaattatttaagcatcattgaaacaatggcaaacatttttcgtacaatggacctatttttcttatgcaattgaaccctctccatttttcgaataattttttttttgccgaaaatttttgcttgaaaagcgtagcagcccccctaatttctagccaattaaattttgtctctaattaccaatttgccctaattgtttccatgtcgttaagccgttgtgcctgcccctgctttttgcacttaaaatcgcacagtacaaagtgatgctaacgatgattatgttaaagctgcttttgcttctccaaaacatacataaatttcccacttttgccattcttggccattaaaattcgcaatttttttgctcaattttggcccattttaaaatagttaacccttttttaaatttttttatgactaaatttttaatatttttccataatctataatttttttaaagttttcatttgtgtaagcatttcgtttttttttaaatttaatcctcaaaattctgcaaatcattcatttttaaaacccttaattatttttagcgtccaaattttatgtaaaatgtcattttttagattttcttttatttttaagatatatattttttattttttctaagatttttattttataacctttttatgaaattgcaattcaaaccatttatcttaattaaaaaatatttttatttaaaaattatttttttttttgttttttccatttaaattccctccaataattttcccatatttttgaattgtatcgatttcattttaatcaatcaatcatttatctgaaatgttgaaaatctttcattttttaatttccaaattttaccgtattacccctctttcatttgcttcgtcattaccgtaattagctagttaatttgccactccaattatatccaaaattccgtttagctttttgcctactgagctgntaaagcactaaaatatattttttgacttctaga

SEQ ID NO: 15609 - DNA, 1926 bp, Heterodera glycines
ttttcatttcctgtttattaaataaaaattcaaatttgaatttttagaaaaatataaaacttgccttaatttttttttccaatgtatttattttaatttcctcaaaatgaaaattggagcgccaaagaaaaaaattgcaacaaaaaaccatttaaagaaatatttggagaaaaatgggaggaaaaagaaaatgaacagaaaaagagagaaattgttgaaaaattcacacaaaattaaagcgaaaatcaaacaaaaagagagaaaatattcagcaaaagaatggaataaaattgaattgaaaatcggaaaaaaattgggcacaaatcgaaacaaaatttacaaatggatcaaagaattaggattatacaaatgccataacaaatcaaaaacggatgtacaaaaaattgaaattgtgcaaaaatttaatgcaatgaaaaatgaatataagcaaaaaggaagaaaatattcgagaaaagaatggcaccaaaattatgccgaaattgggaagaaaattggagtaaattatggaacaattcaaaaatggaagaaacaatttggaatgaatggaaaaagaataactgaaaaagagaaaatggaaaaaatgaaaatgtattggcaaatgaaaggagaaaatccaaaaatgagtgacgagaaaatttcaaaaatattgaaaattagtcaatggaccattttcaattggaagaaacaatttgagaagaattaaatgaggattaaaatattattgagataaaattgcattttccatttcttagagcctatttttggggatttttaagacatatagcctaaagctacctttcgagttattagtgtctatttcctaagcttttatttttagacctaaaagcctaaagaatttttgaaagaacctatttttgcctattggcgttttgtcgaaatttattaacaaaaatgcaataaaaaccaaaaataccttccctaagaatcggcccgaaaatttctgaaaatacaccccttaataaatgaaaattttctcaaaaaatcatctccaatatttattttattttcattacaagtttggtcttttaaattattttctcaataatgatttgaattcattttgttactttttcgaatagcttttcattttaggccactaaatttcaaactagttttgctttgcttttttatgtctggcattttgtaatatattttttaaaaatctttcgggagttaaagctggaacataaaataaaacgccaaatattttttcccctttttatgttccattatttatttctatgggtgccaaaaaaatatgtacaaaaagtggtcaaaatcgtgctgagccgagcctaaaaagtatcaatgattgaaatatttaaattaaattattatttaaatttatttgctaaagaatgactcataacttagcttaaacttagttaaattaatcaatcttgttattggtcgatggctctatgtattctcttcaatattatgtagttaaaaaatctagcaaaaatttttacaaaaagttgtaactaaaaattttgtaaaaatttagactcaataattttgttcctaattttttaaaactcattaaaaaaattttaatttaacaggattatatagaatctttgggctatctagtcatattaaagtaatatgaatgaattgcagtttgaacactatttacatgcattaaaagaccttacatttttgtatgaccataaaaatatgacgactcatttcattccttagtaacttttttttaagaaacaaccaattaaaattttagttatatgattagatagcccaaagatttatctataattctgttaaattaaaattttttaataaggtttaaaaaagttagttccaaaattattgagtctccattaaaggaaatttttaattacaacttttgtaaaaatttttgct

SEQ ID NO: 15610 - DNA, 2246 bp, Heterodera glycines
ttgtatggtgattggcacaacccaaggccgatggtggaagatcccggtcacaatcaatggcttaaatttgaagatgaatagagacagtggagcccaagcaacagtcatcagcttcaaaacgtggatcaaattgggtcaacccaaactctctccaacggacatcgaaacccgcaactgcaatgacatcgcattttcaaccgaaggaaaatttcattgcaccgtcagttgcttcgatcggccatccaaaacactgatcgcttacgtcagcagtgacttaaagcatgatttgtttggccttccgtggattgaggaattcgagctcatcccaagagaaattttgtttccaaagagcaccaaaggaaagccaaacgcgtcaatcaacgccaatgtcgtcaaggcaccaaacccggcgattggcattacggatgaatcctcgctcaccgctgtgttgcaaaaagattttgaggaagtttttaagaacggacttggccattgcgcaatcaaagcgcacctgattctaaaaccggacgcccgacccatcttctgtaaagcacgaccagtcccccatggtgcaatcgaagctgtcgacaccgaactggaccgcctcttgcagattggcgcagtcaaaccggtagaattcagccattgggccgccccgattttggccgtcaaaaagaaaaatggaaagacccgggtgtgcatcgacttttcgaccggattgaacgattcgatcgaactgaatcgccatcctcttccgagacccgacgtcatatatgcagctttaaatggagccgcatttttctcaaacctcgacctgagagacgcctacctccaaatggaattggatgaaaaatcgaaacatctttgcacaataaacacccaccgcggcttatttcagtgccaacgtctcccatttggcgttaaatcggcaccatccattttccagcacttgatggaccaaatctgcgcaggaattccaggggtcttctcttatttggatgattgcctaatcgcctcaaagaccctggaagaccacgtcaatgcgcttcacacgcttttccaacgcatcaaggactttggcctacgaattcaactcgaaaaatgcaaattcctccaaaaagaattactttttctcggccacatcgtttcctccaacggcatacgccccgacccagcgcgctcagaggcaatccagaaaatgcctgcgccgcatgacaaaacgaccctccgttcatttttgggagcgctcaattattacggacgttttgttaaaccaatgcgagaaattagggcgccattggaccaactcctccgaaaggatgaatcctggagttggggagatgaccaacagtccgcgttcgagcaagcaaaggcaattatggtttcagaacttctgctgacccactacgaccccacacttccgatcgtcgtagcggcagacgcgtcaaaagatggcatcggcgccacaatcagccacatttttccggacaaaaaggaaaaagtcatcgagcacgcctcaacagttctgaccaacgcgcagcagaactacagccaaattgagaaagaagctctggcgcttgtgttcgcagtccaaaaattccaccggatgcttttcggacggaaattcacactgctcacggaccacaagccattgctggccatcttcggctccaagaaaggcatccccatttatgccgccagccgactccaaagatgggccctaatcatggccaattacgattttgaaatacggtacatcaacaccgcatcatttggccaggctgacgttctctcgcgcctcatcgccaattatccccgaccagaggaggatattttgatcgccaacatctgcaccgaaaccgagtgctacatcagcaccattctgcaaaccaaaaccgaacaacttcccgtcactgcagacgaaatcgcagaggcgacaccgaaagatgagattttaaagaaaattttggcattcaccaaatcgaattggccaaagaaaagcagcgacccggacatcgcaccgtattttccgaaaagggaaaacattttggaaattgagggctgtttgctcttccaaaaccgcgtcatcgtcccccaatcgtttcgcaaccgaatgctgaagtccctgcacatggcacatcccggaattgtgcgcatgaaagcactcgcccgccaacacgtctattggccgggcatggactcggaaattgaacggattgtccgtcagtgtgaagaatgccaaaagg

SEQ ID NO: 15611 - DNA, 2994 bp, Heterodera glycines
ccgcttcacgggtgctcagtgtaaatatcgactggccattcaaattctgccttttcagccttatggaaagatattatggaacttttggttccatctcagttgtcaacgccgcgactgcatcgttattatatcagtcgatagaattttcgaatcgcttttaaatcgtctcttttgcgtcccttaatcttcactctgagccgagttactgcggtctaaacacgtttttggtagaattgcggccagaatttaaaaatacagtttgctatggcttcgcatcacccgcttcaacgggtgctcagtgtaaatatcgactggccattcaaattctgcctttccagccttatggaaagatattatggaacttttggttccatctcagttgtcaacgccgcgactgcatcgttattatatcatgtgggcaaaaggccacaaaaatttgcacttcccggcagaaggggaagcagactctcccggcagaaggggggagtcttttaagcaaagcgaatttctgtccaaaagacagaaattcactgaatgtccaaagggacaaattaaaggaggaaattcctctcctttactgaagggacaatttgaaaggaggaaaatgtttctcctttccttttgtaagccttttctttgacccaacgggggtcaatggcttaatgatctgtatgaaagggctcctgagcgtcccttttacagatagagaaaagactaagactctttcttaatctttattcaatttacacaattacaatttaatgcaaattgcttggacagaaaactgtccgggtgacttaatcaaaaattgatcagagtgaaaaaaatggagaatgggccgggcttttataccctcacaatcgatgggggcgggtccaggcacgtgaagaaatgtgcacaagcaaatggacaaaaacccattaaaaatgatgactcataacaaaaaatgaagagagaaaaagagctgagtcataaaaaagaggagcgagcgaatgggaaaaatgatcgacgaaaaaggatcaaaaaataaaggaaatttcaaagaaatttgtgtcgcttcggcgacatactccgggcctcaaggatggcggcatctgttgccgtctcttcgccaaaattcttttcatcgtcggtttggaagtcgacgagccaccctaggaggacgattctccaaacgtccatctggtagctgtgcttggtcacgtggaggagggtgaggttcctccaaaactgctggcgctctccaagcaactccgattctggttcggatgttgaccagttcgatcggataaatgtcgacaagcatcccttgctcgcgagggctaaaccctacatattcttgtatgcacggttttactgggtctacttgaagacccaaccgtacaaaatgatcgacaagtgttatgtccggagagatgaagagaccctccggaccataacaggtgaatccatcaaaatggatctcggcaattctgccaaaatgttcgccaagtagcgtggctccttcgctaagttctccgcgtaggcggacttcgacagcacggcgctcccgtgctgtttcataccaatgcggtccattagaccgctcaatccatgagctcaatggctcaatttggcgaggaacaggaggttcctgccagcgaggaactctctcctcctcttcaaatcgaggatcgccaagtccgtaaaggcgatcattgaagacctcggcatctttcgggtatgaccacccggcgagccgagaaataaggcccttatcgtatgggaataggcattccgtggaaggatgatttgaagagtgtggttgggtggcaaatccgcgacccttttataccactatccaaccgaagcgatgaatcatttcccaaaacaagggatgactcacaaaattttttaaatgccgaggggataggacgtgattcaacaccacatccgaaggatcctcccccggccaaatacagtattgccaatactgtaggcacattaccataaccctttctcattaaagaccaggaaataaatttccaaagtctatagaaaggagaaattttaatgaaaattgttaggcaaacaatgcctaaacaaataatcattatgaaggcaactgatgattggatgtcaatcaaagaccaaagggtcgccttccaatcaaaattccagtttggccaactggattggctgtttatcactctttcggagtgatttggactgtaatcttctatttgttcgggctggacatagtgtaatgtcccttttagaacaaaagaagtatttccagccaaacactttgtttggcattttgtgtcaattctggctttatcaaaagccaaaattgtctggtaaattgatgcgttggaatcacattttgtcgaaaaatgtgttccatcatcgcatttaatctcggcaagagaattgccaaaatttgtcgagcacacataacggaattgtgctcccgttgaacatctgtaacacccagatatgttcaacggcaaaattgtgcaaaggctttggtgaagttccaaagccatttggagaccttcgatttgaaggtttaattggacaggactaaatcctgtcaaggcaattacctttctcccagtatttctgagttggtaatttttgatgtttaatggaagtctcctctctggactttccaataatttttcaaggttatgtgaacggcaattgcagttcactaaacctgatgaatggtcaggtatgcaatcagtgcatgcctgaacaccaagactgcaattgaaatcaattgcttcttgccgacttttacagttaaagtcaattgttaatggctctctggttagagccatgttgctcccgtcataaacaaaatctgagtttaagacgggggcgggcggaaaagttactccaatcggagtaaggctgatgttgttccatttcagtgttcttcctggatagaggaacacctgagttgacttgggtttttcgctcaagggtttcccaggcgaattattgcat

SEQ ID NO: 15612 - DNA, 965 bp, Heterodera glycines
aaaaatctgaagtttaattttgtttttgatatgaaaaaaaaatgtgttagtcaagtgtcataacgttttaaatacggaattttttattccatatcaattgaaagctgcagtaaataaatgtgtaatgctacaaaaaaaactgattttcacttcgccttgttgttgtttaatgtttatcgaggaaagaaatatgagctccgagttcaaaggtcatcaaggccaattaggatgaaggggggggggggggaagggttgaaaaatttgtttataactactacctttttaaaagaaggcacgctcaaatatttttttaatatttattaccatggaatggcatgacatgtgatatttgcaatgccatgtctcgagatattgtcatgaaggacgaactgtatgaccaaatgacatggcatggaacagcatgaaattatcatgaaagaccatgtaagttaagaatgtgacctttgaagaccaaaaacaaaaaccatattaacacacgcaacggtttgctttttttgaaaaccttacaattcgtactggaaatttgggccaaaattcgccggaatgcgatcctcaaaatccacaagcgtacaacaaccaaaaagatgaatcgggtcagcgtacaagtgcccagtttctcaaataataaaaatgaatttgtttaaaaatatgttgttcaataccgagacgggtcccgttgatcgtaaaaaaattgcgcggttaaacaaatcaatgccgcatccgaccacgtccccctcgccatagtgcgttgcccatccaatggggtgccagcccaattccgaaatcgcttaatttgggattagaattatttagattgttccatgattttttttgcctttgcatcttgaacacggaagtttcaaagtaaaaatgctgtaagtgcatcgcgccggcaacaatgctctcagagaagagaaatctttaaaaaaaaattcagatttttt

SEQ ID NO: 15613 - DNA, 2277 bp, Heterodera glycines
  unsure (1)..(2277): unsure at all n locations
caatttttaggcatttcctcttttctccttcgctagcccccccccccctttatgtaggttaataatactggaattaccaagaataagtcagatgaaattattaaaatatgggtagccttttaataaaaattgaaaaaaaaattgttttataaaaaataatcttgcaagaaatcgtctcgaaaaataatccaaaagtcaaattgcggataaatcccaaaaatccgcaacccgcaatccgtaactccaaaacccccgcaatttccgtaatccgtaattgcgcccagccctggtggggagggagagtaaactgtggagcacttgccctgaacgacttgtcctttaccattctgttgtccaattcctccgcctgtttgatgtagtgcacttgttcgcttaagctcaacgattgcagtgccgagttgacccatccttcgcgttccaattcgatgaattcctccaagtgtttggaaatctgcggcttcagcatctcactcgactcctccccctcctcttcgtccgcattggcactctctgcttcctaaaattgaatcggtttttggacaattagttccgacgggaatagcccaacagaaggaactgtcccatttgcgcgttgccattttgcgtgtttttgtctgctttagccaatgttaattttttaatcaattggttgattttggcgcaaattaagcagggcgccaaagtaaggggcattccattaaaaaccctttaaaatttatcaaataaattcaaaaaaaatttctcattttaatttcagtgtttctgaggtgtgaacaaatggaaccaattatccaagcacaaattgtgcttagcacttaattatgttcatttaccgtttgattgctcctcgctttggaagactgctcaacattccagcggagaaagcttgtctgaaaatagacttttaattgagactaacggaacaatatcattttataattaacaaattcaaaaaggtacagtaaaatgccgacagttcgatatttatgggtaaaatgcctgttagggtgcgtgaatcccgtgcatcattttgtttccaaacggcacttttcattcccccaaaaagaggccgtgagaattcgcaggaatacggtattttttctaattagtgcaattatcgtacgctcgcaaaccgaccaggtactgtttgagagctgcctcctgttcctttgtcggcccatcttttccgatgattcctccggcatcttttaatgctttcaaggccaagggtagagcaactttcgtcaacaaaagaaactgatcgttcagattttccattcccggcgaattgaacgccagacgaagctcacgctcgtgcgtcacatcgtcattcttgaaaaacaaaacataatagccacaatcaaaaattaatcggtcaataattaagtgcccagaaaatgaaaaaaagtggaaaatagccgagcgtaatcccaactccactcatggccccgcaaaccaaaaaacctcggtaaggaattttcaggaattactttcaagattttatgtctaaaattcagattttaattttaaaaattattttctccataaaatagataaaaatattacgacatttttgagttaattttaaaaataagaatttatggaaaggcggcgccggaaaaatttaagggatttctgcgaaaattttgttcagctaaatgtagacagatagttagtcggtctctctttgttgtggcatttccctgatttgtgagttgatttggcaccgatgtcgacccaacaaaaaatatctgttacttttgaaaaatcgccctcgtcgttgatcagatcatcaatttcacggccactttggtacttctaaatgaatttatttggcttacactttgtcaattgataatgaaaatgcgtaattccaagtcagtcacacaaaacgaaagaaagaaaaattattatttctccaaatgaatattttttaaataaaacaaatcagaaaactaaaagcagaaatttaaattttttaaataggcataatttttcgatttccattgcaacgtttccaactttatcagaaaacttctaattattttaatttaaaaatttgtgaattcattatgaaaataaaattttcaggggggggggaattcgtgtgaagaacgaaaagtcctcatttatttactcactgaccgttccataaatttcgtcagaagattcgtgcagatgaaagtcttgcattgttccgtanataacatcagactcgtacgccttcttcagtctgtgagacaaaatttgaaaaat

SEQ ID NO: 15614 - DNA, 197 bp, Heterodera glycines
agggggaggcaaactcgtaaatcgtacgggggcccgaggccgtcaactttttggcctctgaggggggggggggtgggtattcgtatttagtaaaggcaaatttctgacccccccccccccacttgtccatgtatgaaatgaataaaatccaaatttaatttaaattaaaacacagccaaaatttttaagcgtaatta

SEQ ID NO: 15615 - DNA, 2166 bp, Heterodera glycines
acaaatcgccctcaatgaggtgagtgatcagagcaattcaattgcttttttactgtcaaaagtaattaattaacatgctttttttggctgcaattgcttagtgtcttcggcgcgaaaaattgaaaaatttaccgtatcctaagactcatgaataaataccatagtcccttgccaatctcaaggttttcgatgccatgccatttacattttccctaaattttctcagtgccttcgccggcggcgctccgttcggcgccatgtccgtggctgacctgggcagtctgacccgtctggaggacaaaattcgcctgctgcaagaggacttggagtcggagcgcgagctgcgcaaccgggttggttttttgatggagctccccaatttttgaaatttaaaaaaataaataaatttaattcaaaaatttcctcgtagattgagcgtgaacgtgccgacctcagcgtgcagctgatcgcgctcactgaccgtcttggtaagttgcatttgttggcggggcatggccaccaattgatggcattatgccaacattttgctccatttttcttccagatgatgccgagggcacaaccgaccaacaagtccgtgccaattcaaattttaaaagatataattttgattttttttttaattttagatcgaagccaaccgcaagcgtgaagcggagctgcaaaagttgcgcaaactgttggaagagtcccagttggaggccgaagacgcgctgaacgtgctgcgcaagaagcacaacgtaaagcatttaggggcattaagctgagagaaatttgatgtgccattttgggtgaaaatcggagactaattaaccttcattaatatacatttcgttttgttcgcttttcaggatgcttgccttgactacaacgagcaaattgagggattgcaaaagaaaaatgcgaagtaacaataattaattataggtgtaaaaatttattggatttaaagcggcttacttttttgtgacttcttttgcctaattatagcataatttttgccgatttgtacagccctcctccgatgccgaaattaaaatcgcaaaattttacagcaatttgaaatttataccaagacggaaacaactcaaattgggacaattttgaatgattagatatccagatcaacagtgacctgtttgatcgctgttgatcacattcaatgaacccaattctctgatcactttcaggattgatcgcgagcgtcagcgcctgcagcacgaagtgatcgaactgaccgccaccattgatcaggtgcagaaggaaaagcatgcagcggaaaaggctgcagaacgcttcgaggcccaggccattgacttggccaacaagtgaaattttatgaattagaaaaaaatttggaaaaatttcaagggtggaggacttgaacaaacatgtcaacgacttggcccaacaacgccaacgtctccaagcggaaaacaatggtaaaaagttatggatatcattaatttatgatgcaattaggcatgaatatttatatcaatttcagtttaaaatttcatgccaattaatttttgtggcaccttttttgttaggcaattaaatttttcatttttccatgccaatttccacatttcaaattttgcgtgtcagttgtttttatgtaaattcaaatggcatctatttatattgcaaaattagtaaatttaattatttttggtaattagtttctttgtaattaattaattacccatgcatgactaatttggcatttatatattatagacctgctcaaggaagtacatgaccaaaaggtgcagctggacaacctgcagcacgtcaagtaccagctagcccaacagctggaggaggcgcgccgccgcctggaggatgcggagcgcgagcgctcgcaaatgcaggcacaactgcaccaagtgcagttggagcttgacgcggtgcgcaccgcgttggacgaggaatccgctgcgcgtgcggtgagcaattttatttttgttttattttggccaatcagactgatgaaaataaattatgaagcctttccccgccgattgtagccgatcagtgtgatcatattaattatgaagttttcccgatacataccgtaattcgcatatccaaacatttaccgtaagagcgtagtcaaaacaaccgtcgccactaactaac

SEQ ID NO: 15616 - DNA, 1483 bp, Heterodera glycines
acttccaaaattgtcatttgtattaccatatccaacggcgggtggctcggtataccgtaggaaaaaatttgatgcttttccccgacatatactgtaattcgtatatccaaacatttaccgctagtgcttaaccaatcaaccgtaaaccgtagtcactaactttccaaaactgtcattgacatttaccgtacaccggcgtgagcgactcggttctgtaggaaaaaaattggtgtttttccccgacacaagccgtaatccctataccgagcttaacccaatcaatcgtagtcactcgctaacttccaaaattgtcactgacatttatttaccgtacacaccggcgggcggttcggtactgtaagaaaaattttcatcaaaatattttcacaggaagcggagcacaaactgtcgctggcgaacaccgaaatttcacaatggaagagcaaatttgacgctgaagtggcactgcaccacgaggaggtggaggacttgcgcaagaagatgatgcagaagcaggccgagtatgaagagcaaatcgaaattgtacgttggacaaacggtggcacaattagaggggggagaggggctttaataatttggatggacattagggtggtaattagggcccgaggcacaactcgggccgcgcacttgtagattatctaagtcatgatgattggcacatttttacgactgaaatagactttttttggcgtcggaaactgataaaaatttccccgaaaattttcagatgctgcaaaagatttcgcagctggagaaggccaagtcgcgcttgcagtccgaggtcgaagtgctcattgtggacctggagaaggcgcagaacaccatcgccatactggagagggccaaggtcgaaaaaagggaaaccgacactaattatgcctaaatggagaaaataggcattccatcgggactaattaggccatcaatggagaaaatttaggtattcagtcgatattaattcgtcttgactgagggctaattaggtcgcaaaatcatgagaatctcagctatgctaaccatggtccgaatcgagggactcacgcgactaatttatgccagaaataaaccgggagtgaatctagcgactaattaggaggtagattccatataagacggaatatggggaactcgaacccggcaccataacatgagtacaatgtcattaccgtataggagcaactggagcgtacggtggcggagctgaaacaacgcatcgacgagttaaccgtggagctggagaacacgtaaaaatttttttagaaaaatgaaatttttgaaaaaatttcccaggcaacgtgagctgcgaggcgcactcgccgagcttcagaagatgaagcacctgtacgagaaggccgtcgagcagaaggaggcacttgcgcgtgagaacaaaaaactgcaggacgacttgcacgaggccaaggaagcgcttgcggacgccaaccgcaagctgcacgagctg

SEQ ID NO: 15617 - DNA, 2055 bp, Heterodera glycines
  unsure (1)..(2055): unsure at all n locations
ggaccatccctcaaaaatatcagcaaaaaatacttctttccaggngagatagaatggattctcaaaaaagtccgaaagtaaacggaaaaaatttgatgggaacggaaattaaggattttttgggaaaattcgacggaattgtggcacaattgagggcaattgtttttcaagggaccgaggaggtaatggagacggacaacatcgactttgccttgacctgggatatgcagtgcggcggactcggaccggagcatcgaaattgtgtccaattgacaaccgctgatttggacccagttttggagagggccggattcggactcaaggtggccgaaagcagactgaagccacaaaatgcaaaattcgggcttaaggtcgtcggaactccgttgaaggctttgttggccacttttctgttaaaaaccaacgccatttcttcatctgcagccggcagaaagttggcacaatcagtgattggagcaccagtcgggtttgaactgatcactttcatcggaagccgcgaagaccaaatcaaaagtggccgaattccggtggaagaagatttggaggccatcctcgagaaatggaccgaatgctgtgcagttacacggacgaaattggcaaaatgtggatttggcgccatcaatgtgccgattccgcgctcaattgaagacctcccagaaggagaaggaaaaccgtggaccgaactgctcggaaaagccggatttgtgctggagaaagtgaaggccacgtcggtgctgcgcaaacaccaattcgttacgtcgccacgcataattattggagactcaagcgcaaagcaattggaggacttgtggccgacttctcagtttattggcgccacccaaggaagtgttggagatgtaattcgggcatttgacgcagtggccctgtcgtccaaagtcaaagtgggcgtgattataatcgggcgtgacgctctgatcagaaacgaaacggccgacaacgtcatggagaagattggaagactcatccaattgtgcgcccaattccaacatgttcagtttttttggctgcctccgccgttcatccgcgatcaacaaattgaacacgacatgctgatcgaccgaatgaaggaccatttcgcgctgatcaggggaaacattcgctatgtgtcgacaacaccgtcaggccgatcgcttctcgaaatttggcgctatgggaacggctacaacaccgaacatgtttctgccgaaggaacgatgaaggagaagggactgtacatgctcaaggcatggttgatgacacaagtcaacgatttcccgggtgatcgagaattggggatcgagaagaaaagggcggagagcgaagagaagggaagagggaaaacggaagggaaaaacgtgagaacgggagaatcagaccgacaacccagtcaccgccccattcgatcgccatttcgtcacaccggccatgcttttcatcgttcgaatcgtacgccgactcatcacccgtatgcgaatcccgtcgaccgacaccagccccagccttttcggatgccgaatcagcaaggcccgagccgccgacagttccagcgctgaggacatcgcttgtcggagggcgaggatgtcgtaattaataatgacctcattttatttttgattttatgatatttttggcattttgttttaatgtttgtgatttcgtttttgttttcgttttttgtcctcagactttaatttggaattgcctgacataaaataataaggctttattctgtgtgctttaattgtgtgcaagtgctgaactgttcgacgtgctgctgagtaaaattaaattatttgtacggttgtgaaagtcaccgaaaacgatggaaaatttgcgcgagatttgttccgatgttgaagcttaattaattaagattttgagcggatgataaaatttattggttaggattagcgtatgctttagcctcgttttattcccttttaggtctgaaaatggctaaattttcaaatgagtacttgtggtttttttttttggaatttttgagttttagaatttttgataggaatagaaata

SEQ ID NO: 15618 - DNA, 3849 bp, Heterodera glycines
  unsure (1)..(3849): unsure at all n locations
ataatctctcttacacgaccaattcattattttgcctccgcggcggcggtgcgttcgaaaatgcgtccggcacgcgggtacagaaaaacacgagagtttgggacacgattctgctccttgaaaaagcaagcatcgaattaataagtggcatggaaactcattctcgtgaggttcgttaggaaattggctctattgcagtttagccaaccataaagacacgaccataaaataatttgagaactgtaatgcacaaaattgatccaagattcaaaaagttatagtcaaaaatatttagaaaaccagttttttgaagttaaaatatggtgcatttgtcaaattattttatagtcgtgtatttatggtcatgaaaatgcaatagcgccaaaaaattcatataagatttataaaagaaatattttttgtaggatttggcgaacaaagtgactgacccggcagtgctgacggagtgcgtagccaagtgccaactccggcggcgtcaggtcccggtgggcaaacgcaccgcagatgagcgagtccaacaggtgctgcttgtgtttctggcggcgttcgctgcagtggccatgacggtgacgctgcgaagccgacgactgcatcttcttccgcttcatgccgctgttgctggctttggtgttgttgttggtgtctccctcctccgtcgccttcgctttgctctccgtcttttgctgctgtccctcttcaccaacactttcttccgtttccgtcttcgtctctccgccctccttctttccgtgttctttggtcgccgtttcctccctcgtcactggcggtgtcttctcatggccaccgttggtgtcctcatcgcagctgctgaacacgtccaagtcggacaagtccgagtaggagtccgtctgctgtccgtccccctcctctttttcttcttcgttccctgcatccgtttcacggtccccacaatcaatgcccgtcccgtgctgtctcacaatgccctcatcgtcctgcccctttggttgctgctgtctcttttgacgcagaaatatttgccgttcctaaaatttggggaaaatgagtgagagagagtggaggggagggaaaagaagaaagagtaagagagaggggaagagaatgataagacaggaagagggcgggtgaaaggaagcgataagaggaaaggaaacggaggagagaaaataaaagagaagtagagaagagggggaaaaaggaaaagacgaaacaaaagagaaaaacgccctgcccaccctgaacagctgacagaatgcaattgcggcctcacgattacggaagcgaacacggataagtgcgggacgcgacgatcccattgcatttgaccagtcatattcttctggaaatacaattcaatgtattttcctaacccaaactaattgtctccccaaaaattgccaaagtgccgactttgttcacccccggtggcaccgtccgccgttttgccttcgccccactgtttatctgctcccgttgtcattgtcgtcgtctgttgctgttggccctcgcctcgtgccgtcgtcaccgttgttgcgctacgcgacgcactgctgccggtgccgcgtcgcggcaaacgctcaattcgcagcggcaaatggccgctcgccaccacaatcggctgcccggccgcgttggtggccacggcggagttcttcaacaggtcgagtttctgctgaaaatttgggatcgagtcgtgacaaattccctaaaaaatgcgtattattactactttgatttgattgcatcgctgtcgaaacccatcggaggacacgacgctgtacacaatgctggtgatccgttccgtgtcctcttccgcactgccgctgtgttcagcgacattttgaatgatcacatagcatctgtggagagaagggaaattttttgtcattttttttgatattctgtaaacaaggcatccatggatgggagcagttcgccctcccccccataccgtttccgaccaggaaaattgttttctagatatttttcaagaaaaaaaaatattataaatatcttttaaaaaatacgaagaaaaaatttattaaaatttattgagttaatttttgcaaattttttgaaaatttagaatggatcataaaattttgaaaaaagcgctaaaagattcaattcctctttgattttgccaaaaatttttcaattgtaaaaatctctacaaggataaaaaggtagtttttgagacaagaaaagaataaacacgtaattttgtttttacaagatgaaatttacacatttgacatataacaattccgtaaaaaaataatttttaccaagataaatgaattattgtaaacagaaccctctttttaaaatgattatcccctcgcattttttcggtgtttaacccttaaaacaagtaaactcactgcttctgcttgtacagcgccgcatactttcgcagcgatgcaacaagcacatgcaaatattggcccatcgaaaattgttcccatggcacaagttcgacacgtccgtttgggaattcctttaaaaacggaccttttaagagggttggcattcaccgaccaaccacaaaccctgtacaaatggaagccgttgtggtaatagcggggggcgacgttgagcaaacggccgtgttggtactgctgctgcgaatggtggggagggagttgaacggaggggtgggggaaaaggtaattttaaactagccaaaaacagtggaatcaatttggagatggcagtcccaaacagaaacaaaaaatcggagggagaatccgaagacccttcttttgtgctttggttcaaatattaacaaaaacgccactctgttggccgcgctgttcttctcgtcgcacatctgctgcaaatagttgcgcagcactctctccggccgcgtcaaatccgcgtggcaaaacggggcgcggacttggcgacggtcgaacacgcggaagacggacctttcaaatgggggagggaagccaaaatgagaagaaattacaggaacagagggcagaaaacatctgttgcactttttttgtacattttcttatcatatgacattaaaatttccaaaaagttttccaggcggcgcctatcgacaccgctggaccccattggagcattatactttgaaaatttgaccccaaaacggtaaaaaatcgttatttttagcgcaaaagccctacaaattcctgctttttcgccgcgataaaaattttgaaaaataatactgtagaaatttttttagcccgaataggcaaaaaaagctcctcgggtgctctccccgaattgtttactggatacgggcctgtggccagagaatgcaaaagagccaaacaaaaaatggtgggaccaaccgattgaacaactgcatgaagaacagagcgcactcgtggttacggaaatggacgcggatcagcacacagtcggtccactggtgctgctgtgggagttgaccaccatcaccgccattgccgccgcccaagtgaaaaacaccgccggcgaacggagcggcggcggccgccgaatgggggacggacgacaaaatgacggagggattggagagggactgaaacggcggcggaggggttttggacgaaatgccgtaaatgtatccaaaagattttatgcaaatgaaaaacatcttttgggtatgaattatcttttataaattaggggtcgataaacaaaggaggacccttttgaagataatgagaattaacacatttttaaggttgctaatcataatgtcatttatttgttcatttttttctaaaaacaaaaaattttttttaatcaaaagaggtaccaccctctttggttttggaacanaaaaacttttaatttctcgaa

SEQ ID NO: 15619 - DNA, 1622 bp, Heterodera glycines
ttatttctcttttttcttcttctttttcttcccatttttcattaaatgatttttgttgcgcttttttcttttctgatccaacataattaatgctaattatgatgatcaaaaacacaaataaagtgaatgaaagacacaatttcataataatactttgattttcttaaacatttaatgttaaatatttttgaataattttaattgatttatagtttaagaaaaagaattaaatttgagaaaaatttgttgaagaaaataaattttattaaatattttgttatccgatttttttaacaatgaatcaattaaaattaaaatagctaattaaataaaaagagaatgaaaaatgggaaattaaaaaaattcaagtgaaaatattaaaaaactttttttatatttttctttcacaaaaatcaaaacaaaaaagaaatttaaaaatcggaaacaaattttcaataattttcaaataaatagaaaattttattgttcgcattctaatagctaatttttgaaaaactaggctcaattttttaattaattttccgtaaaaattcaacattcttgtccaaatatgcaaagctttaaaaagccagaaattttaatgaattttgtcaatcattttttatcaaaaatgataaattccttgtttttttatttaaaaaggaacaatgtttaataataaatgtcataaatttttgaaaattttcaaatttatcagtgattaaacaaataaataaataaatttttttttctcaaaataaagtgggatatgattcccgatctggatccaggggttttcccgcgggaatcccatttccgccaatctctaataagcaattgtcaattaataattcttattttccattatgcatttaaattattaggggttaatcccgcgagatccctcaaatcctgcagctggatcgcaaaatttgaatttcctgtaacatttgtttattcattttaattgtatttttgaccaacaaaattgatcaaagcggatcagaaaataaaaacttcaacaaaaaacatttgacgaaatatttggaaaaagggaagaaaaattggaagaaaaaagagaaataattgaaaaatattataaaacaaaagaaaaaattaagcaaaaaggaagaaaatattcaagaaaagaacggaataaaattaattcgaaaattgcgaaaaaattggtgacaaataaaacatatattcaaaaatggattaaagaatttggtcttcaaaaaaagatatataaaagccacaaatcaaaaactgatgaagaaaaaattgaaaatgtgcaaaaattcattaccaggagcatcagcacaaaaaccggagaatgccgagagatctgtgaaattagatgaaaaatcaaattttattattagccttaaccaactacgagtggcacaacgcctacagcaacaaatctggcacaattgaaaattgtccaaatttcgcgatttaaagtaaagtttttgaaaaaattgaggatttttagcggccggagttgccgataggccaccacagggaaatttttgaaaatttaagttgcaatttattaacacaaattgtacaaaactactaattttttgaaaaaaaaatcaaaaaaaatttccgactta

SEQ ID NO: 15620 - DNA, 1737 bp, Heterodera glycines
  unsure (1)..(1737): unsure at all n locations
aaaaaatattattagcttataaatataaaaaggaagtaaacaaattttagtattacatgancgaaaggaaaaattacatcacaattaattcgtggattgattatcatataattacaaacattaaacaacaggacattttaagattaaaaattttcaaaaattgttgacaaaaaattcttataggcatgtccaattctaaggacaagtaaaaattttatcaaacgaaattaaaaacgtgtcaattttattcaaaacgatttgtattgaaaaattcggttgaacttttataggttttcagattttatgacaaaaaaaaaaaaataaaaaattttaccttatatatttttatatataaaaaaaaaaaataagaatgactgaattataaaatgaaaagtaacattactgttaggcatatttaaaagttatcattttccggcaaacccattttgaataattttaattgattttataatttttattttaagaaagtaaatacaatttgagaaaaaaaaattaaataaaaaattaattgttagtgggaaagacatgcgggccatcgacgagtctgctccgtcaatgtccttgtccacggacgcgtccacaccctcacacagcgcaacatatcaaatcaatttgtttttaatttaaaaaaaacaaagaatttttgaatgtttttaaattttgggtcttcttttttattttcgaattaattttcattttttccatttttctttttctgttattcttttaaagctaatgccaaattttgttttttcatttttgaactgtccaataactcatcccgattttcttacaaattaaggttgacgttctggcaatttttatacaatagacccacaaaaatataaaaatttatttttagcttgtttcgtaaaaactgtcattttagctatttttcgacaaaaagatagcatataactatctttaaaagcaacaaattttgcattcttggtaatattttcgatagctcagattttctctattatcctgcaaaatttcaaataaagtttaagattggttcttgaattcaattaaaaatattctgtataattaactattaagtccgggttttccgttttaattatttttaatgcctttacattactccaaatatttttaaaattttcgccattaaaattataacattttttctattgctatgctttttaaaaataaatttctaccattaaaaagaaactgcattagaaaattattgtttaatattcttggtacatttaaaattccttaaaaaatgctacaaaaaatatttttgtattttatgtttacttttcaatataaaaacaaatatttatttgaagcaaagtgtccctactttttaatattgactatacaattcgagatgggctaaggaaagaacagaaaattaaatcgaaaaatgcgaaaaagtaaatttcttcctttcattcttccgttctttctttttctaattgatttttcgaattaaaaatgctacttcgactaattttcaatgtttttccaatttctttgtcactcattttcggattttctttttttatttgccaataaattttcattttttccattttttcatcctccgttattttacagcgaattccaaattgtttcttccatctgcaaattgtgccatagcaaattccaattttcttacaaattttcgcataattttgtttccattcttcagttgaatattnttcttgtttgttcaaattcatt

SEQ ID NO: 15621 - DNA, 1829 bp, Heterodera glycines
  unsure (1)..(1829): unsure at all n locations
aattgttgtgctggccgagcgctaacaataattaccaaatttattgaagacaaaattaaataacaaatgaagcaatggggaatatcgattggggatgatgcaacaaataaatgaagtgaagatacaagtgaaagaatgggtcaaagggcggactatttatggggaggaaagtcgagagagagtacagaggcgagggacataaacaaataaataattggggcggccatttgagtcccatccctaacatctcacccttaaaaaggatctttttcatctgacacgtccattctttttctcgacacgtctgtccgacacgtccattcttcttcggcattcaacgtttgccattggagttcgcgtggcgatcgcttccatttgcgattcggagtccacaaatccaggtccttcatacttggccggtgaatactcctccaaattgttgcatggtaccgtcccgtatatccatcttggaagtggacgtcgtacatcattccctttcggctaatgacgtaaccaatttgcatcggttgtgatcctccaattgtgatcactttcgctccgacaacaaaattgttcgatggtctctgcccttcattcttttgggctttctttgatttggacttggcagggtttgaattttaagaaatttttgctttttatttttacaattttttttggcaaaattgaattaaaaatttttgtcaaaaatatgccattttacttagggtggaacataatttttgatacccaaattttttccaattttaaaaaattcataactccgttatttctgcgcctatttaaatgattcttttttattttgttcttcatggtatcctcttttatatcttactatcgtttcactttttatttgattgatagatttttctgccttttttcccgaccatgccaaaattgaaaattggcccactaatttttctcgaattttttatggtcaaaaaccaaagctggtaaacaaaatcctagtttttctatacaatttagaccagtagaatccgaatatggccttaaatgggacctatatttttagcctgagcttgtactgctccaactccatgcatgaagttcgagctgtacaggttttttgcgatcccagagaccaaatctaagaccatattcgaactcaacatacccgatttaccttgtttaattanatttcagaatttcccaaacccactttaaaaacattattgttacttggtggtctttgaaaaatgccgttttttggagaccactttcagtctcggctctccaataattcaattnttgtaaattaaatttttatatttttgtgttcttatagtcctaactgtgctctatttaatcactatttctctggctctgtatctcttttatttttctttaaatcagccatcaaaaatacctacctgaattttatttataaaatattgacaaaactccaaatattgaaagaaatattttttttctccaataaccccaaaaatattttttttattaaccaaaaataatgtacaaatgaaaaaatttgagcgcagaaatgcgtttttttgaggggcgccggacttttcgacagaggacttttcgacagaaggacttttcgacagcaaaggacttttcgacagaaatattttaaatttaaggaggggacttttcgacagtaaaatgtaattaagtttcaaatttaggggtgtaaaatcttaaaattttatccaaaagcaacaaattaagtcaaataattattgagatacataatttttaaattcaaaaattcttttcaagaatgtaaacaaataaatggagatgattttgtttacatattccatttc

SEQ ID NO: 15622 - DNA, 1863 bp, Heterodera glycines
ataatgactaatttcagatgttgcaatagtttgtggctcacttaagcttgttttaatctatctacgaaaaggagtgagaatttagaatattatgtattttcgactttttgttctggttcgagattcgaaatggtcctacatggatgatagaattgtattctccgatgccttggaatcctaaaaaactgaaaattttcttttcctacaatggttggtctcataaagtgcatatagaacatcatcatatgtttcaatttccgatttcgaatttcattgtcagtgcacctcaagatcgttccatacttttagatgtttgtaattctgttctggaagagtcctttgtggaaaagtccgggaacattattgattgctcctttcttcaatacatatgtatcagcaaacaataacactaaaaattggtcccttccctagcaaaagcgcactttacattttccactgtgctaactgtcaccaacggggggggggggggagagaggccacccaaaacgaacgggaaatggcagaaaagagggggcggggggggcaaaagccacgacaaaacagaggggaaaaaaagacatttagtctggccggtttagtctgaccgttttagtcagagggtcggtttagtcagggggacgttttagtctggcaagctgtttttgtcctacacggtttttattgtgatttttttcgaaaaatctttaaatttaatattaaaacatatttaacaaagtatttccaaagaaaaaaataacaagattaagcgcgcatttcatagtttcgagaaatatcaacgataaaattggtggtgtcgggattaacaatggtattgacatggtaattgtgatcattttggtaggccgggtaatgtgttgatggcattgtaagcctgtaagagtcgaagaattctctcatcggcggcatgagcgcctttggaggagggacttcaccagcgacacatcgtgcttgcgattatgagtcaatttttttaataaagctaatgaattttagtggtcaattcctgggaagtttggtaatttgagcccgattttttaaagattttaccaaaaattatggtttggataggaatctgtcacccacagattgtattgtggactagaaaacttaaacatgtagaaatttgtgaagaaaatggaagtcctgcgttttaaagtcacatacataaaatcaaaattaatagattgtcgcattgatggggtgttcttttacccctatttgttgctaaacatacatattttaagtttagtttttccttgtttatgactgacaaaaaaaaatatttgtatgagttctgggcgaaaacggctagccagactaaaacgaccccctcactaaaacggccagactaaactgacccggtccgaaaatatatgttagttaaaaattgagaaattatataacccatgagtgtaccaaaaaaaaaaaatcaaaatattttattcttcacttattttcaatctaactcccattcttaccattgtatttttggtacccgggaacccgcacctaccgggtcgggtaccggattattggattttcaaaaaaccgggtccgggtaccgggatcgggtattgcaaaagacccgctcgggtacacggacccgtgtaaccctaattgtcatgagaatttaattaacaaattttcttttattttaaatccagggccctgcgggccctgtgaaagcaccgtgggcgctttcaacgctggctctagtgggatatatattttggggcgtgacaaaagcatgtattgaccgctaagcgatcctcatagcttaggaacatgagaatttgataatgaacaaatccttaatttaaaaactatattgttataaattta

SEQ ID NO: 15623 - DNA, 3772 bp, Heterodera glycines
  unsure (1)..(3772): unsure at all n locations
atttgtttctcggcgcgtttgtttgggaaaaatttgcttccttggctatctctttttctgctcaacagtaataagaatttcaaccgcattctcagaataattacgccgttctggaatttgtttctcggcgcgtttgtttgggaaaaatttggaaaattggctatctctttttctgctcaacagtaataggaattccaaccgcattctcagaataattacgcctgttctggaatttgtttatcggcgcgtttgtttgggaaaaatttggaaaattggctatctctttttctgctcaacagtaataggaattccaaccgcattctcagaacaattacgccgatactaattgttctggaatttgtttctcggcgcgtttgtttgggaaaaatttggaaaattggctatctctttttctgctcaacagtaattgttagagaaggaagtaattattgattaggtgtatgaccccacgccacttcgccatcttccccctcccattcccctcattcagttgattattgtgcccaccaatttgacctctccaatttattctctgcattaattattttatttatttctccggcaaataaacttatttaatttgttatcttcggacataacaaattttggcgcagtcagcaactcaacgacagcgtttattttccaagctttatctcgtgctgatattgcttgtggtgattcatcataaaccgatctttgccatattttacggcacggtttatcaacaatctgtgcaactaaaccgcatcttctatctctttttctgctcaacagtaataggaattccaaccgcattctcagaataattacgccgatactaattgttctggaatttgtttctcggcgcgtttgtttgggaaaaatttggaaaattggctatctctttttctgctcaacagtaataggaattccaaccgcattctcagaataattacgccgttctggaatttgtttctcggcgcgtttgtttgggaaaaatttggaaaattggctatctctttttctgctcaacagtaataggaattccaaccgcattctcagaataattacgccgatactaattgttctggaatttgtttctcggcgcgtttgtttgggaaaaatttggaaaattggctatctctttttctgctcaacagtaattgttagagaaggaagtaattattgattaggtgtatgaccccacgccacttcgccatcttccccctcccattcccctcattcagttgattattgtgcccaccaatttgactctccaatttattctctgcattaattattttatttatttctccggcaaataaacttatttaatttgtaaaaagggcatcccgatttatgccgcgagccgcctgcaacgctggtcaatgattttggcgaattacgactttgaaattcgctacgtcaacaccacatcatttggccaagccgacgttttgtcccggctcattgctaattatccgcgtccagaggaagacatcctgatagcaaacatctgtgctgatacagattgcttcataaattctgttttcgaaaacagaatcgatcaaatcccagtgacaaccaccgaaatttcttcagccatggccaatgatcaaccactccaaatggttcttcaatttttaagaaacggatggccaaccaaagtcaccgaatctgaaatcagtccatattttccaaaaagggacaaaatttttgaagtggacaattgcctactgtatgaggaccgtgtgatcgtcccaacttcgcttcgcagtcgcatccttaaggcattgcacatcgctcacccaggcattgtgcgcatgaaagcacttgctcgacgtcacgtgtattggccaggaatggactcggcgattgaaaaagttggagcacgtgcgaagagtgccaactgggccagaaaaacccgaccaaagcgcttctttcgccatggccaacgacggacaaagtgtttcagcgagtccacatcgattttgctggcccctgctcagacggtcaccaatatttgattttgatcgactcattttcaaagtgcccagaagtctatcgtatgaatacaatttctgcctatgccacaatatttgtgctccgatcaatcatttttcggctcggaatcccagaagaaattgtttccgacaatgggacccaatttcgatccgccgaattcgccacattttgtaaagaatttggtattaagcacatcttcacaccgccatttcacccacaatcgaatggccaagtcgagcgcttcgttgacaccttcaagcgttcgatgaagaaaatgtcaaaaagcgaaaaggattggatcgaaaagatgctattctcctacagaaccactccacacgtcgccttgaatggcttttcaccggaccaattatttttcggcaggaaattgcgcaccaaactgacgctcatccatccaaaaggggaaaaagccgaaaattttgatcaaaaatcattcaaaaagggacagtcaaaatacaccgacaaaatggctcaaaattttgatcggaagcatggatcaaaactgatcaatttccttccaaatgatcatgttcttctgatcaattatcggaacaacaagacggaatggctccaagggaaaattgttgagaggctccataaatcgcccacatatcgtgtttatgtgcctgttctgcgtcgcgttgttcatcggcacgcaaatcagctaaggcgacgacatcttttggaagacgaagccgaaaaagaggcacctcaagtcgaacagccgccgccggttgtcgaaccgcctcgtcagccccaacaaattcagccagccaattccccattgaaagtccgccgatcgagccgaatcaagaaacccacacaattttactctccatcgagatggaaaatttaagcttaaaccttcgggtttcgaatttaagaggggaggtgttagagaaggaagtaattattgattaggtgtatgaccccacgccacttcgccatcttccccctcccattcccctcattcagttgttattgtgcccaccaattttgacctcccaatttattttctctgcatttttattattttattttcttcggcaaataaacttatttaatttgttatcttcggacataacactaataaacaacaaattattacttaatattttagtttcattaatttgatttcaatcaaaaaagacaataaacaattgcagaatttttcatttattttcataacgcaattattaaaaaaaagattaaaatgtaaaaaatactaccaataaatcagcggaaacgaacggcgaagaagtcaattcagagatggaatatgtatcaaaattttacaaaataaaatatagattaatatattttttcaattaaaatgagatataaaatacaaaaaaattctatgaagtatgttaataataaaattatcttacacaaattttagaactgatggagttttgtaatctcctaaaataaaatagcaaattttatattttttgtaaataaaatcaacttaaaagggatagaagaacagggaatgggccaanattaaaaaataaaaagcgaaatgcgaaaagcgaaaagcgaaatttgcgaaactgaaaaatgcgaaatgaaaaaaaagcaaaatgcgaaaagccaaaatatgcgaaaatgcgaaaagcgaaatgcgaaaagcgaaatttttttctacaattnnnttatagtaaaatcataaagcaaaaatcattttttanaattttattcaaatttaaannatcataaaacgctt

SEQ ID NO: 15624 - DNA, 889 bp, Heterodera glycines
ttattattctccataatttaaattgaaatttccatttttacatttatttttttaaagtgagggaaaggcaaatgcgggagaggcaaaaaacaaaaataaacttcttcagcccaattctatagtttttttttcaaatttatttcatatttatcgaattaactgtccaatgccttggtaaataaaatgaaatattttcaaccttgggaattgttgtccatttttaaaaggttaattaacaattgataattttttatatttccctttaatttctgtccccatttttctttttgcgcaccattccccctcgctccctctcaatcgttcttcccttcctctcccccctcccgcaccaaagaacaaatggtagaaaaactgacgagacatcgtgatgtgaagatatacttaaaggagatatatgtcctaatggcaggaaaaaatatcatagggaagagaaaacataaattaatgaagacaatcgaaagatagtaggcactctaaatatttaagattaattatgaaactgaaaaataataacgattatcgacaactgaaccaaagtaccagagaaatacggagaaagatggacgccctacgtgtgcattcgaaatcgtatggaatcgtacagtaatagcatccacctattttagcttacgagacgaaacgacacccatttattgctcgaggagctgttctccacacagtgtatccatgagcttggccaggaggatgcacggtatttggacgatgcccacgtcaaattacgctttgtgatgacaaagattggtcgtattcacttccgacgagtattgaatgatcacatcccggcacataaaggacaataatgagcctatctgataagtgtgtgcttattgctatttgtaagctataa

SEQ ID NO: 15625 - DNA, 2677 bp, Heterodera glycines
  unsure (1)..(2677): unsure at all n locations
acaacacttaccccccncccctccccctgcaactgtgcacacccccgcaactcattttctgcatcggcaatgacgccttgtcaacaaaacacccccttagcagaagagtaattccctcccccagcaaattcagtcggaaacggaaaccaatccttcttcacatgtgaaaaaagagcgtattctttccctcaatgagagtcctcctattttttcttctgccgccgccgccgccgtttgatcatcggcggaaagggagtgatcggacgacggacagagtgattgatctgctgcccacccacagatgggccatcaaaatgagaaaggaggggagagccggccgatcacatcacttttccgcccacaactcaatccctcccccatttccatgcatttcattcatttcttcccaaaatagcgcccctttctccgctttttccttctgtctatcagtttaattgctcatcatctaatcactgtctcaattcatcaacagcaaaacatgcaacattatttcccccggggtcttttaatttattttcctttcctttaatccgttgaccccccccctccccatttgtcctctttttcccttctcccattacccttattaggtttcgtttgttgggaaccacctcagctgatcactgatcacctgcgggaggagggggagggaattctgcgtttccattatcatttggtttaaaagcgcacgtgtgggacgaacgaacagtcgagggagaattatcatttaaaattttgggaagttcaataaattggtatctgctattattattatatcatttagctgaatacattccaattaatttgttttatttttattgcctgacacagcgcaacaaaaaaaaacaggagaagaacaccacaagttggagcagttcgaaccgactatgataactatcagcagtttgggggacagtggccgaagggaaggaatggcggagaatcgacgggaggaactgccacagattgacggactgaccagcgaacaggtggggagagcaaattgcaatgcaatgaacatggattgacaggtggcagagttcaaagaggcattcgaactgttcgacaaaaacggagacggacgagtgaccgcctcagaagtaaggaaaatggcaaagtgatcggcgatcaaagcaaataaacaaaaaacatttagcttggcattgtgatgcattctcttggccattccccgaccgaagaagaattgcaggaaatggtgcgcgaaattgacgaaaatggtcagcaattaaacgatggactgatcgaatgaaaggaaaattaaccttttcaatgttaagggaatgggagcattgaattggacgaattcattaaaatgatgagccgaaaggagaaagagtcggaaaatgagaaagaattgcgggaagcctttcaggtcggactgactgatcagagctaatcaataatcaatcaatcagtaaaaagaagtgattagaactaatcagccaattgtgatagaagtgatcaaaccttctcaaattgaaattttaaaggtgttcgacaaagacaacgacggttttatttctcccgttgagcttcgctttgtcatgcaaaatttgggggaagaactgacagagagcgaagtgcacgaaatgatccgcgaggctgatttggacggggatggaaaagtgaattttaacggtacgaggaatttcttcagctttttaaactcaccaatacaaatttcagaatttgtatttatgatgaggcaaaaagtttaacggaagagagagagagaaggaagagaaagaacgactgataaaaccaacaaaacttttcaacgggtcatacaaacaaacgccggcggggctttcaggtgcagcggaatacttttggactttttggcacatctccttttggcattccatcacaaaaacaaaaaatattaacgtaaatttaatttctataaaaagcacctgaaactctggtatattaaattgtatcgaatttaaatttttgtagtcttcaaatttgtttataatcaaagtaaatataaggactcagaataagttttaaaaagcttaaaaaagatagaaaaccggccaaatccggtaatttcagttgaagatgagctgtctttaaaatcgagggttaaacgaatcaacgcctgtacatttatagtaccatatttagccatttttgaaaggcttaccttatagcgaatttgaagaaatttgagaaattacacccttaattttgaaaagtatatgtccatatttttgccattttatgtccatatttcgcgattttaatccatatttttggaagccctaataatcatcaatcaatcaattctttttattgtttttgatatcactcggcccggcgaaagcggcgtcgagaagactgaaaaaacaattagcattgagcatccttaaaattgttcaccttttgtcaaatccgtcatcaccgataaaagacgcactttgattctgtcgagcagtcaatttttgcatctcatttatccatttttcctcatcgcccgctgcaattggacaacgcatgagcataaaaccactttcatcttcttcattccttgtgatgacattgtcaaattctccccagtcaattcgttgatcatttcaaatggcaaaacggagcccattgaagaggacggcggaaagtaaacgccaatgac

SEQ ID NO: 15626 - DNA, 2416 bp, Heterodera glycines
catctccggcgggtcggtcacaaaatcctttgaagcaaaattgcatcagaatggaggaagaagtgagagccggtgctactgttggtggcgtaatgcttgaaaagaaagttattgaatttctaaaagatgagtgcagcaaaggccaaacagaatcagagccaatggaggaaaagccgattatggggaaaatggtaacagtggaacttgttattttggagacaccaacaactggaatgctggatggtggagctcaaatttctttgatcggtggcaaattcttttatgaattagtgacgagtggaaagttaaacactatgaaaagtggttttaaacgcgtttcaacgcggatttctgatgttaatggtaaagagttagagtgtttcggagtgattactcttccagtctttcgcaaagggtgtagtacgacaaacatttgctttcacatcaccagcgcaccatttgggtatgatttactcattggaacgaatgcgcttcgttcattgggcttttgtctttttgacatcccaaacaaggaaatgatcaattttgaggaaattcacccgaaaaaggaaaagtctgttggaattctttatcaaacgactctcaaaccgttatcaatgaaactggtaacattgtcagttggaaatgaatggaatgacaaagaagtaattgtcacatcgtcgaatgagaaaagtttgcatagatttgagccaaccgttgggaaaatcaccgcagggaaaataaccgttccaattgtgaattcatcaattgaattcgtgcaagttgacgaaaaagaaataattgtcgagttgtttccgacaaatcttttcgcaaaggcggacgattcgcttggctcaccattgttggtgaacaatcttaaattgacaccaaaaatgaatgaaattaagtgccaaagcatggaaattctcgaatgtttgaaaagtcaggcaaaagacatgtctgatcaagagtttttacctctcgggcgattgataagcgaatttgacaacatcttcgcaattcgtgaggaggaattgacacagacggacatggtcgaacatcgcattgacactgaaaatgcgaaaccgattaaagcaaaacatagacctgtcccgtacgcttaccgagaaaaagtcgccacaatgatcaaagattatctcggaagaggtttgatcaggccatcattttcgccctgggcatcacccattgtgatagtcccaaaaagggatggaactctccgcttttgtgttgattatagagggctgaactctgtaacagttaaagatgcatttcctttaccaaacatcgatagcactttgttagcgctcggcggaaaaaagtttttctcggtcatcgatttcatgtcaggatattggcagataagaatggaccctgaatcggttgaaaagacagcatttgtgacggaattcggacttcacgaattcaatgtcttaccgtttggcctctgcaacgcagttgcaactttccaacgcttcatgacgcgtctttttgaaggaatgattaacgattctgtttttgtgtacatcgacgatgttttgatcgcttctgaatcttggagtgaacatttaaagcatcttcgagaagttttcaagcgaattgatgaagcgggtttgaaactgaaaatttccaagtgccgttttgccgttaaagaaattccatttcttggccatatcttaactcgagaaggtgtaaaaatggacatggacaaagtcaaaccagtcattgaacttccaacgccaaccagtaaaaaagaactccattcactccttggattcttaacttactaccggaaatatatttttggttttgggtctttggcagcaccactgtttcgtctcctaaaaaaggacgtgaagtttgaaatcaaggaagttgaattaggcgcaattaaagcactaaaaaagagcattttggaccacgcaatgctttatttcccggatttcaaagcagcagttgacgaccaaaaacggcaatttgtgatgttaactgatgccagtaaaattggtttagcagccatactttgccagccggacgaaaatgggaatttaagacccatttacttcgcgtcccgacaatgtaatcggcacgaggcgcgatactgcccaacagagcttgaggcgttggccatcagatttggcacaaagaaatatgctcaatttatcactatgattccaacaagagtgataacagaccatcgtgcactcgtttcaatgttcaaaagcaaaaacgagactggaaatagtcgtgtggataaatggttgatggcgatgaattcccgttttatccttcaagtcgaataccagcctggcaaaaagaatatacttgccgacctcctttctaggtccaaaacattgcttaacgcaacagaaaaacgtggaaagggaaaaattcaaaa

SEQ ID NO: 15627 - DNA, 4701 bp, Heterodera glycines
ttttcattttatttctttcatttttcacgttttgagtgcccccccccccaatttcgtccacataaattgccaattactcgcctcaattggcgcagtttcttctgccaaattatttaacaaaaacaacacatttcgttgcagccaaaaagtttaaaaaataatttaaaaaagacaaaatgaagaaaatggcaaaagaacaaagaaaatggagaaagaagagacgggcggcgcgagagtcaaatcggcaaatccagcacaaaacaattgtcaaaagtcccattttcttctgatgcgattggttggccgtcgttcgtagcgaaaggctttttatgcggcgatttgaaagcaaagaccaaaagacaataaaatccttaaaatcaccactcattgatgagcagcaacagatggacgaatgaataaatgaatagggaaaagggggggggggggggacggatgttacgttaacgttacatgtgtcatctcttaataagcaacaaacaaaacgatttctccagctggcatgagatggacagtgacggaaggaatgtggcagccgatgagagaaaacggaaggacaaatgaaagaaaagaaaaagagaggaaaaagagagggggagagagacaagcggataaagggataaaaagcgcaattttaaatttatttacttttgaagagaaaatgaaggaaaagcgaagcaaatggcaaattaaaacggaacaattcacggaatgagaaacccagcggaaaaagaggtaaatgtgaaaatgtgggcggaaaggaaaaaacgcaccaaagggaggggaaaggggggggctaaataaagataaaaatgattgcccaaaaacccatgaaaatacaaaccaataaaatacgaaaacgaagtcaaataaaaataggaatatgaatacgaaaatataaatacgaaataacaaacaaaataaaaattgcaaaaaaaaactcaaaaaacggaatggcctgtttcggtgccaaatcaattaaataaataaatcattaataccatttttgataaaagtgaagacagatttctgagtgtttttggggagattgatcactgatcagtcacaaattttgaattcctttggcccatttcgaatcccgcgccgaattcatacaaaaagtcaaaaaaagcagtgaaagccaacattgttttttcctttctttcagctgttcatctccgaaattgtcgaaaagtatttgaaggaggaaataggcgaagacaaaagcgacggaagttcatcctcttcttcttcatcagagtcagcagaaacatcacgggaaacggaggaggacgagcaaatttggggaggaaaagcacgcactgatcagtcccagtgaaagcgccgtctgatcagtgaagggacggagcaaaaaattggtgattgacgcaaaaaaaaaacagattgtcattccatccatatttataattattctcttgatataaaatggttagaaaatttggcattatttcaattgaccccataaaaaagggaacacaatcggtggcggaatgtttgggattttttctaaaacttatgccttttttttggttttcgctttgaatttttgaccatttcttttcgagacttcttcaatcattctgagaattgttttaatttcattcataaatcattctttttttctatttttccgatcacttcctttatcacttttctcggctttttcctggctttttctttctctatcacttccttttcctttcatttttcccatcattcctttattttttttgctaattttcctatcgttctgtttattatcttgatatttttctcctttctcccctttacaccaccacatttatcaccaccgatcggagtatttgtcaaaatgtgctcattttgatttggtgcaaaaggacggacggacctttgacgggacggaacggaaggcgggggacagaaaattcagtaccaaaaaaagtaaaaaaaattttatgaaaaggtgatgaattgaatgtacggattttcataattttttcaattactatgccaattagcacaggcttatcgatgggtagggttgttgatggttacaaaattttccccctttctacgggtcacaattgggacgagactgagttgtccgcccgatcagtgatcgtttcgctttgggtgggggttaagtgatcgcagcaccgatcggagagtgtcacacgacgtatgatcaaacggtcaatcgcgcggctgcaatgatcgggggtctccattcacccctccccctttcccccgcccgcctccgccggcgactgcgaccggcgctgacccgaaagtccgccgtggaattttgcgccgatggcggatcgagaaaagagtcgagaactgatcagcataattgggtcactgcgcccgccatctcttcgcttcaaaatgctctttcattcgcccgcattccccccccccccccataattcattcgctaccatatttatttgtgcggtgattgtgaattaattgaacagtgccacgccgccgaggcgacccttattttgatcaagtgaaaatgagggcagaaatttcacctgaaattgcttctactattttgatgagctaaaaaaggaagagactcaaagtgatcggaccaatccttcccactgatcagtccattcgtgcggttttggctaaagaatttttgctctggaatttccatctgctctttgttttcccccaattaactgatcataaatcttgagtaccagtttttgaataatgatgctcgaggccgattcaagatactcgaaactgagatctgactacgataaaaccagacaaatacacaattttaacgaaaaatccaaattttctcgaaattggaaagaacccgagattttttcttggtcgagaatcgagaccgtgaatctcgagcatccctattggagagagtgacttaatctttgctttgtgccattcccagcccattcattccttttttgggcgatggcacctcccaatccgtcgttgcaccgcgtccatccgttgagtccaccggcggtgcctccccaccacgggaggcaacaatcgctgctcaacccacaaaaagggcatatgccaacattcagtgcagtgcccaatgaccaaaaggagcagccgaagtaagttcagagtaattagtagacaattagcataagccattagcagggacggataattatggcttttgtttttataattgggtcctttctttcccgaaaaggcgccgccgctcgctccgtctgatggcatttgcgtcggtggcatttgccactgtgtcggtgttggccagtgccatcacattgccaattgtgtacagccatgtgcagagcatccaggcatttatgcagaacgaagtcgacttttgcaaggtgagagaaagcgaatcattcattcattgctaaaataattaattggtcaccgagaaaacttttacgatggcaaacaaagagagaatttatttttataaaaaattagagacaggactgaagaagtctcgagaatagactcgggatgagaccaagaccacgaaaccccaaagttttcatctaatcaaaacctagaaaatcgagcattttaggcatctattatattgccattccttttttagacgcgctcgcgtgatatgtggcgcgaaatgctgcacgtccaggcgattactggtggtttgccgacgtcctccgacaacggcaccgccacgctggctgtgaccgctgcacgggtgaagcgtcaaactgttggcaccacgtcatacgatgcccaactgctagcgggtgcagtagcgggtggcggttcgccgccgggcatcagcggaaacccgcagggcggcagctgctgcagttgccaagtgggcccgccgggccctcccggaaccgccgggcagagacggacggcccgggtcagttagccaaagaccaattaggcccggggcagggggataaaagaattgtgccctatttcagtgccccaggacgtcctggaaacccaggacctccgggaaagagatggcgtgctgttgcccggaccggtgagatgtggagatgaaagttttgaaagaaaaaactaaaaaattcagcctccaaaacccccgtgccaaaaatgccctccagggccgcctggtaataacagtttccatgaaaattgaaaacttttcctcataaaggtccgcctggtccaccggggccgaagggtttgccaggcccccaaggcgaaggtgggatttgtttgaaattttaagaattcgttaaatttgccagctggttcatcgggcagagatggagcgcccggactgccgggaccgccgggcccccaggggccgcaaggaccgcccggccttcccggggacaaaggccccccaggagagccggggaaggtaaaacaatgtcagctattggtggcactttcaaccctcaaaaaattaaggtgattaacggggcaccgccaggaccacccggtgagtcaaaagggcaaatcaaaacgccacactttgtgaaattgtcagaaaaacataatttaaattaaagggcccttgggttttccgaaaattaaataatgaatatttattatttttcttaatgtttctgccatttacaggtcctccgggcgcaccaggaccacaaggttggttcggagtataatcaatcaaattaattaattgaatattattgtctatcactgactaataatgcgcta

SEQ ID NO: 15628 - DNA, 4004 bp, Heterodera glycines
  unsure (1)..(4004): unsure at all n locations
ccgaaataccagaaatttttaccgtatttttccactattcgtgaatncgggtgtaatattcncgggttgtaaccaatgaattttgaactggactttcgacactgaccactgaccgagtggccttacaattattcgtcaaaattattttatggtcgcttttaatttgcattcaccactcggtaccgaaatgtccaaggactcggttggttgtactcagaaaatcagatccttttcagcttttttggccttgacccccaaactgacgagaaaacagctatcaaaattcagaaaactgataaaaaaaaattaatcttaaaaattcactaaaaattccaaacaaaaaaaggtcgccgccggagaaaaatttggacctttatatgaaaaatcggttccgagacacccccccccccccctccattgtctcaatcgtccgtcgtattgcgctttatctgacaatgagacaccccttgcacattatgatatgtgatatgttccattgtcaccttatttatacgttcctttactttcattaagtgtttttcttttttccttgaacattttatgtatattcgggatttcatgtaatttcttccagaaacgacgtcatgatcgcgacagttcggactacgtggaggaatcgaagcggcgatgcgacgaagcgcggaaacggcaaatcgaccgggaggaccgcgcacggaggcgttctcgggagaagagggagcaggtggagaaggagtacgaatactacttgcaaattgcgtgttcggagtccaaaaaggagtcgcaaaaaaacggcggacagcagcacaatgttggtttttgagggattttaccaattcacactttaatagtgccgaaaatcagaaaaggcctttttaattactatggaaatcgacagctcttaagggctttttctggccaaataaggcgttttaaaagttcaatctccaaaaatcacaaatgcttaaaacgcttttcatgggaccaaatgagttcttatctaatggaaaagtcatttattactaatatttattaacaatattactataattagttgtttttttactattgtaatttttccgattgctctttttcttttcccttttttgtgttcgtttcacttcgttctttttccatccttttttcgttcattccctcctctcccttcactcctcattcttttcggcaaaactctccgcttcttaaatttcacccgatcagtgattttctcttcactcatgcttcgccccctcccctccccttttcctttctctctctctcccacttttccttgggatcgccaactgtcccaaacagttgggtcgtccgtccgtccgcaaagcgttgtgtagcaagaaacgcacgaatcgcttccctccttttattatgggtggaagaaacaattgagcaaaaagagaaacttttccaggcgtttagtcaaggaaaaagcaaaacgaaaagggcaaatcttaaagttttttatgcacaccgcttgcccccctccccccgaaatttttatttttaccgacgactctcaagggtttctcttatccactctctgaatctgatttacaataaaaacgatacttgaaggagaaataattataaaaaattttttaaattttcggatggctggctcaaaggcacgaaaaaatcgattgagtgagaatgggtgagaaagttaaagagtggacaagagaaggtgagagggtttagacagaagcactcgttgtgtgccctccccccccccccccccccctccctgattgaggttcgctgatcaatccctctcccccctccctccctcaccagccggtcttgagtaaaattgggagagagtggcttaacgggcggagttactttgcggcccattctaatgggcggagattgaacaattgttgcctcgggcagaaagctgaacgtaatcgatttgtgaggttcctctccgtgcgagtgattgggatgataagagaacgatgagaatgaatgaatgcatcggaaatggggggggggggagcggatgtcaaaatgagcggtgagatgctgtttcggtgctttgtcttaagttttaaggaaggctaaagcgaatgaatgcgaagtttgctgccttccgttcattgtcatattttcgttaattatttcggctttgggcgcttttcaaaaaaacggaatcttttcttttattattattattattggctctttttgatatgtcgatgcaatttaaagatggcaacgacccgaaaaattagttctgaatccaactcaaagaacaaattgttcgcagaaaaaggttcggtaaatcggacaacaaaatcatccaacaaaaaacagcagcccatcgttttgataccgaaacgacgaaagcacaaaaattacatttccaagcggaagggcaacaaaacttcggctgcacttcgccaatgcgtctccgacccgtgcatttacaagagtttcgatcattggcatgaattgtggaaagaacctccggacggatgcgatgggccatgccgaaagacgagcattcggcagcgaaagaagctctccatgccaagtcaggaccagcttttctccaaccgaatccaacaattggacgcggctgccgcgaaacttcttgccgttgccaatgcgtcgattgacgaggaggagaaaaagatgatgaccgtttcagcatcagaacaactcgatgtgatgggcgtagtttcttcaacggcaatgaaaacaggacaacttgatcgaaatccaacgaggaatggcgccagggaagaagctgaattcgtttctgagataaatgctggaaacagccgacggaactccaaaaaactgaacattcagccatcacttgatatcactacaccgtcaacatcaaaacaactcgaaaaacaacaaacaaaagctccagtaaggaaaatctctggaaggaggcgcagaattgaggaattgtcgagaataaaagaggaattgagaaatgcaaaactaccatcttttgatgacatttcgaggcgtcactctcgacttcaaaaaaaggaggacattgaaaacgcacaagcgaaaagcacagtcgacgcagtttctgccgcctttcaatccacacaacaagatgccaatgccaagaaacgatccgtcggcgcttttccagcctctttgttggataacaatagagaaaaacaaaagcacaaaaaagccacagtgatggggaagccgccagcatcaccttcaatgcttgcgcgtcatgagctgaacaggttggccgagtattcgggtcaatcggctggacaatctgcggcaaagtctcccgggatcaacaacaacaataacaacattaattctgtcatctcgccttgctctccttctcttaacaattgttcgtacatgcgtctgcggaatgctccgccaacttccgctgttcgtccgccgtcaaaattacctcttgtggcagtttccattgaccaggatttcgacaatccaatgtttggatttgacacggatattcgagtccctcaagagcatcaggctgaaacatcaacaaccgaaacctttgatctgcttgcttctgccgttgatactgatgccaatgaccaatgttccgccgagagttgcaatagcaacactcacaattccgctcatcaacaacgggccaaaaacatcactccattggagttccaggcaacaattgaactcaacaattctccacaaaatattgctgacgcagaagacgaggagagagaagacgaacattacggaacaccagcggatgaaacaactgaggctcgggttcccgtgttgagagtgtcaaggcacggagttggacgtactgagcagagtgatttggatggcaggcatcaaatgccatgccatccgcccgtccctccgcccccttacccgggcagacccaaacccgtaaacccagcaaccgcttcgctaattgcctccctccaacttccgccatcagtttgtgccaaagtaacaaaatcattgccggtgtggatcagtggagtaaggaa

SEQ ID NO: 15629 - DNA, 2653 bp, Heterodera glycines
agagcctaaaaatgtcatccctatacataagacggaagtagtaattctccataaaagtttttgtagggaaatgcccaattttaatgactgattaaataacaactctttttgtattcgcttcgctaatttgtgtagcaaatagaagttagttagtttaactcacttcgattgagtaatggcctcgaccatctcaaaaacttaattaagtatttcaattttatgctttcccaaagatttaaaaagaaaattatccgattaaataaataaacatttatttttatttatttaatttaaaaattaaaaagcaaaaaaaaatgagaataaaatgcttttgggtttctggcaatacaatatgaattaaataaaataaaaaatggaagaagaaaggcaccgttcatgagatcaaagaccaaattgggcttggcaaaaaatgaaagatttttcggcacattttatttctttctgtccgttgtcagaccaaatcgccctcataagtgtcccgaatgctaatcccgccattttcgtgctgaaatgtgctcatcagtttgggtgccaacaacactgatgagccgccgttgggcaaacaatgcgttggggtctgaaaaaatgtaataaaaattagaaatattttaagcggattattggcacacctccgaacaatttcaatcaatcaatttatacgcaaaagcgtgacaccgacataaataacaatataaataaatttggtcactgaatgagatgaggtggtttcaaaagtaaagaatcaacatcataggtgtcaagaagtttagcaaagtcaatggaattaagtaacctcgcctctttaggcaaacacctatagaggcgagaggtacgaataaaaaacgaatgataccgaacattggttgaacaataagcggttttaataataaaatcatttttcagttctgaatatgtttttgaaaaggaatcattatgctgaatatggatcttttccaaaattatatcatggaagagttttaaatctatttttattctgcgttttaagagggattcttgtttaaagagttggaggagttcgttatacccgggtatatcatccttattattattacgtctaaaaacaatacgtaaaaatgttttttgaacattttcaagagcatcaatgtcttttttcatatatggattaaaaatcggagaaccaaattccaaaatggatcgacaataaacattgaatatatttatgagaatttttgggcttttagttttaagtgacttgagtaaagcaaaagatattcttattgcttttttagtaataaatcctatatgtttttcccattttaagtcatttgaaaaataaatgccaaggtctctaactggttcaccttcttcatttttcaaaattggaatattatttattaagtaacattcattagggtttttaggcccaagatgtgaaactaagcatttgttaggagcgattttaggccatttaattcacaataattccgaaatttattaatgaaagaatggagtggagaaatagtattttttgatagtatagaataggccttaagatcgtcggcaaaaagcttaatttcaacgttttcagttttacaaaaattaggaagatttgaagtaaattaaaaacaaaagtggtcccaaatttgatccctgaggaacaccacttaagcaagggaattcatcagaaaacgcagaaccaactcgaacaaaaaatgtacgattttgtaaataattttgaagccatttgagcaaagtaccatttataccaacatttttgagtttagaaactaatctttcgtgtggaacagtatcaaatgcctttgctagatcaaaatatataacatcaattgattttttgttttccaaagctaaactaaagtcatcaatgacttccaaaagttgagttgtaacagagtgttttctcctaaagccatgttggcaattcggaagtacattatttgtctcaacaaaattagtgattttctgggtaatattttcttctagaatttttgaaattgagcataaaagtgaaattggccgaaaatcaacaggatttattggattgggtattttcggtactggataaataattgattttttccaattaagggttttttgatttttaattaattcttttaaagtttctacatcaattttattgataattttattataaattaattttataatataaataaagaaatcattcaggtgagttataaagatatgaaatgaaaagctcaactgtaagttacttttttgaataacaacgaatacataagtctcatttttaaatactttttattaaaaaatagttataaaattatcaaagtgatttaaattatagatggtgctgggacgtttcttaaaaaccgccacattgggcgtttcttaaaaccgccagggcgtttcttaaaaccgccagggcgtttcttaaaaccgccagggcgtttcttaaaaccgccagggcgtttcttaaaacgccagggcgtttcttagaaccgccactttgggcgttttcttaaaccgccagggcatttcttaaaaccgccagggcgtttctaaaaaccgccactttgcgcgtttcttaaaaccgccagggcgtttcctaaaaccgccaaggccgtttcttaaaaccgccaactcatat

SEQ ID NO: 15630 - DNA, 1532 bp, Heterodera glycines
  unsure (1)..(1532): unsure at all n locations
taaaaacgaaagactttgatttttgaaaaaatttttaaacccagctagctcggcgctcatttcagtgtaagttagtcctttaccggggagtttccctgcaaagtttggtgcgcttctgatcagtttctgaaaaaaaaagttaagcctaaactttttggcctgtttaaaaaggaattaaaaatttttagattttttattcatctccctttttgatagagaaagcatctgagtgcctaaaataacttgtaaataaaatttggtgcgtttaaaatttgatcgtccataaataatttgtaattgatcaggggctcaccaaattttgcagggatacgtatcggaacactacaaatgcttactaatttttctagattttttaaacccggtgaaaattttttgcagacacccaccactttttcacttaaaaaaatttcaaaaaatttgatcgtccataaataatttgtaattgatcaggggctcaccaaattttgcagggatacgtatcggaacactacaaatgcttactaatttttctagattttttaaacccggtgaaaattttttgcagacacccaccactttttcacttaaaaaaatttcaaaaaatttgatcgtccataaataatttgtaattgatcaggggctcaccaaattttgcagggatacgtatcggaacactacaaatgcttactaatttttctagattttttaaacccggtgaaaattttttgcagacacccaccactttttcacttaaaaaaattcaaaaaatttgatgaattaattttgctaaaaaataaaatagtgaagctttaaaaattaataaaaaattttaaattcagaattactggagttagcatcatagctgtgcttttccttgtctttttgatgccttcgcaaaatctggtgcgcttctgatcagttttttaaaaaaaagttaagcctaaaatttttcgcatatttaaaaacaattaaaaatttttagattttttattcatctccctttttgatagagaaagcatcagagagccttatttaacatgtaaataaaatttggtgcgtttaagagcactttctgaaaaaaataattatgaattaattttgcaaaaaattggaaaagtacgcaaaattgcaatgtctaaaatttttaaagaaacattatgggacagttaaataattatatgaataagcattattctcagctgttaccctgcaaaacctggtgcgcttctgagcactactcgaaaaatgagtaaattaattttcactaaaaagttaagcctaaactttttggcctgtttaaagaggaattaaaaattttaaaaaattttattcatcttcctttttgatagaaaaagcatcagagagccttatttaacatgtaaatagaatttggtgcgtttaagagcactttctgaaaaaataattatgaattaattttgcaaaaaataaataaattgtgaacctttaaaaattcataggaaatttaaattcataggtactactgctannatcacgcagagacgccttttcct

SEQ ID NO: 15631 - DNA, 3084 bp, Heterodera glycines
cccaattatttcatgtggatgatttcgcttctcttttgtccaagtttcgactctgtttttatgcattgttcaagacaatatatgtataatcatttctgcctcattttgaatcaagatttcctttggaaaattgtatgggtttttggaaaatgtatgatttttctctttaacctacataggtatttcatgggaattttctccatttttaattctcgtgacgagagtttcatttttttgtagatcgtgcgtacgtttttatattatttatttattatctaagtaccgtatttgatactgaaatggaacacccccctgaaataaagcctcccttttgaggagggttgaaaaatagagcccccgttcgaattcagtaaatacagtatatttccgatgttttaaccacctctgcctctccattgatcaccttttctgtctgatttggtatcgattgaccggaaaatggatcaatatttttcctctctctctcgctctgtctgtctgttctgtgcgcatctcaatatgttttctcctcctctgattccgctttaaaattgaattccatggttcgattattgtcatgtaaactcactcatttctctgtgtatatatatatatatatatatatatatatatatatatatatatatatatatatatatatatatatatatatatatatctatcttccttcctgtctggagatcggacaggatctatgataagagaatattgacccatgagattttaatttgctgccaaaaagaaacagattaattttgtttttaaattttcctgcaatatgtattaatgcttaaattctcgcattttatatgattaattctattgatcaaaaattgacagtcatataatcataatcataatcacagataattgtaatccagccctccctgtgctcgttgtaaactgattagagcactaaacatttttatcaaacaccatttgcctgattaaaatatgcttactgcatttttcatgtacataaaaataagggtcggggtcgttttcgcgtgggccgttttcgcgtggggcgagttttttaactataacttttttatttatcaaccaaatctaactttcttgatatcattcgatagccctaagtgtcctctattatcctgtaaaaattgcgaaaaatttcgtcaaggttcaaaaaagttatggccaaaaattttcgaaaatctggttttttgaattcgaaaacggcctggtccgccaatcacggatcaaaatcacggaaaatttgaaaaaatccgtgacccgtgatccgagatcacggcaccccaaaaaccccgtgatccgtgatcacggccagccctgatggtgacggccaatatacggcaatatcttgcatttgaatcgattttgagcaataaatgtgaattttgttgaaaattgagtttttgactttttgttcgaattcggggtcgaaatggatgtcggattcgtgatcagcgaccccgaaaacctatattttgacttttttacttaaaaattaaaaaaaaaaatttctgggggacaaactgcataagagccgacgaacgaaccattcaaagtagcaacagcaacaaactgttgaggagggcgttgttcagcagacaaaacggcccagcaaaatgccaaaatgagagtgagtgggaaatgaagtgagagggaccggtggagggaagggaaggagaaattcggagtctctccccccgcccatcgattgattgaattgatggatttcacaaaacaaatcccaaattcaattcccttctttacatccaacaatttattgcagtaataaaaatggatgtgtttattggggaaagaatgtggaatgaatgaaatttaatttggagggaaggtaatgaggagaatgagcgaatgaatgaatattacaaagatggggcggggggggggagggattgcgtggcggccaaagaaagcgtcgtcaagaaatggccgccgccattgcccatccccaaagtgttttgcttactctctcttcccattttgttcgctctcctcacatcaaaagcactctcatcgcccggagtccgcggaggaggcgccgccggtcaacaaaaccaacaacaaaaggaagggggacggacacccaaccagtcgaacaacggcagcagcaaaagcgaaaagggacgggacggggaatggacgggcaaaactgtgagaacggcacgaaaacgacggatgaacgatgagacggaggacaaccggtgccatcgttgtcattttcatcccttccgcaaggagctaatcaccaaaaccagtcatggaatttcttggaaagaccgatgcaacatgtacaaccgtagtcggcccgtaatgttgccaaggggggcgggggggcatttcccggcgattgggtgatcgtggtgaccaccgatcacgatcaccacagcattagtagtagcagatacagttagttgcgcaatatcggaaagtcattctgtatgccagtctaacaaaaagtccgaaagtccgtccattcgtcgtcgatcactttgaaatggctgcttaacccacccggcaattgggaatggattcgtgcagcagcagcagcagcagcagagcagcaacttgttaaaactgaaaaacggaccccaccccccccccccccgggggttatttgtgtttgtatgggcttattggtcgatgaatgcgagtcaaagcgggcaaaggcagagcataacacggtgagcaacataaaaagtgaaatttatcccattaacaaatttgggaaccgcccacttcggcgccggccttttcggcgccgttgctaacaacttttttcctgatcaaccaaattaaaaatttttgttatcattcgctagctcttcagattctctattagcctgtaaaatttcaaagaatttcgtcagtttacaaaaaagttatggccaaaaaaacctcaaaaattaactttttcttggctttttcggcgccgcgtggcataacttttttatttttgaatcaaattttagacaatgctttggtttcaatgaaaaataaatatgagaaaactaacaacagggatattgagaaaagaaaaagaaaatacaa

SEQ ID NO: 15632 - DNA, 905 bp, Heterodera glycines
attagagcaaatacggtaatccaaaacaggcgaatgaaattgactgggtgatcccggcccggttttgtacggatcgttatgacagcaaaaagatccggcatagaattgaagtgcaactgggcgaggagagcaaggaggagcgtcttgaagctggcgaatcgcagaccaaatggccaaatgcatatgtgatcccgtcaaaaggtcggtccaaaaacaaaccgttatctatccaagagtgatcacagtaacaatttcagatgggcacaaagtccgaataatcgacgcgccgggaattggtgacacaaaaggcgtcaacgaagacaaaatcaactttgacaagacgctcaacttcatcagcacattgcctgaacttcacgccgtttgcattctgttgcgtcccaacaccactcgcgcaacgcccgcaatcacatattgcattaagggactgctcacgtacttgcacaaaaatgcaaccaacatactcactatcataaattggcagaatagataacgattaacacctttttagaacattgtttttgtgttcaccaacgcacgcgggtccaattatgacatgggtaagttttaactgtcaacgaatcagtgaatttatatacttggtaatgattttcaggaaagaccgccgaagtattggagaaactattggcccccattgaacgagcgcataatgtttgactttctgtttttttcctcataaaagtgctttattcgctttcttataaaaaggtgtcaattccactccatcgggaccgaatttattgcgtggacaacgaagcgtatgaggcattgtgtctgatcaaaaagggcggcattgaatacgaccaagcagagatggaaaacttttcgaggagttggtcccatgcggagaaaggatttcggcgact

SEQ ID NO: 15633 - DNA, 2101 bp, Heterodera glycines
attaccatttgggttgcattttgatgtcaattatgcctcctaaccatttcagaccaaaattgaccggatcaacaaatacgaagaatccatcaaactcggggaggaacaattggaaaatgctccaacacttgaaaccattgaattcgtccctttgcctcacccgcgcactgtttgcaccgcggtaaattttgttacattttatgatcgacagcttgtctcctcatctttgtttttcgtcgaattattggatttttctaacaaagaaaatatgttcatttaggccagttgcacttcaatccagcgtacacttactggtgatgtcaagctcttcatgaagcactgtcacgagcattgtaattgtatatcaaagatcactcctgaaatctttcccgatgagggcttgaaatattgttgggcaatggatgcaacgaacacttgccgggtaaatgtcccagaattcaagagcattaaaactttttttatccttttatcactcacaatcaaacccaatccattttagaagtgtggatgcgattggagcgtgcacatgcactaccattacgaacaacgccaaaaaaccctcactcttgaggaactcaaacaaaaactcatttctgtccatcgtgaggggttgtcaacttcggaaagcgttcagaagcaaatgttggaagaacgagggatcatttacaaaaaggcacctatgaacataaaacttgacttctttggacgtgacgttttttaggcggcacaattttgtgccttcctgaagaaatgggcgctgaagccgtacaacgacagcatggaggcgtacatcaacatgtccattaaacaggcagaaaaagtggtcttggaatgcaaaggagaagcggatgagaatcttcatgaggacaaactgaagggacttcgagtcagtccgagcggaaaacaattaaatgaaattatcgagctgattgactgtttaattatgctaattaaaattcaaggaatctctccgtctctaccaagaagagaaggaactcattgacaatgcaactgcggacgattccaatggaccaactgttataacggcggagaatgtgaagaagttcttcgatgagctgtgcgaattgcccttttttggtgcagacattcggcaaatgttcgagacaaagcaaaagtcacggcacgagcatcagaaagagtactccgagaagaagacaaatgttggggtgaagttgagaccaaccaaaagtggaaaaggtgaaacagaaagccatagattaaattaatcccactgattgtgaacattaatccgatccctaattaagtcgtccaaccggagcagtgtttgaacgaagagcagcgaaaactcttgaaggcctacaagaagaaacaaaaggaaatggaacagttggagcgggaaatggagaatgagaatacgctgcaacgtcgtaagtatagtagaaaatggggagaagtacggtaacaaatggcgtaaaaagacccaaaaagaatattccgcttttttgactagcgcgttcagtataaacgttgccagaaatgaagtttctctctatctctatgtgtctatttattgcattaatatttctgtactttcatttagcaactggaaattccgctgcttataaccaaccgtcaacgtcgtcatccagcagttcatttttgcgtaagcaattccaaattatatttttttaagctccataaatttacagagaggattcccagctacaactatttgttcggttcgtcttcctcgcagaatgtgtcgtcgtcatcatatggcacacactcgcgcaacagtttcaatttgtcttcaaatttctcttcttatggtgcttgggaggatgatcgtggtgtgatgccgaagaacaaacaatggcacaacccccgctggggaccgaagtgatcaaagaaagtgacaaatgggaggacagacaaattattttaatgggaaggagaagagcgggaaaagtgcttttggactctatcattttatgagctttttaaattattaccatttttacgaaatttgacacgttttatcatttatttttattcactgacattttatttattcattttgttttacttttttggatta

SEQ ID NO: 15634 - DNA, 3162 bp, Heterodera glycines
ctatatttcaaattttaaattgagttcatgaattttctttgtcaacttccaaaaatgcaattttctcgtaatttttttagtgaattttaattccaagattcagcaaaagaaaaaaaaatcaaaaatattttacattattattttattgaataaaaatttgctttaatattttttaagataacagtcatgaacgctacattgacgaattattaaatgatggtgttagccaactcccaaaaacttgcgtcaaaaaagcgattagcacaaatgaacaaaattctaatgctgttgcttcgtcttctaaatctaaaggtattaaatattcgcttcttaaatgcgcaaatttattttgtcaaatcctgacgtatttattgaactgtgaaacaattaaatattttacggttattaaaattgcacaattatatattagccatttaaccatacaaaaattaatgttttacataaattaatgttttatggagacagaaaacttctgctcaaagtgctgacaagagaactaacccgaactataagtgcttaaatcacttatttaccactttttattgtgtagagaagggattgcacggaattctccgatttccgacataaattggcccctaaattgcaaaaaaaattttacaattttaatataaattctgataacaaaatggacttaatttaaaaaaaaatttttccggtggtgccttgcggcaccgccgaatctcctcacccttatcaatttcattttttaagctgctcggaattccgacttccgacacttttgggctcggaattacgacttcccaaaattttttggtcctcgctataccatctctggtctggaatatagttttggctttttttatcctgtatcaaaaactggttttgaaaaaattcattaaatgaaaatgctcacaaaaatacgttaatttaatgcagttttcctttatgtattttaatgaccattttatccgccagcagacagatgatgaattattttgatttttctttaaaatattattccatcaagcatctttttattcacttaatttaattttattttctgttactatttaagcggtaatttttttttgctgataattcaaaaaaaaaaagtttatttgctctaacttaattttttaaattttttttatccattttcgaaattttgatcactttttactgatcagtttggggatcagagacaaaaaagccgaaaatttacaagagcaaatagactatttatgataaatattgtttaaaagttctttaaacatttacagttcggaatgttctttgtcagaggcaataattaatgttaaattacataaaccataaaaaccgatatttcgaaatagatttttgtattggtaacactaaattacgaaaaaaaattttttgaattataaattttatttgctgcttttaatttaattaatttaattttttataagaaaattaattagtaaccaacaatttcagaacacaaaaacgaggaaaatatttcgataccaaaactaatttttctaaagaccaaagcaaattctataagtcacatgacaatagcaaaaagcatacatgcgcatatgcaaaaaatgagaataaatgaacacgcaaatttgaacactgtgcaaagtgatcaggccatggaagacattgatcaaaacattggaggaactgatcagacaaatgtgtcaatgccaatagatgtgatcaatgaaagtgccaattcactgatcagtctattagttatgccaattgcacacagttctgcagctgatcaagcccatccaccattgtcagaaggtacaaccaataccaatttgacaagcgataaaagtgatcagacaggcccagaaacaccaaacagtcaacggaaacggtcaagacagcgaaagcaaagctcaagcaatatccagcggactgaatttttaggatttgcatcaacagaaacggaaatagcagttatcaaacaaaaagatcaaagaaatgatcaaccaaggaatcaaagaaatgatcaaccgagtgatcaaagaaatgatcaaccgagtgatcaaagaaatgatcaaccgagtgatcaaagaaataatcaaccgcgtgatcaaagaaatgatcaatcgagtgatcaaagaaattatgaattcaatgagcaacaaagttatcagatgcttggactttatgatcatgatgatcaaaatattgaaccaatgtttgttgacacaaatgcaccacaaatgatcgatacaagcgacttcgatcaaattgctcaactggctggtgacgatttgatgttcccccatccgatggaggtgtatgacgagccgaacaatgccgaagaacaatttgtgatgatcccggtcggaaacagcacacaacaaattgtagcagaaagtgttggcaaaacaaaaagcaattcaaaaagtggtcacggaaaaagccctcaaagcgctgatcagaacatgcgcgactatgcttctccatcaattcaactgaagcaaaaagcgggtcggcaaaaaaagccgaaaattgacgagaaaatggaaaaggccaaatcaaaaatgggagtggaaaaagcgccgatcaaaccggcaaagcacaaatcaaaaatgacaatgggaagaccactgatgagaaataaatcaataatgattacggaaagaccaccgatgaaaaacaaatcaatggtgataagtgagagatcaatgatgaaaaacaaatcaatagtgataactgaaaaacaaaatacgaaagcggacaaaggcaaatccataatgatagaggaagaagattcagcgactgattcatcagatgaggtacactaattagttaaatcaaattttattgctctccattaattaaatataatgagacaattttttgcattcctatgagcaaatgatttaatgagtctttaaaaagagcaattaaaagattttgaatttttggatcgaaactgattaaatcatcatcctaaaaacaatatttatgattcgcaattttctcctataattaaagagatttctacacaaaaattcgagtttcgaaatatttgaatttcctatttttaattaactcaattattaattttcattttgcatttaaatgaatgattttagatagagacaaaggttcaactgataaactggccgatgcgaacatata

SEQ ID NO: 15635 - DNA, 2467 bp, Heterodera glycines
gtatattatttttcaacctcctcagaagggggtatataattggaggccggcagattaatggagactggcatatagaaagagtatatacggtaattggcattttgttacatttatttttggctcttgttttatggactacctatgaacaattatttggagaaaggttacctaattatgaaattaaaaggaatgacttactttgaattgtgttcatactgtcttgagcaacacaaagaacaacggatttctctaagaaaaaccaattctaataaagctagtctaaaacattatctaatcactattatctaatagttctctgtaaacaacattcttcacctttctctctaaattactatcatctaatctaattctcagcttattccaagctcttgctctcgaaagagccacatacaattgaccatggctaaaaacatctttcctcagatcaattccaacttgctcaagggtttgaccttgggtcttgttaattgtcattgcaaaagctaacaccaacgggaattggtgcctatgcaggtcaaaagggtaatctaaagaacagcaaagcgtgatccgaggaatgtaaacagtctgacctgccttgtctccagtcaaaagcttacacatgatcaaattcggatgcatttcttctacattcattctcgaaccgttacaaagtcccatttctatattcaaatcgcattaacaaaacaatagcatttttcttcagtctcaacttatgccgtggaaaccccgaagggttcaaagcattcaaatactcatccaaatattcaatatgctctctgtctattctcatcttgagctaagtctatactcgtataaacaacttcttctccaggcaacatttctaaaactctattattcatttcactaacatcaatattcttcggtgctaaaatggcacttttggccatttcattccaattctcagagacaatacatgtgcaaaaatctcttctgctaaatcaccattgctaatacaattctcgggcaaaattatctcatcgttttcattattccattttccactgccaatctctaacaaatctctcgcaaattcttgctctgttgcaagagctctcatattcttcgtcaatttatatcttttagccaacctccagtactcgcttctctttatggttgagctaaccatctcagctctcgtagcatgtttctgaattggaagggtttgacgaaagtctcccgtccaaagcataaccttgccaccaaatgcaattccattattcattatctctttcaatttctcatccaaagttctcattgcgcgcttatttatcataggcgcctcatcacaaataaacaaatctgtttccttcaattcttgccaaactcttgatctcggactaatactcgaattactcatatccaaggttaatccaaatctattgtgcaatgttctcccagcaggcagcaaagttgctgcgatgccagtaaaagccattgtacaaactttcttcttctgacctctcagcatatgtacaattgtcttgttcacatgtgtctttcctgttccacccggtccactaagaaagtagaacgcgggttcatttacaggattccatactctttgcaaaatttcatcacaaactttcctctgttcatcatacatcaaagtataatttctttgtcccaaatccaattcttcggctagatcaaatacttgttcaacatcatcatctacatttatctgttccatcgatggaaaatcggcaagcgtttttccagccttcataatactaagtgcaatttctctatacgctttagcattagctatttctcttctaaaattcctgctaaaatcttcagacaatgagtctttgaacatattccaaagctcctctggtttggcagggttgcaatggactaaaatcaatgcaaagaattctctcaatttccatggcatctcaaaactctgcttcttctagggcttttttccactcttcatcatttctaatcaatcctctttctagacatgcggctgaaaaagtttcacaaacttttgcattaccattcatatcaataactgatttcaaatcatcataggagcatgctcacttcacattcaataataaaagcctcaggtggtatcgttccggctcagccggtgacacctttaccattcggccaatagtgttaaaatgtgtttttctctctgtccattttcctttgttaaaacaaaacttctctggtatctgatgataaaacagagtctttgccaagtcatttgtcttattaaattcaaaataagccattaattctgatccagtcgctattctttcacggatctcttcttcatccatattctcatcaaaataacaaatatgttttccttgcaaatgtacagtcaaagacataatacaatgacttcggtcgtacataggcaattcaaggggggtccacactgcttcttgcgggcaaatataccgcg

SEQ ID NO: 15636 - DNA, 1486 bp, Heterodera glycines
ccatttattaaaaattgctttatgccaaagccatttattaattgaaaccaaataaaaattaaacccaaaaacatttcccattttcaaaaccattttttaacaccaaaaacaataaaaacaaaacataacgccacacaaattcaaacagtggcagaaacatacatacagacactcaactttattatataggatattttaaatatattaacattttgttttacgccaagctttttttttaacctttttaccgtcaatgaaggaaactcaacattttttaaattacctactcggtttttttcgtttcttccatgatcaattttgtcaattgatgatgtatgaaaattcctttagatagtaaagttttcgttattgactctgaacattattgtttgtcatcgaaaaagacaaatggtatgccgttttcctatttttttatctgataatttttttaggcgattagcaagggcactaaaattacgccaaaaggtggtaagggcggcaaaggaaagaagaagaagcttacgctaaagtttgtgatcgaatgcaaaaacccagtggaggatggcatcatgaagactgccacatttgtgagtttggtttttgggcgcatctgctttatgttgatagatttcaatatttatgtaatttttattttgccatagttaacggttctcgcgagcgtaggggcccattccctagtcagcctcgtcaacactttttaggaaacctttcttaacgaacggatcaaagtcggcggaaaaaccaatcaactggcggctaatggtgtcaaagttgaagccacgaagacaaaactggtcgttacatcggagcagccattctccaagcgttacttgaaatatctgacgaagaaatttctgaagcgcaatgctctccgggattggttgcgcgtggtagccagtgccaaggacacttatgaggtttggttttcttatcaccaaaaaagggtggatgtctttttcaggggtgttaaaatgcagttcggtccccctcacatttgtattaaattgaggagagggtcggagtgtggttaggctatatataacacagcaaactagactcattaatccatttttaatttttagcttcggtacttccaaatcaatcaggaagatgaagatgaaagcgacaatgaagcatgagcgatttgccatttcttttgttgggtcgtattatttgttgcactttttaccagcgataaaaacttgttaaaggaattgtttatgactaaaaaatacatgataattgggtaagctcaatgagtcttatttgatcaaaaaggattttctcagctcctgcaatcgctttcttgcgtcgagtactcgccgttcctgggctaatatgtcttgttccgtgatggttggaatctgaattagaatttgtctaacataaacagaatttaatttcattcttcccatattaaaagctatccatcttctgttagtggtaccctttgctgttaaacctg

SEQ ID NO: 15637 - DNA, 2726 bp, Heterodera glycines
tgcgtacacccattttgccaggagtatggcccgtggaactctgtggatgggcgaagtaatcatcttacatccttaattagggtgtcttcgcttcaattagtcactaattaatccttttaatttataatttcctatttaaatcatttcaataaagcaattaaaagggttattagagaataactcgattaattagtatctaattaaccctttaaataaatgtaattttttgttaggatccttatgtgattgtgaccgactatgagctgattcgttcaacatttctactcaattacaatgaacaaacgtcgggacgccatttttttcgcatcgctgaactcgtttctggtataagccattggaatgcataataaatattaaaataaatcggtgttaaaatgtaaaaaccatttttttatttaattgtggacgcgtgtacaaaatatgattccagggtatattaattattaattttaaatgtttaattactattttttcaccagactaaaatttaacaattattttatctttttataaaagtttccttgcataacattaaaatatttctgcaactaaatttaaaaaaaaacctctgccatgcaaaaaattagtaataaatattttcaaatgatttaaaactttttaattaaattttttttagtaatgacgcatcacaaatttgtaaattttttgtttttttttctaagcaagtcatggtttttacggcattttaaaaacgcatggtgaagtttggctgtacctgagaaggtatgcgctctctacattgcgaaacttgggcatgggccgaagccgactgagtgacgaagtgaatttattaattttttagctttatccacgaccggaggccccgggttttttttgccatttttttaagctcaaaaccgactgtctatttccgtcgataatacccataacaaatgaacggtataaactattcaagccgacctcattaaccctattttccgactttggaatttggcatatactatcgacctgatattctttttttggcattatgcagaccgattgcaaatgatttcaaataccattagccaaaattcggaaccccaaaaaatgcttcctacaaaggggcggaatgcaattaatttaaaattaaattttaatgcttttttagatgctaattggtctacgtgaaatgtcggctaaactccgttccgacatcaagcagaatggtccgtgcaacattgatttatgcaaaccaattagtgtgctggtcggctcctccattagcatgcttttgtttggtcacccgctgaaagaggtaaataattaacgattttctgaagcaaatatatacataactcataattgtggtttattaataaatttattaaattaataatatataattaatagagactggctggccattcaaaagattcgatcatattgaaaaacccaaaaaaacttcaattaattcgttatttattaggaagacatggatgattttttgaaagtcaaagcgaaaacgaccttgcttttcttgttgttctcatggtaagattttgaatatttttgaaatataaacaagcaaatgaaattgtaccgtaattagagagatacgatcgctaattacaaaaaagagactatttctcacatttatttaaggtggacgacacaaattgttgcttcatcgccactttggtatggaaatatgaaccaaaaaaatgggaattttctgaattaatttatttttaattatcaatgggttaatagcaataagctaggcttgggacgaacagaaatttttccactgtttttttcaacaaaattaatcaaaattagctatttttgggacaccatttttggcataaattttgcaattttcaggtggcttcgccattttcccaccgttctcaacaacttttaaactgatcgatcaaacactgaccggaccatatgatttaattgacaaagaaattgccaaaattgtgaaacggcgccaatttgagtcgaatttatgtgccgtttcgttggtggacgactttttggatacaattcaaaacagtgaacagcgcaaaaagaatggcacaatgccattggcgcaggacaaacattttcagtaatttttttttaatataaataaagttcattttaaatcaattaaatatatcaaacaaatctttaagtttaaatttgtatttattcatatctaaggtcacaatcaaaaattttatattaataaatatttattaatatttgttttttataacaaaaattgtacaaaattctattaaaaatcacaaattataatttaaatatgtaattgttcaaaattggaaataaatatattttgatatttaacacgttttattcattgattagtaaatataaaaaataatttcttcgccatttagcatggaatcacttcgatcactctgtgttgacttttatgctgctgcaaatgtaataaataaaaattaaaactttaaatcattaactttaattctttttttatatataggaatcgacaggaaacactatgaattttttggtgatttacatgatattgcatcagcaaatacagaacaaaatgcacgacgaattaaaggcaaaaaaagaaaaaaattaattttttaaaattaacttatatatacagttcagtgatggcacgaaatttggatttccgaagaatttttaggcctaggaattttggttccgatttcttaaaaatttagagcgttgga

SEQ ID NO: 15638 - DNA, 766 bp, Heterodera glycines
aaaactagagttgtacgggactgggacctggacacggaaaactgagtacaactgagtacctaggtcccggttttgaccagttttgaccgggaccggggaaattcccggttttttcccggttttaccagccaaaaagtcccgggttttcaaccaacaaagtcccggtcccggttttgcccaaaattccctgtcccgtttcaccaaatcaaaaaattttaaaatgctattttgagccgctttcttcatagcatgtgcgcagaaaaaatatgcaaaatcatacaatttataactagggctccaatttttaggtaaaagcctatttttttcctgagctccccgtggcctgaaacgcacgaaaaacatgtttttttggatgttgttaagctacttttcgagttattagtgcctattttctaggcttttatttttgcgcctaaaaagcctaaaaaaatttgaaagagcctacttttgcctattttggcgttttgtccaaaatttgttaataaaaatgcaataaaaacgaaaaatacaccccagaatcaacctaaaaaatttttcaaaaaattcatccctaagaatcgacccgaaaatttaattaattaattttcttgacaagaatttgtgatttaaaaattatttatctcaatactgatttggcttttttttaagtacattttgtatttttacactcctaaaaatgaggttttttagtgcctattttccattttttagagtctattttgggggtttttttagagcctaaagc

SEQ ID NO: 15639 - DNA, 2513 bp, Heterodera glycines
ccaactcatccacagcttgtttcttatacgataattagtgacattttcgtgcatggacaaattaagaatggatgatgagttttctatttattatatggatatatttggttttgatggatttatgctacataattaaattttaccataaaatctgatgagtcatcatgcggatttagacaatacacaaaatataacaaacgtttcacagagcaaacaaagaaagaaccgagaatgttattaaattaagtttggtttcagccaattctaataagagtgcaatttatcaaatcttagtataagaaaaagacagtggtaaacaaactgatcgcttttgcggattactacaaatatttaattttagcccaaaaatacaaaattattcaaaaaatcccaacaaattaataaatctggaattaattttggataggaacgaattataatacagcgttcatattttggcttaactttcgagttattcttacgatgtatttactgatcaattcgatttttcgggatcagcagggctcactttagatgaattttaatatatttaacgctcagtccataattttttttattgatttataatattaatttttacgattaaatattggaaatataccgaaaatgaatgacctatgggcaaattgcctttgtttcgaatggacaattggtcattttcgccctttggtgagtttgttggaggtaatgggaaaagcagcagcagaagaatatggaaattgtaaagtaggtcatcaaatgaatgcctcccatttgtgttgcgcataatttttgtttcgtttggggcgtttcggcaaataattaattaataaaaattctggaaaaattcaaccacctgccaaagttttactttttaaatttcacagaatgacaacaaaaaatggcactctcattgagcgaatggatcggctgttgaccaatggatatttcgcggatgtgcactttttggttgggaaaggggaagaaaaagaggcaaatttagcaaatatttaaatcaaaattaatgtgaattttgactttagcttctgtcggcacataaaattcttttggtgacggcttctgaagtgttcgaaacgatgctttgttcggacgacgccgaaaatgaaaagacaaaaaacagtgccaagaattatagacaaattgaaataaaaaatatttatttattttttgccccttcgcatttgcgtcccgtgccaatcactgacatcgatgccaatgtgttcaaggtgatgctgcgcttcatttatacggcggatttgagcggattgaacggagacaacgcaattccattgttttgcgctggtcagaataaaaccaaaaatataaaatcattttgttttaattagccaagaaatttcacctgtctgagctggccaatgcttgtgccaacttcccaatttccaaattgcacaatgtgtttttggcatttaaccacgcgcgccattttgaagaaaaggtaaaaaattattgtcatcagcagagatgagattttttggaaataaaaaattgccaaagggtagccaaatacagaggaaaaacctcatccccgatgactctttaggttagagccctaaattgtatgttttcatttttcatggtttaaaatgattttgcactgtctcaaaatttaatggtttaaatttttgagtgcttaaattcatttttaaaaaattttcatcatttttgggcatttctttgaataaaatccaccttttttatttgggggccaggcgccggaggaaaaatttgaaattttgacattttttacagattttcactgaaaatttgccattttaaaaatgccttatgcgttttatattaattctatacaaaaatatttatgataaaaaaaaataataaaaaaacacataaaattattaatgaataataaaaaaaatttaagcaaaaataatgtaaagttttttgactatttggcataaggcaaaaattgaaaaaccccgaccccgaaccccgaacgatttggcaaccccgaccccgaaccccgacacttccaaccccgacaaccccgaattttccaaccccgacgtaggggttgcaaccctagtttaaagaaaactaaaattttattaagaaagaaatcacgatttttaaccaatttcacacattctaaatcatttgttcatctcccaattgtttatatttttgcattttttttccattttttctttcttcgttatgcgtttgttgttaatgccaaattttctctaccatttttcaattgttgaacggctaactccgattttcttaccaatttccgcataattttgttcccattcttttgccgaaaatttcttttttgttaaattcatttttttcgctaaatcagtagagttatgatgatgcttcatataattttttaaattagaaaaattcatttttattcccaaaattgaatctgtgaacaaaaagtttcaacaaaagtcatttggcgaaatatttggagaaaaatggcaagaaaaagaagaagaaaa

SEQ ID NO: 15640 - DNA, 939 bp, Heterodera glycines
aaaaatatatattatttctcagctcattcagagagtatgtactaaaagttccgaagttaagctagtgctgctagaggaaattatacccaaagtaccatatcatactgtcgggcccatataaaaattcttgaaattttcatgaccttgaaaaaatatatattatttctcagctcattcagagagtatgtactaaaagttccgaagttaagcttgtgctgctgagaggaaattatacccaaagtaccatgtcatactgtcgtgcacatataaaaattcttgaatttttcatgaccttgaaaaaatatatattatttctcagctcattcagagagtatgtactaaaagttccgaagttaagctagtgctgcttagaggaaattatacccaaagtaccatatcatactgtcgggcccatataaaaattcttgaatttttcatgacctttaaaaaatatatattatttctcagctcattcagagagtatgtactaaaagttccgaagttaagcttgtgctgcttagaggaaattatacccaaattaccatatcatacactcgtgcccatataaaaattcttgaaattttcatgaccttgaaaaaatatatattatttctcagctcattcagagagtatgtactaaaagttccgaagttaatctagtgctgcttagaggaaattatacccaaagtaccatatcatacactcgtgcccatataaaaattcttgaaattttcatgaccttgaaataatatatattatttctcatctcattcagagagtatgtactaaatgttccgaagttaagcttgtgctgcttaaaggaaattatacccaaagtaccatatcatactgtcgtgtacatataaaaattcttgaatttttcatgaccttgaaaaaatatatattatttctcagctcattcagagagtatgtactaaa

SEQ ID NO: 15641 - DNA, 930 bp, Heterodera glycines
attttattgacactttgtcatcattatttactttattgaaaaagatgcccatttatgatggatggatgatctgtaaattgaaaatgtcctgaattgccttgtaacggaggccattaccccggagtccataacctaagaaaggcatctgatccataatccaaatttaacatcatttattcattttatttctgaagcttagaaaaagcgaaccttagatgaagagagcgtttttttttgttcaattattgtgtgagttcaagagtgatccagcagaactaattcatctgactgatcagcggggatcaattcggaaggatttggatgatacggtgaaaagggaaaaaaaagggagatttttcagtgatggtaccgcctccctagcccttcttggtgcaggaatgtgatctgttcttatttctaagtgatgttctgattttggtgtagtgaccaaattttgttctgatttcttaaaatcattcgtaaattttgaaatttatggcgaaatgttatttctgtcggatgagtcattattgttcagcaaaatcgaatgctcagcaaagacggagcgcaattcttgaaaagaacaattttatataaacggtatgcaaatataacactaattaccacaattagttcccttgcactgcacaatcgaattattggcatcagtgatttttttatcctgctgttccccttccaaatgattgattttttctaaaccgaaatttttttcaagagaattaattggtcatcacttttttaaacacaatcaaattaaataataatggcatggaaaatttcagagaatttcattgtttttagaatgtgatttatagggggtcgaagttgtatgaactaaaaaatgccaaatatgcgcatatataataatatgcactaaaaacccgccaaatatataaattgcatcatttt

SEQ ID NO: 15642 - DNA, 1996 bp, Heterodera glycines
aaaaaacgagatgtgtaccaataaatagagagtgctagagaaaaacattatctttttttctctaattttttgtctccttttggcgtactatctaatattttcattattaggaaaaacaacatttatttcgccacatataactttttttctactcatacaatttacaccaaattttgcagaaaaatattatgaatatttttaacgctcgagttttatttttttacgctccgatctaaaattattcaaaaaaacaaaatttcaaacgcttatatcttttttcaaactagaaaaaatgcttagcatttgcttagaaaaagcttgtactttccaagagctttcgaatgataccaagattgaccactttggttggcaaaaagcttcaaaaataattcccaaatatcgtcattttttatggacagaaataaataaaaatattcatgcagcccaacggacttgatctcctgcctttgtccctttctatcttacaaaaaccactgagccacacatgcaaatcttttttggtacagcagctcagtttccggatgctgtgaaaaacggtgatgcgacatttggggcgcagacacttgcggcgaagaattaaatgacccaaaaatatttcaataatttatttaagttaacagaattgttattttaagtttacttttcaataatgactaatttaacaataattcttgcaacctaatcacaaagataaaggttgagtcgtttgccattctaacagattcagaaaacatttaatttcgccccacccagcattttcaaagtataaatgggatactgtaataaaaatatttttataaggttcattatcaccattaaaaaagaggaagagcaccaacaaaactgccggaggccttatgggattgacccaactcgtgggattgctgaaagcctcgcttaaaaaatatctgcgaaatgatgaagcgacccgtagattagttaatgattttgacaataaagaaaacaaaaagatgatgatataattaatagagcctgataaaaaaaaattccggaagcgggagcaggatcgggagttcaaaattttccgggacgggagtcccgaacgggaatcccgtaaaaatcccgcgggtgtcccgatcccgccggcctctaataattaatcacattcataaattgcagtaccgcctagggatgaaaggctttgaagaataggactgaaagagtgattaaacaaatattttttaatcaaaaaaatttgtttaaatgatttttggggtcatttaattctgcgccccaaatgtcattttgactgggcgccgcaagtgtcgtcgccgcaagtgtcacgccgcaaatgtctgcgccgcaagtgtcgctttgactgggcgccgcaaatgtctgcgccgcaagtgtcagcgccgcaaatgtcgcatcacctaaaaatcctagccctaatcaatgatcattcaacgcattcaacggaaactatcgattgatataaggaattaaaatttggttgattttaagcaaagttacatgaaaaaattgtttaaattgatgggtttttgactaacgtaatacatagaatagcaccgacgaaaacggcgagcagaaaaaagggaatggcagtgcattggaatggaaggaatgcaacagaggaggaacatcaaagaggagaaaattttcaaaatgatgaccatttgccgggcgttttagcccctcccccgaaataaataataaatagggccgcgatttttagtgaaaaacttttttttttttggcttaattgatttgaagaaaggcgtaccaggtgttttcgacatatgaattaatattaatatacaaattagcatatacaaaatttataatttaattaataatgaattaaatgataatttttgtcaaaagatatatcgctttctctttttctatacaaatatttcttgaatcacccaaaaatccaacaaatatcttagattagattgttgattcgtatggtaaaatctgctaacaaatg

SEQ ID NO: 15643 - DNA, 4531 bp, Heterodera glycines
tggatacgtacttagcgccttaaattaccccaagaacagtgttattagaaccagtaaaagaaatgattttcaaaagacccgaaaaaaaataataattaaactcattaaaaaatacgtaaaaatataattaattgtgtattattttgatcaaaagcacctaccctttttcaccaaaaagtaaaagatcagaagcacgatcactgcgacgattggccaaacggtgtagtggactggaaaatttttaaacattaagtgattaatttgcatttataaatttattttatttaagcaaatcaatcatttgaattatacatatttctctacattttaattgtttatttgtaatttagttatttatttttattaattaataatttttatataatttgtgtggacaatttatttggaatgattaatctaaaaaagccccgactttaatcggaactggcagccccatatgaacaaaaaaatgtttcttatttaatcagagctaattttttgttaaataaaagataaaatttcgattagaaaaataatatttaaaaaatttgatggcagtttttgagaaaaaataaaaaaaattttagcgcagaaaatgttgtacaaagaaaaaaaaatagaaaatatttttaacgaatttatttttttaaatgaaaatgagttttttaaacatctgaattccaaggcatgttgtactgaatttgaaaagaaaatttcaaaatactgatttcgatttaataataatattcaaaaaaaatgcttaaatttttcattacaatcaatagagcgcaattttaagaaaaggtcatttgcgcaattaatttttgtattcagtgccctaatttaaatacactatattaataatattaatttcgaggaaagtaattcaatttaattaatttcaatttttattttttatataattttgggaatatttagctaattatgctaatcacttaccaatgtcgtttttgtccgagcgtgacggcaccgccgcattcttcgtaatttccagcactgaaaaaaggtcaaaaataggccaaacgattaaataaatttcaatgttaattctattaaatagccaaatatgctaaatggcgtcatttaacagtatttcgacactttcttgtgaatacggtaatttaaatattaaaattagttaattactaaccactgctgttcccggacgatggcagtggcatcgggacggtggaactgttttctgaaaaaatgttaaagattatgaaaatcgtcaaaattcaattacagaaactaaccactttttgtttcgtaattttcgtctcccgccagcggcggcatcgcatttgtggcattgttacctgataaatgttaaaattattagagcgtattttctgtaataccgcaaaacataaattttttttgaccacttacccatttccgccatttcgtttgaatttttcggctaattctaaacgataaattttttaaattatatttgctcaaaatatttttaacaatgaatgaatgaagcgtacaaaagcatagattgaatgatgaggaatattccattcgttttgtttttcctttattcgtcatcattttctccatgttttggcttcttcattcttttttttcttttattgcctattttcttaaattcgcccccgggggatgtttttcaatgattaatcatttccctccctccccagggaaatcggaaattttttgattgtgaaacgcattcctttccttctttacagttaataaaaggatactgtattaaagtaccgaaaaccccaatttggttcggtacgacttaaaaaagttaatctcaaattggcacaaacgaagtttggccaggcgaattggacagactgagttggccctcccctcccgcagaaaattttttcattgttctcggttctatgacctgtctctgcttctcctcctcccgtactgtttgtaactgattaaaattaatgtccccagtttttttatttcgtttttaaaactcgggtatttttgaaaaaaaataataattttaaatctgaagtttccgctcggaaaaatttaccaatttggtttctgtcccaattagaaattgaaggttccgagtcaggatcattttttcataaaaagcattcgactctgagagccgaacgaaaaagccagaggcctcgaaggccataattttacggcatgccctaataaaatttatgaaaattgcctaggaaaaaccactgggacaacgaagcagaaagaaaaagcacacccaaccgaagcacaagctgatcaatgccttggcaaaataaaaatttattaaaataatattttaaaaaatctatttcatttgtattttacccaatgattagtagtaacataaagtttgaagatattcgagacttggaattaggctcgagacaaagaaggaaactgatcactttgtatcgatttctctgcaattttttttctttgttttcctattttgatcacttacaatggtaaaacacgcgggcgccaagccaaaagccgatcagaggtgatcatttgaacacttcggaaaaatcgatcagagtgaatcggacgtcgacagtgctgtcgagttagcaatacttcagcgagatgttcacccacctgacacaattagcaatggttttaagcgtatttagtaaacgaatcgattggatgtttgcagaacatttgcggccccaattaaagtcgaaattttgcggaacataaaatttttccataaaaattttaattttcatatttttggtggacaaaaaaatgtgatcaaataaatctctcacttttctaattcaaaaggttactgatcagttgttcaccagtgtgataattaattttcttcaagcactttttaatcggcgttaattcgtaaattttgatttctgttagctttgccattctctcaacacatttgttttcggcatttttacctaaacccattctccttcaacttaagctggtgcgttaattagggaccgggccgaagagtccgatttgggcttgggccacaaaattccacacaattttaggccgaaaaatggcggaaaattttacttaaaaaagaattggtgccaaatgttgggaggacatgtcagaaaatttattgagtcgatgtcaagactctcgcctcctgctgatttacctgacgagcacgtcgagtgcaaatattttacgggttgtcaatgacacaggaggaaccaagcagcacctgacagaggaaatttaaaaaaaatattttatttttgaaattcaacataccaaaggccatgcgatggcggacacgaggctggccaacattgtttccatcagcgaacgttggatggcgtaggaaaaaacaaaggagatgtgatgaaaaagtcaatgctgcggcccaattcctccaagtactgcttgggaaagttggcgatcgatcacatttagtttagactatagcaaatttatcaatgccagattaaatgaaaaaaatgttattcagtcattgatcagaccagctaaacatttgtcttgtccggtgccaattggatgcccactggtcatcacaggaatccctgcttgattaagtgatcacccatcaaactcactttgttctcccgtgtactgctcgctccttgctcatccaaaggtggccaaatggtgccgaaatgcgctgtcctcccggtcctcaatccatccggacacgcagagaacacagtgaagtccctaaatgccggtttcgggtttaaaattcagtttttcgaattaatgctgcagcccaattcaaaaaataaggcgtttaaccaaattaaaaattacaatattacttttcaataaaaacaaaatatttttaaatttttgattgcccaatggacggacagacttttgcgtattccaaaaaggccaaatagaaagggaatattttttgcaagtctttttccaaaaaaatttggaattgatctataacctgattaaaatatcatcattacaataaattaaatttttataaccaaataacaatttttacaaaattataaaaaagcaaaattctaattcatagaaaatttaaaaaatatatataaaaaagctattttcccactgtttgaggatgagcgagtgtacaatggcggcattagtgcgcgtccgctcgcagccgcagcgccggcgcggccaacgcggcgcgccgcccgccgctaattaccatctctgaaaattgaagggcatttaccgatcaattaagaaaattccattcatttgtagaattagaatcaaaaaatttgctattaaatttgcaattttgaacggatcaatagaaaataatgggaattttttttgaatgtaaagtcctttttcccattctttggaagtggggggaggcgagcgacggaacttttgctgtgattcattctttcattctctcccccggggggacggacaatcggcggagaatgaatggcgaaaaatgggaaatgaatgccaaatgcattttaatgggtccaatggcaaaaaaggaggacagaaagggagaggtgccatttaatccaggaaa

SEQ ID NO: 15644 - DNA, 2615 bp, Heterodera glycines
tttcttccttgtctctcatcctcccccttttctctcccctcctcttttgcttatctctcaccatctctttttctctcctttagttttcttccttgtctctcatcctcccccttttctcccctcctcttttgcttatctctcaccatctctttttctctcctttagttttcttccttgtctctcatcctcccccttttctctcccctcctcttttgcttatctctcaccatctctttttctctcctttagttttcttccttgtctctcatcctccaccttttctctcccctcctcttttgcttatctctcaccatctctttctctctcctttagttttcttccttgtctctcatcccccccttttctcccctcctcttttgcttatctctcaccatctctttttctctcctttagttttcttccttgtctctcatcctcccccttttctctcccctcctcttttgcttatctctcaccatctctttctctctcctttagttttcttccttgtctctcatcctcccccttttctctcccctcctcttttgcttatctctcaccatctctttctctctcctttagttttcttccttgtctctcatcctcccccttttctctcccctcctcctttgcttatctctcaccatctctttttctctcctccttccgtctcctcttttctgtgttcctttggcatttttcctttcctcccctttcatggccaattattccgtcccttctcattgtcgtcgtcctccgtcgttttgtggcaccacgtcgcaaataggcacagaaagcgctggacaaataaatgagcaattggatgatcgaaatgattgagccgccgatccaaagcgaaatttggcctaatcgaaagggaaagaaatttacttacctaatgatcattttgatcatacttttaacatttaagggcgttaaaaatattttaaatttcactacctccgagttgcgcaacaaacgaaggcggcgtcattgaaagcatatgctaattagtgggggggggggggtaattggaaaaagaaaacaaacggagggacggaccctaatgattgtgtagtccaaagtgatgtaataaacgtccaaaatgattgtgttgcgcagctcttcccatttggaggagtcgttgacaaaatgttttgcttgttcggagggaaaaagcgctgaaattggcaaattaaaataataagcgacagacaaatgaatgaaatgaaagccatcacaaattaataatcaaatacagtaagtgacggttttgtcgaagcgccaataattgcacgggggcccacaatggcttttgcaacgctttaatttggaagagaatggcaaattcgaaaagaaaaataaataaaataaaaaggaaattgaaacatatttcagatttgcaaataaattgcttataaaagaccgcaattcgctcctcaaagccctttcggtacagctttgggtagacgcagcggaagaattggctggtggtgcaaatgtacggcgtcgtgggccgagaagcggcggccaacgaacaattgcagtccctttccgcttgggacatgaaacagtccttggaaatggggaagggaagggggggcaaagggaaattggcactgattagaccgaaaaggtcaaaatcagtcccgagactcagtcggaccgacgaaaaggccgaaagaatcgaaatcccttcggacgcacctcaaaacaccaaacgcgcgaataaacgccgctggggtcgtcttcgcggcatttgaagtgcggcgggtaatttttgaattcgtatcgcgttgccgtgagggggaaatcgcgtggacacccgacggcacaaacgacctgagaagagattttaaaaggccaacacatacttttccttttccttctaaattcatttgttcgcattccattttccgtttttcctccccaaatgttccgtccttttttcgtcaaaatgtccactttttcgtccaagtgtcccctttttcgacaatttgtccaccctcccccctcctccttttgctgtacatgtcgtggtcaatgcctttcccgcgctccgccaatttgaccaccactccgtcattcagcatttggttgacccccgggttgtacaatttcttcggcagtctcagaatgatgcgttgtccgtgcccgaatccgtcgctgcgctgctccccgccgcgcagtcggaagcattttcctgcgctggtcattatctcctcggccttttcgcacgtccgcgggtcgacaaaaaatgcctggggaagggacggagtaattagcaatcgaaaataattcgcccatcaccctcaaaatattctcatttcacctggcacgctattgcggaccgtttcacaaattcagtaaatgcaatttgcgaattgccatttgcgtccccagccgtccgtccgccgacgttttccaaaagtttgctaagttcgctctccatttggtccatgcgctgctgcgcgatcattttggtgtacaattcgtattgaaaagggtgctgggcggggctggggaaggcgagctccaaatattgggcgagaggggcgctgacattgtgcgaaaggagaaaggaacggtgaaacggtgaacggacagacgacgat

SEQ ID NO: 15645 - DNA, 3552 bp, Heterodera glycines
agcttgctgcctgcggtctttttattaatctcttgttaattatctcggataccatttcatcgtgaaattcttctgcagtaaagcgctttatcatcaaataattttttaaataaatcttctgctatgtaataactttgcttgttataatttagggaaatttttatcatggttcaattttataattatttaaattgttttttataggaagcttaaaaaaactttgaaaaattgcttagcatttatttcatggtctgaacttttcatattcatattgtacaagtcagcctgtttgttttaccattgttatgtttaatttaaatttggataatttctatgatcattttggtcttaagctgtcaattcttatgaggattttaattgttgacatccggaattgtctttttcaaacagcaaaaatttatatttaagataattatgtaaaatattttaataatttcatttaaatttattaattttgatttattaagaatagaaaatagatattatttttgttgtattttataatatttttttaacattcgcttatttatgcaactttttgtgctatcttatttttttatattaattattttaagaaaatctccgattaaccatcctaactttcgttctttttgatgaaatacaggtgaagtcataaaaaaattttaattaatttttttaaaagcttttcattaattaaagtgatagtatttcacttttatttaaaaaaaattcactcgtgaagctctgtggcgtttgggctttcttggaggagtagtttcttccgcttcccaatttatatattcttactatttttaaattgtataattcgtagtatttgttttccttgttatattattcttttttaataattattttaatttcttataacatttatttttgatgtaatttttatttattccttttctataattgtgtataaaataagttttattttttatttattatttagaataatttgtgtcatttaagcaagaattttattaatattattaaacttattcataaatattttgttgcaatactccatcaaaatggttcgttgcaaaaattaaataaataataatgattcacaaaaatattttcccaaaaaaaaacttttattatattttccaatttatacagcagtatgtatttaatttacgttacaatgtttttatattactgttcaagttctttaataaagctagctgattagtgcacttaaactaataatattttttaagtagacccggatttttgtgtgctaaaaaccctaaaatatggtaataaaatttgtgctaaaaattgggaaacactcgaaatagaaaatttttttgaaaaatattgaaatttgatttttagggggagtatgtttgaattttcttgcattttccttaagttttttctcaaaaatgccaaaatatgtgccaaaaccccgcaatatgtgcgatatatgtttttatgtgccaaaccgcaaattaatccatgaattacgtcaaattttggaatgataattatttaatataaaacaataatcggaatttttgaatttatttttatttttttaaatatgttattctactgttagaaaggaagataagcttatatttattttgtaaaaataaaattttcatcaattatagtcttttcatattttttcaaattgttgaaataaagcaatttcttattttggtttgaaaattttaatacttgtttaatttaattttttttagtctctcaatgtctttcttttttaaaaatttttcgatcatcaggcgcctcaatagcgcggtgtctctaacccaaacggtcctctttagggccatgagagacagaagaactatttacatttcaaaataattttattagagaatatatgcctttaaagtataaataaatttgtatagtttatttttatgaaaatcttttaaaggcttcaaattgcgaaataaatttctttatttaaatataaagttttattattctcggggccatttcttctttttcctaggtaggatatttgtacgtatgttataatagattatttttataataaaataactgggtattttggaatatttttattattatattttgtcttggatgttctgttcttaaagaattttgaattgttgaattagctaataattttaaaatagcctatttagcaatttatacctttaaggtgtaaaaagtataaataaattttctttttaattttataatgaaattcttcaaattgcgaatgaaattttagttttttgtattatgtccttttgtttttgtttctagtgaaaggcacaattcaatatggaaaaaacggcaacatgcgatgcacgttggaagagtttttttatgaaaatttattaaacatctttgtatctgcaaattttaattttagtaaatgctgagtttttttaatttcttgaatgatggaatataagattattttaaatatatgtttttttaaataaatgaaaccaaatatttataaaataatttgtgtttaatattacttgaaatgatttatttgatgtttagctttgttttaaacaatttttttataatataaatggattaaaaataacaaattttggtttattaaaaaattaaatattttttgataattttgtttctatgaatcatttattttaatgcatttatttaacttaaattgtttttcattcttttatattttattttttatatgtccaatttaagtgatttatattgaaaggtactttttaaacaagaaaatcatgatgaaaaaaattaaatcattaaaactttttttttctcgcggaattgtcgacttttttgaattgcaaatcaagctaaatttgtttttaaattcattatttgtatgtgcggcataaggaaacttaaccaaattcgaccgttaagaaaaaccgatattttgtgaacttaacatttaatatttgaacaaatgttaaaagtatctgtttgcattgtttattaaataaattttcaatatttgcattaacgtctttttttgttattttattttaaattatcacttaactaatttcgtcatatttcttctttttttgcgttatgatgattttaaaacattgtttcaataaatgtctacatttatttttataattcatgagtgttcaagttttgagccttcgtcctcgtcaattgtgacgagctattattttggcaatatatgctttaaaagtataaatgttttgtttaatttcattttcataaattcttttaaaagatgcaaacttcgaaataaaattctttatttagatatatatttttattacctttgttttgttttttattattcttgtattgtcttgtatttagagaaagataaaatgcaaagtttaattagatatgttatgatgaatataattaaaaagtaaattatcacaaaatataatgtttactattatcatggttaattattacttcgatattttgtacaatttaagtctttaattaaaactggttatttaaaaataaaataaattcagttttaaaaattataatttggctctttttatattttta

SEQ ID NO: 15646 - DNA, 5011 bp, Heterodera glycines
  unsure (1)..(5011): unsure at all n locations
ttttatannttaatgctctcaanttatccattccattcattggctaccactttttccaaccgattggtcgtcggncccaaaaaaaaaaaagaaaaattatngtacggaatattaaacgaaaattgtccaattggtccattcccatccatcggaaatggcattccatcagttgttttaacgatgattcggcttcctatttttcgctttttccctttttttcatcgcttttgttcaatttgccaacgcttttcccagcgattggacaaaaattgtgcttgggaagtgtaaatttgtggtgatttggcgcccccttcagctgctttcccattttttctactccttttttgtctgtccataaataggcaccgaaaagccacccaaatcacacattttccattcaaatcacagctaatccatcctttcattcaatcatcaatcagttgaaccttccttgcacccttcatccatcccatcactctgcccttcatccaatcaaaaacggtaaattaaagaattagtataaaatgtaatttttaaaaaattaatttaaaaaaagcaaaaaagaacttcacaaaatggtccgctcaatgcttcgtccatcgatttttgccttgctgccgctggtgtgcctgctcagcgttttgccgaaacccgggcatggtaagtgaatacagtaacagaaattttcaagtgattttagactcgatattattcggtagctctaggagttctctgtagcctgaaaaaattcgaaaagttttattaagtttgaacaaagttatggccaaaagtacacaagcacaaccaggttttcgaatttgaaacttgacgaaattttttgaaatttgcaggctaatagaacatttatggctatcgaataatagcaagaaaataaaaaataaaatgaatttttgactaacattttttacttagaataaacaataaattttaattaaagctttcttagaaccaacaaaactacgtgatcttgtgttttctaatccatcaaaatttcaaaaaattcgtttagtttcaaaaaagtcatggccaaaaattttttaaaacgtttcatgtgtgtgcttttggccataactttgttcaaacttaaaacgaaatttttgaatttttcaggctaataaagaactcttagagctatcgaatgataccaagaattaaaaatttagttgtttttgagcaaaattatgtgaagttttttgttgaaaattttcatttggtatttattttataacgctctctttgatggatttttttttataacgacaaagcacttttttttcaaattccacattaagcaactaagtgcaaatatctcgttgaatcggaattaatgataagaaaaccgcgagacagggattgcaacaatgaagagaaatgtttcacgcagttctgttcaacgcaaaatggtaagatgaaaataattataattataataataacactaaaaataacaataataataataatataatagagataaataataaatacaataataaccagggcttctttttttatgtaaatacatgttttttcctggattctccatagcctaattagtaggaaaaacactttattttttgtgtttgcgaacaaaaattgcgacttttatttacatattttgagatttttctacatattacatatgtacatatttttatacatatttaggactttttgcatattttcgtacatattttgcattttttgagaatttttaaggaattttttttattaaatgtccccaaaaatatccaaaatttcgcaattttttcaaaaattttgagaattttttgtgaaaatgtgctccaaaaaaataatttttttttttttttgaaatgggatatcaaaaattaattttttaaatactaaaagatgattctaagtcctatttaggtcatttttatgacaatttatgcctatttcaccatttagaaagaattttttcccaaaaaaatcaccatttaaaaaattttatttacatattttaatacatatttctggatttttgtacatatttcatacatattttagtgttttttatacatatattatttaatttcataaattttatgattaaatatttaaaaaaaatgctaaaatatttaagaaataaaattatttctgaaaacaaaaatttatattcaattttttatagaaaaaattttcatttctattttaaatttcaaataattttctccctaaaattaaaaaaaatgtttgagcttctcttttaaatagacccaaaatttttgcggaagtttctaacatttagaaaaatgataacaaattttctataaaaaatcaattaatctagtttcataaaaaaatccgattttttaaattttcaggcttatttttattcaatgcgtggaactgtattggcatggacatgacacaagagcaatgtgacacactgagtgcgaataaggcaaacggagatcgggcccagctcaacatgtcgaaagttgctgtcagtgattggaaatgcaaatgcgctttgggaaatgccggagaggacatggcgaatgcaaattttgagtcgccagaaggtggggcgccaacagggcggagcaggacaaacaaaatgtcgccggtccaaacgttgacggacaaacaataaaaacttattcaaattcttgagaattaaaaaaatttaaactttttttttgttttttgataaaccagcgaataaaatttgctaaatttcagcaaaacgaaaataaaaaatgttttccttgaaatttaaattttgtcgaattaggctaggtaaggaaaaaatttttctattttattttttctgctggcgaagtttttggcatatttaaaaattctttataaatattttgaaaagcaatttaaaaacccttaatttttaaagaaacaacaacaaaaaaaaaagaaaaatttttatttttccacacctgactgatttgactgatccttacgcacgcgcgcctaaaagtgtttttttgcgcaacatcaagggcacaaagcccgtagccagaaaaaaaaaattcgtaggaggggggggggaaccttctaaaaatcgcaaagatcagacttttttgtgtgaaactcttttaattccagaccgaccccttcgctaacaccaaattttaatcaattcctacttccaaacgggttttcaataaaattcaaaaaacctttaaactagcgccgaatttattttaatatattattttttttacacatttttcattttcattttcacatttcagcaaaaatggcatgcaaatatcgcatggaatcggagaatgccgaactcaacgaacagctcaacaacaagctcaataaaaagttcaataacaatgaaaaaattcaatgcatcaaagaaaagggaaaatgcggcgcggtgttctgtaaaacgaaggacggtgaaataaaaaaaaatatatttatttttttaaatattaaaataaaattttgaaaaaaagtaagtcagaaagcacacatttctcccatatttctacaatttgtccttatttttttttacattttatccttatttttcccttaaatattggtatagaaaaaaaaaaaaatttaaaacattaaagattcataaaaatatttgtttaagaaataggaccataatttcaaaaactttaacggctatacctaatttgagacgaccatatatgtgtatttttaagtcaggtaaaaaagaaattaaatttctgattataaatttcgaaatgacacaaaaatccttaaaattcgcgacttttgggggaaccacttccccccccccctccccaactcgagtctctcggtttttgaaaatttcttttttttttatgggggtatagtttttgatctttatacatacgttaattttttttatgcaaacatttccattttccaggtgaacttaagtggaacaaatgggcctgcttctccgctgactattccaaaaaagtgtgtgccaaaaatgaaacaaatgccgtgaatgatgagcgtgacaaatggagcgattccaagttgccgaaagcggatgattggaagtgccggtgccgttttggtggaaacggaaaggacttgaccaataacaaatttgtgccgagaaattcaagtgagttgagggcaaaaataaatgtggacagagttttttcaaggacgcgcggaaagcgttttaaggacgcagaattttctgctgtattaatttcaatgaaaatttttataaatttactaaaaaaaaaaattacattcaccacaattttttagcggccattcgccatggtgacggaatgccaatgatcgttgtgggaatcatcatgggtaaaaaatttttttaaactaattaacctaatttgaaaaaaaaaaatttaaagtgccttttttaagctattttgcccccgttccatcatgccattctggatcaacttcagatgaattgagggcaaagattaagaacggaatttgagtgagatgccatcaaaaattcctagccccgatcagcctaaatttctttctccgcttctgaaccatcttatcccccctttttgccgattccgatcagtttcattattccctaattctgatttgcatttgtccccaattttcgatcaattagtgccataattaaaatttattttatgtattttattgataaaaaaaagtgattatttcaatacaatatttttgaaatttatatcagcatttgtatgaatacaatttttatctttgacatttttttattttgtaattaaattcaatcgaaatttaaaattaattttaagtattatttttctgaaattttaagcaattttcttaacaaaattgcattaaaatactcaaaaattttcccggcggcgcctatcggcaccgccggacccctttgaaaatggaggccaaacggcaaaaaatattaattttttggcgaaaaacggcgaaaaattttgtaaaatacaccccataattctcaaaaaaccaaaaatacacccctaaaaatcgaatttttgacttcagc

SEQ ID NO: 15647 - DNA, 1191 bp, Heterodera glycines
  unsure (1)..(1191): unsure at all n locations
ttctaattttacaaaaaaatctagaaaaattgtcataaatttagttagactagcttaatacgaaaaaaattcaaataaaaaatttctatcaagaaaattcaaggaaatttaaaaaaatttttcaagttttttgagttttttccggaaattccggaaatttagtttttattaacacttagattttcaaaaagctaaaatacttttaagttttcttgaaatttagaaaagttttaatttttttttttttgcggcgacgttatgtcccggcgacgttttggggtgtactctcttttccggtcttacatattaccctagtgaagttttaagttttgttttaaattgatttttaaagaatttgtttttattagttctttgtcgcgttgattccataattttgttaccctccctcccagcaaaggaaattgttgtgtctgaccaacacttataccaaaactagagcaaattaggattgggttttttggacaaagtttatttagacaaaaataagttaaattggttaatgatcgatttagcaaaatgtggtatgtcaaaatgtgaatgaaaaactgagaagagaagaaaaaatcccaaatggtgtccaatgagctgcttatatacgggtcgggagcagatcgggaaaagggttttaggagagaaaacacaagaaacaaaaaggttaagacgaagaatagtcggcacatcaaaaaaagacaaagagaatgtttttgggaaatgccagaggggatgggcgaagggattagtttgggataacaaattcaacatcaaagggaagaaagagagaagagcattgtaaagggaataaattggggaaaaagtccaaaagcaaaatgccgatcaaaacaaggcaaaacggattcaacagaaatgaattttttgcctagtttatattttgtgttaacaataagtctgtaaatactttttttccaaattttccagttgatgatgaacatgctgcgagaaaagagcaaaaacatccaattcgaggcattccacgtttttaaggtatttgtttttgcgtgaaattttttcccgaacgacggcgccgccgcaccgcaaattttcgttaactttttctanaaaatccgctaaattagctattttttttttgtaaaaatccattaaaaaagataaaaaaacaaaaaaaaattccgcggcatctatcgacaaatc

SEQ ID NO: 15648 - DNA, 1139 bp, Heterodera glycines
  unsure (1)..(1139): unsure at all n locations
accgggaccggctggtcgacttcctgtccgagtttcacaacgagcgcatcgacgacgagcagttcaacgacgagaaggcctacctgatcaagcagattcgacaaatgcaccaataaatttntaaacaatgtttttttcctgttttcaaaactgtggcgttgtgtttgtagagtgagggcgcgggctttttgtttgtgtttattttaatgtataacacaccaaaaaaaaagtcatttttaaaaatatataaactaaaaaaaaataaaattacttttttgtcattcattatatatcaaagattgtcattattcgtctttatcaatccaattatcatcatcgtcaccatgtttaatcccttcttccatttgctgcctttttttgtttgtttgtgtttttacgcattcattacacacagagatttttgtttgcgaagatataataaagccgcgagatttatgtatactaaattgaattttaaaaaatagtgaatttgaaatttcgggttatttaaatgagaaaacatttgtcaaaaattgcctggtttgagtaattaaaaataagatttgaattttaaaaagttaattatataattgagggcaaattctaaacaaaaatatttttcttaatataaaatacggtgattgtttccttttccagaaatggaactctcatacatttttaaaaatcttatttttggggtcaaatcttagtttttgagccattttttcttattttgaagaaaaaaaggttctattgcattcagcagaaaataaacttatataaacgcttctatagaccttgagctttcacttgataccaagaatatatgtattggccaagtaagaaaaaagttatggcctaagaaactgaggatggtcattcatgggacgcataaaaccaaaatctccgtgaatctctattttttattatattaccttatattagaatcggttttggacaaaaaaggggaattttggcgaatcattaatattcgcctcttcgttcaatttcggatccgggatttgtaatggcaggaaactaatatcatggtggaactcaaccccctttaatccccccagaaaaatacaaaacaataaaaaaaaaaaatttttcgtggcgtaaaggaagaacgcacctaa

SEQ ID NO: 15649 - DNA, 2611 bp, Heterodera glycines
gtccgcttctggctgcattttcttgcgctcgcttttcaagcgaaattccatttaatgaaaaaacccaatcgaatttcctccgattgacaagaaaaagtacggtacgaaaaatggaccaaactgcgaaactggtaatctaaaaaggggtgcatggaaaaagcaattgcagaggcagtgccaatcagacgacaccgttggggtacctccccccttgccccgagaaagattgtgtggcttttcgtcccccccccccccctcctcctttcccacctgtatcactgtgatgatcgacaagccgaggaaaaagccgaactgaagtgaattttgatattaatcggaaaggatgtcttatttggcataatgtcacaaaaaccgaataattgtgagtttcacactacgaatgcttgtgacttctgactgacctgtcccccaatttgggacataaagccgggcactgtgatggtaaccaccttgtgggaaaagagggtaattaattgagtaattaacccttaatggtcccaatgagtcacttctttgagatgctcgtactgcaggtcatagaaggacacctccaaattgaacgtctaaaaatggaattgattcaactattagcttaattaaagggtttctgacataattagcgaattcctggagagagggactctgctggagggaaacacttaagggaggggcacggacaaagtccaattgacgacagggcgggcgagggcatcggacagtacctgtactcccaccggttgcagcccgggatacattttggaccgtgcacagaacccgagtggaccagctgaatgatatcggtgtagctgaaagggaagggacagcaatcagcatagaaaggtcgggaaaaaaacaaaggttaggagggaccgatcgactgatcaaatgggagggggggggcgagcgactcgatcactgattttttggggagcctagtccagcggagcatagttcaagcactcactttttggcgattttcaacggctcgcaagtgggtagttcggtcgatattcctctgctgtgaaaacacaaagggacttcgatttacggcatttgaatgcattgccaaactcacacagtgtccaaatatggcaatgtgcagttgaaatggtcaattaccgtcgaagaaagccaattgcgcacaatgcaattggagtctttgccaaacacctggggccgtagtcaaagaagtggttatttgaccaggtcatttaaccatggtcatttgacctgggcccggtcaataagaaggtggtaatggttaaataaccatgaagttggtggtaaacctcggtcaacaagagctaccacgaactttggtcaaacaaccacgaagttggtggtcatttaaccatgaccatgaccctctttttttccctgtcaataagaacgtagttcatggtcatttgacgggagttggtggttagaaatgctaccaccatcctacccatggtagccatatttaccatgagccttttgacacggaaaattgtgagataaaaataaacaaaaataagattcttatagattgaagtgtgctctttcttctgataccaaaataaaaaatttatcttaatgctaagtatttttaaaaccactttttacaaagaaaaacacctccataaaataatttttataatcaattgtggtaatttttgagccaatttaaacatttttaaaaattctttttttatccctctaataggaccatgtatccctcattatcacataaatagaagaaaaaaacaaaatttttatgtgaatctgccccaaaattgcatgtagttaaatgacccgggtcaataagaagatagttcatggtagtttgacggaggttggtagtcaaaacggcacttcgtggtcattttcttattgacccggtttaccaccaacttcgtggtcgtttgaccaggtcaagtaaccaccttcttattgaccgggccctgctggtcaaataacgaccaaccatgtgaaaaacggcagaaacgaagatggtaaattttctgcgttttttaaccgccaaccatcttcttttactttaccaccaactttctaccatgaactgattaaaatttgcacttgttatattaaataaataggcaaaataaggtttaaaggccctggaaaattggtagaacaaataaaaataattattatttacgcattaattttttgtgaaatttttttattactatttaagaacggaaaattcaaaataaatttttagtgcttttttaaatttaaatcaagaataaaaaatccatattatgataattatggtttaattaataaataggctaaaatttgcacttttactcagtgtcgcctaaaaccactaatttttattagctcaaaatgccaaatttggtaattttttggggaaatctgttaacaaataacactcaaattttctaaattttccccggcggcgcctatcggcaccgccggccccccccccttgttccccaaaagttttttggaataagcgtgttttgaataaagttgtaaaaatgagcttttttgactcaaaaagttttgcataccaaatgaggcttttgaaacttttaatctgagagccctgtttttttgc

SEQ ID NO: 15650 - DNA, 1680 bp, Heterodera glycines
  unsure (1)..(1680): unsure at all n locations
aattaatgatcagaaattgattagaattttttttaataccaaagctaatcaaatccaaaatgctaggaaaaaaaacgaattgcgatggctcttccctaacccatccacccgccgattggagtggaaaactcgcgcacccccggcggcggcgccgcgcgatttccattcattgtctcctgctgtggtgttctcgcccgtccccacctccacctgctgttgtttagcaaacaacgagccgaacaagtgggggagaagggccagaaccagcagcagcaggtgatcaacccctgctcatcagacccaaaattttcagaagtgcgcagtgcgtacaaataacaaaccaccgccctctgctgttcggcgaaattcccgcaaaatttgacggtgtgtaaaaaagttatagtcggagggcgccggaaggtttccaattatttaatcaacctgcacgttgttacattatgccaacaaatgtggcgaataatgatttcttggagaattggaaaatgactttcggcaaattgtttctcccaacgactcacccaacccaccgagtttacaaatcactaattatgatgagtttgctatttaattcaatgtgcctaatttgatcaccggattcaaataaaattttattgcgttatgtctttatttgttgaaaatgggaatttaatcaaaccctgtactataaattatggggctgtacgagagtcttggttctcgagtttcgacgactcaagaaatttgtttttttttggggggggggggtctcgattctcaactgcgacaactttaagaagccataactatagagcttgttaaaagcttttaactgatacgatgtttgtttgatttggtaaaaaataaaaaaaatttagttttcaagtttctgtcggaattaatgttcgggattcaaaaatgtctgaaacggacccaccccacgaaaatttaaaaaaaaaatttcacagaaatttttcgaaattaaaattttttatgaggggaaaagaacgagctgctcccgtctgagacacctcttgtgcatgtattaagatgcaaaatctttggacctgcataatgttaagtttcccggccatcgtcgcatttgcaccaccagcagcagcagcggcgactttctgttgctgctcacgttggtgctgttgttgttggacaagcgcgggaagattcgaaagaatttcggccggtgcatattggcgcaatatttgattttcaccctcaagcagtgtaacctgtgtgaaaaattttttggaaaattttactaacgatttttttttggaaaaattagcaattcatcaggcaaagaaaattgttaaaatgtcttttcttgaaattttatttaaaaaattttaagattctgtttgaattttttaaattttggcggtgaataaaagcatggacctggatttttctgaacaaaaatacagaaaaacctatatcctgggtccatgtccaggtcgaattctagaatttatggtccaaaaactagtcttatttataatcgcaatcaaaacccataattataaccggccctattccaagggaatgagattatgaaccnactgacacgtccctcccaagtcgcgatggtagcacgtaaactttcaacctcctcacgcacagncaaggtcaaatgcgtttttaccaatcctgtacaaaaatgaaatg

SEQ ID NO: 15651 - DNA, 1847 bp, Heterodera glycines
ccccccccccccgaccatggcctgttcaattttgtcgttaatgttgctgctgtcactgggcaatggtggacatggccaagggctggcgccggtacccttgtagtcaatacactcccaacgaccacgagtaaacaccgccggaaccggcacaacctgagaataattgtcatggacggtcccagcaccccaagaccaatccacaaaattatcatttttttggtgcaaatctgtaatttcgaatctcgggccccaattcgaacaaaaaggcatacaaaagtttcaaatttttttgttcaattcgggtccaggattcaaaatgggccaaactaatgtctaattcgtggcgatcccaaaaaaaaactatagacctgaaactgacgctcctttgacttggtagacgacatattagcaacaacaaaaaaatatgtatttaattcctcctaaaaatgtttttgatgagcgataatatttaaattcaaaaaaaaaatttgaatgaactataatgatcatagtaaatattctgggcacattcagcggggggctcaatatatcaatcattaatttatcattgtgcaaaagtgccatcggaggaatttttgcgttttccacaaaaaacaaaaacaaattcaattgctccccacagcggtggccaatcgggcgtatgaatgtgctgaagagccaaatgcacgccgttcaatcagttcacgacgccagcgaacgtacagcgcggacagcacagcatttttgatcaaatgatgcgagggaaagaatggatgggaaatcaaacaaaagtaagaacaaatgacgatcattgaccccccccccccggcgtctataaaaatgccatcatttttctttttaccgcaattccctaaatatagcctcctgaggagctgacaaatgaggatttatatttcgacactcttcgaaagggtgagggtctttgtttcggggattttattttaggaaatatgaaaaattataataattgatgctgaatcatagaattatttgtttgtttttatgcgattttttgaaaaaaatagggattctaaatacaaaaataaaagaattcacaaaatcaaaaaaaaaaaagaattaaacaaacatttaaaaatgtatcttcaactgtgctcatctcatagcataggattaagcttaatttcttttttttcaactggaaatttcctgacttattgatttaacagatgaagattttatcggggtccatttttaattgaattcaacaaattttatgaaacaaaaaaaaaaaaaaattcatggaaaaagcgcactgaactaactccaattgtcagtcgtcaatttttggcgaaaaaattttgcgcacccattcattttcacagttcacttagcgggagcagctcgttccccccccccccccggtttaaaaaaaaattctaacttagaaaatttccaagaaaaaatcctaggagtgttttagtgcacccctttcagcaatgtgtggcggggttacggtacttaaagcaccgtaagacgatttgtccgtttttggtgttacacgtcgacacaaaccacacaatgtgtagcaacaattttccatcatttcccagcagtacagtatatcagaagtacgcagtgcgtacaaataataaaccatcgcgcccgcccgcccaattctctgttcggcgaaattctcgcaaaatttgacggagtgtaaaaaaaaaattatagtctcgggtgcgccggaaggtttccgattaatttaatcaaacgtgcgtcattacattatgccaacaaatgtggcgaataaccaaaaattgataaaagaaagggaacgaatttctgtcacaaaattcgcccaaata

SEQ ID NO: 15652 - DNA, 1086 bp, Heterodera glycines
aaacatttaaaactcgatccgaagtttaacaaaaactcgaaatgttttaatcattttttaaatccactgactcattttctttttcaaaagtgttaatcggattcaaattgcacttaatttaggccattgtccccatcgtcgaattgtgcggaagtttacccttgagaaatgatcgaccattttcgagatgattgaatggacaaattgatctgctggtccttgttgatgcttatttttgctcattaattttaatgaattctttccgatagagaaaaaaaaaattatttgaccgccaagcgttgagacttcataaactaaggatccgaatttgggttccccgatcctgaaaattctaaaatggttttatctcgaaaaaatgggagatttttcttcaaaaaaggggcttaaatttgccctcaaaataaggtgttaaacgggatacgatttttagccttttacctattttttcctgagctcacagtggcctaaaacgcattttttttttgggggggcggggtggcctaatttttttttacttttttgaataaattttgtcattttacactcctaacgttttgatgctgagtttctcaaggtggattaaatcgtaccaggtgttttcgacagtgattgatttcgacagtactttttaattaatttctacatgatttattgtatatttgaattaatattaatatacactttgcaaatacaaaatttataattgaagtaagtaataaaaaataagacttgtatgatttttttgtcaaaaatttatcgctttcactttttctatacaaatatctcttgctggaatgagtcaaaaatacaacaaatttcttagataagattatcaaatcgtgtgggaaaatctgctaactaatgccgggtttgagtgccaaaattcaaatctgaaggctcttaagcaagaattcgaaaatctcgaacccatctgcaatgtataagagccatgatcttatcattttaattgtcaaaatttaacgagacatatgccatatagaacaaattttttaaaaataagctcaagggggacgaaatcaacactgtcgaaaactaacagcaccg

SEQ ID NO: 15653 - DNA, 1982 bp, Heterodera glycines
  unsure (1)..(1982): unsure at all n locations
attcgatatttcgtgcttttntaatcaatattttatgtccttatttaattttntagtatgaatatttttttactctacttatagaaatagttcactatttttgtttgcttccgaataaatttaaatgtgccatatttctgtgttttgccaaatatttatgctttttaaaaatgttcacaattttcagccgtgcttttgccaattaatctttatgtttcaacataaattctaacggctaaaacaattgcatttggccattcaaaactctgatctctgattgaattgtggatagagtccccagctgatcaaagcaaaacgaacaaatgattgagaatgaatgggccatttgttggtgactcaaatcaattttatgtgtcgatcaatttgtgaatgtgtgcttcccctcccctccgctttttccatctttccgtccccatcggtccttgggtggaaaagctttcattttctaaattatacttttattcatttttatgcaaaaattattttaagtttttctttaacattttaaaattttcattttaaatttttgcagaaaaattctgattattacgcaaattattcattaaatataaatgtcgagcagtttggctgatcggatgaagctgatgttgagcacgggcgaggacgcggatgtgcactttttggtggggcaagaagacgcaaatgaggcgagttcggaaaaaatgtatgaaaaaatgaattctatctaatttgaaaccccctccccttgcaccgaaattgacttcaaaatttaaattttttgttttacttttcattgtttgtttcaatggatttttattttaattacatttgtgggcgtgttggaaaaacaaaaattaatgaagccgatgggggggggggcgctaggaaaatccaacactacaccaactttaaatttaaaaaatattttgattgtttttatcaagtttcgaattgaattaaaaaaaacaaattggttgcgccattcgatgggatattgccggattgtttacaaattttttgagatgatcaaaaagggcatagaaataaatataataattatatgcctaccttaaataggttttatggcaataaaatatttattttaaagaacttaagtatgtaacttttattgcaagtattttaaacattcactaagtcaaacaatcaaaaattatttgaaatttaaaggtggtatggtgtcggttttttcagtgtcggattttccagctccgatggagtggggctttaccatttttaattgtgaattgattttaagctcatacaagcccataaagtcattttgaagcgtgcttcggacgtgtttggggcaatgttccgttttgatgcgaagaaagaaaaaacagaaaatagtaaaaactcaataaattaatgatagtaattagtggtttatttaaattagtctctgccgaaagtctcgtggtgatccccgatattgaagcacaagcattcaaagtgatgctcagcttcatttacgcggaagatctgagcgaattaaacggagacaacgtaatggcagtgcttttcgctggtgaattaaattaattgaattttaatttgttttaaattaaaatatttaagccaataaatacaacatctctttgttggtcaaggcttgtttggactttccgattaatgaactgtctgacgtattcctcgcttataagcaagctcgccttctcaacaaaaaagtattaatgatttttaagtatttaatttattaaaatttcataaatcttttgtatgagagcgctaatagcttttgtttattttaattaaattggcttctttttagaatttcgctcgccgctgcatggattacattgaacaaaatgtggaaacattgatcaaatcagattcatttttgcaaattgatcagaatttactgtgtgaaatattcgaccataatatgctggtgatcatcaacgaatttcaactttggaaagctgtaattttaaatt

SEQ ID NO: 15654 - DNA, 2665 bp, Heterodera glycines
aatacgtcggaagcgtgtttcaaaatggagcttatcggtctggcacaagcttaagaggattaaattttaaaaaacacaacaaaatttaccattcactaaatttccaatttttaattaataaattaaatttttaatttgaagactcgcctcttttgcgtcttcgtcgcccaccaaaaaataaacatccgcgtcctctcccgtgctcaacaaatgcttcattcgttcagccaacggtttggacatgctaagcaattccatcattcgtttaattatctatttaaatgcggtaaaattattggcaatttcaaaattggcaagaaataaaaaccacggcacaaaatcagcaaaactttatgttcagttgggctttgtgattattttgaggaaatttgtagcaaaaaaaaacatgcaaatgtttcgttgtgctccttcccccccccccccctgtttttgtgcattttttcatcgctttgccatcggtaaaaaaaattgatccgactaaaatccaaacgtaaacaaaaagaattttggattaccaagtaataaaaaagttatgatttaaaaaagtgaggatgaatactcattggacgcgtaaatattgattggacgcgtaaatattgattggacgcgtaaactggaacagagccgaaaattgaatatattcaaataccattgggtcatgtgaaactataaaaattttgcgccaaaaatagacacttttatcaattttttgactaaaaactgccattttttgttatttattatcaaaatcagacaaattaaaaaaaagatgaagatgaaaggcggaattaaggacaaatgctactccagtcagtttgtatcccattttttagtcaacatttttttcaactcatttttggattaaaagtttatgaaaacaaatattcgggggtttttgaggtcgctgaccacgaatatgacaattattttggcctattgaacacaccatcccaaaaaacgagaagtgtaccaataaatagagagtgcagagaaaaaaacatctctctttttggcgtactatttctttgtctctgataatagagaaaaatcgaatttacttcgctacgtttaatttttttttctatacgttagatccactccaaattttgcatatcgatagagaaaaaaattacaaacaaaatgtaagggtttttaaacgcaaaaaaagggttaactaaaaagttattcgagaaacaaaatttcgaaccctcatatctttttcctaatcaatccaattgcttagcagttgcttagaaaaagcttctcctcataaagagctttcgaatgatatcaagtttttccaatttggttgggaaaaaccttcaaaaataattcccaaaattcgtcattttttaatattttggacataaataaatgaaaatattcatgttgcacaacggactcgaaccaccaccctttgtccctttactatcttacaaaaaccactgagccacacacgcaaatcttttttggtacagcagctcatttctgggatggtgtgtgaagaattgaaaaaaaatgtggtcaaaaaatggggtaaaaaaactggactagtaccggacaaatcttagaaacaatgcaaaatgcgatctatgacaattgatggatcttttttttgttcaattgtttatgatttgtcttccgccatttttgcttcttttacaatgaaatcaacagttagtgtcactttgtcctcgcttttgttgtaaaagcctttgctcgggtccatcaattccttaattacctcataattggaagaattaagcaaaaaattgaattattcctcaccgaaaatttaatgaaatttttaaatccccagtcatataattcaccgttaaaaacatggtctttaaattccttcctgaaatcccaaacaccgtccatttgcggcacaattcggtaaattgccgccgaacatttgcaactccaatttttgtcttaatggcaattaattactttttaatatgaaaagaaaaaattgagagaaaaaaaaaataaaatctcataatttataagagctcagactatccagtttctttgccctgctaccaaaatagcgagaaatattttaaaaaatgacctaaaacgggagaggaaaggagataatttgaaataaattatttttgttcattcagcaaaatattttcaaattgattggtcaattaatgcttctggtcatttaattgtcacacaccgtaaaagtggtaaagtgtgggaatcccgagctgttcgacgtgttgttaaaaacttcgccattaaaatctctactcaaatccgccacttcgctcattgatgaattaattctcaaataatttgattatgaacattttagtataaaaaattaattaaattttagttaatttttttaccaaatcgccttctctgattcccattttgacgtataaatagggggccaaatcggtgttggcatcgttttgaaagttgatgatttcgttcgcctttgccttttccaattcatctttgcccgccaagccttaaaatttaaaataaaataataataataatataattttaatttttttaccaaatttttcggcaagatatcgcaaaatagtcgcactttgtcccaatggcttcctgtcaacctccaaaactggggtttttccgtagaaaaattctgaaa

SEQ ID NO: 15655 - DNA, 2339 bp, Heterodera glycines
taaaatttcagggaagaataatttgtcaattataaattcattttaaattattatgaaaaaggcgtggctattaatttcaaatattttaattatttttctattttaggcttgtactttgtggaagacattttattgaccaaagaagtgcacaaacgatgcattattaaatatttgccataatttcgaattctgtcgggttttccctccctttttcctatctccaaaaatgaattaattttggccctcccctcgcaaaaaaaagcaatttccttccgccaattaaatatcatttcaccagaacgtgtattttatatatttattttatcatcaaattttaattaccaaatgcatttgtattcattttattattttagtttaaatttcattcgctattttttatcgaataaacatttaaatattaattttaatggtgacaaaatatgctttgattaaataatgcccatttcttgaagccaaatagcaaggaaaagcatcagaataacgaagatgggaacggcaacggcaagaccgatgatgaacggtaggggtactgtagagcaatgggaaaggaaagattaatgaatgaaggggtcgggattgatgaagctaattggcaatttccaattgattaactgaccttttcgcttagcttcctctgcgggcatcgaaattggcaccggcatgtgatcgtacggattgggcggagatgccaccggcacgccctgcggggatggcacgcgcgaaacattcagcggcgaattggtccgcttttcgtacacttcaaacgtttcccgaggacccaaaaattctttcctataatggggcaattttcatcaaaaaattaattgtttataaaaaaatggctcactttttcattttttcaggagaaattggcaagaattattataaaataaaatattgaagggcaatttttttacatttcgctttaaaattaaaatttatttttttaaataaatcaatatctaacaaatattaatttgaaggtctaatgaccgtaaatgttaaaatggactttaatgtctttttataaaagaactgatgaaggacaaaagtgtccgtccgcacattggaattttggaatggaagaaaagatgcgatgggaagaaaattggatgatttgggcggagatatttaggggggtatgtgagacatcattttatgggtgcgcgtgcataatcaatggaaaacaacagcgaacgaacaagcgaactttcccatttaagagattgaaatttatatatatttaaataaatttaaattaactaattttggatatttttctctaaatgcaagcagattttgaaggataaaaaaagaaagggaattggggacaacaatatccaaaggtaacataaattttaaaagtgcaattagtataaaatgttagaaaatgcttagggcaataaaattaatatttaattattttgcattaattaattattaatgttgttttcaattgtacacattaaaacatggaacggaaagtgatttttggctattgacaacaaaacaaacaccaaatagcaaatacaaaaacaaccaaattcaatggaccattcgaatttaattcattccgaccggttggaaagggtgggagagattaagagattacagcgaaagaaaagggtggcacaacagcgaattggagagaaaaagaaaaacagagaacggaaatagacatagagagagaaaaagagagagagggctaaaggaacgcgcaaaaaaaagagcggaaaatgccgaaccaacggagaaggaatgaacgaaggaaaagagggagcgaatgccgtggcatgacaaagaaatgaacgaacgaacgaacgactaactgaatgtgactgactgttgttgcttgttgctattgccaatttgtgcattcgttacatttttaaattatactttatggcgaaatatttattttaaatgcattaggtaaatttgaatttcgctaacaaatcaaacaatccatccattcggtcggactttttcattaaatgctttaaattttcagaagattttaccaatttagatcaaaaaattttcccaatctttatatattattttttcaaaatgcggcagtcgcccaaccaaacgccggtcactcgcacaacgacgacgacaatcactgaacaacagagggaaggcgaaggagaccaagtgattgtttaatcaatttttcaaatacagccgataggtccaatccttttcctatttaagagaaccaatcctgaccaattggggctaaggttgaaagaacggcccaacacgcggccgaggttagccaattccaagcaaaaaaaggactgttttgtttttaa

SEQ ID NO: 15656 - DNA, 1309 bp, Heterodera glycines
ccctagatcgatctgtcttatcgagagctatcattgcttctatattcgtcgagattggtccaagagaaaaaaacatcgcataaggcaagatattccagacccataataaaaccataaaagattggcagattaggcacttaaaactattaaaattatacaaaaaagactggtcttttccatttttggccaaatgggacttaccgccaaatgtttgactctatttaagcaagttcctttggcttggtgatgctaaaatcgtgggatccgttttgaagtttacacgacctttaagcttctttattgtatgtcattctatggctttaaggctttttattactttgtaaagtttaacaaatttaattaagttttaaaaagcgtctaaaactcgacaaatttattaatcagaaattttgcgatatgttaaaatatctgctatttttaaagcttcgtgtaaaccgtaatagtgagccctattttggtgatgcaagttgtgtgtgccctctttttgcaaaaaataaatcatttttcgagatgagattgcgggttttgagggtcgacgaatccaattttgacattcttcggcccgttccgaacccgaaccaaatgtcgaaaatttaatttggaactaactgatttactgactatgaaaacattttttacaatttttgattaaattttttctatttatatatgccaataatcactgcgatttatttcgtgcatttgaaatgtgaatttttgaatttcgacattgttccaaattcggttttcggagttagatgtcagaataggatttttcgacccccaaaacccgaaaatcaaattcatctcaaaaaacgatattttattttcgcggaaagggtgcccaacataacttaactattacccagatttgggtgctgatcttcccagtaaagtgcaactatcaaacatttattaaattattaggtgtaatttatgccttttcccccttccgccggttttttccgtcccaccaattccaatttcattaaatggttcaaaacaaactgtcaaaaaccccccttcttttcaggaatgtgaaagttcgcattgccgtggccacgtggagaaacagcgaaagccgccgccgtcggacgatggaaatggcggcggtgggcccggcccttcgtccatttcaacctgatcaattttgccaatcatttgcctatccatttactattatttatcgatttcctttatttaaacattgatacaatgtattagaaatttaatgtataatttccaaggagtcttttgtgatttgtgcgttaaaattgggacaatccgt

SEQ ID NO: 15657 - DNA, 1679 bp, Heterodera glycines
  unsure (1)..(1679): unsure at all n locations
gaaggaagagataaataaaataaacagacgacaaacgctgacaaaaggacaacaaaagcggacaaatggacgacaaaagcggacaaatggacaacgaaatcagacaaatggacaagaaaatcagacaaatgggggacggaacttcgaagagaccgtgaccacccttcccgtacctttacatttaaaaactttgtaacataatttttaaagcttctccgtttcttgtcccgttccccgtttcccatctctcttcccagttacctttctctcgtttccctttccccgtctcgcgtccccgcgcattactgaaatatgtttattttaatggctttttgtcctttggctaatgcaaatttcattttgtttattggatttttatttatccgccgacaaaacatttctttgctcattcgaatagaaaaagccgcctttttcatggaatgtttcatcagcacttagtggagggatggcacttgcaattgacacaaaataaaagtgcgcggaaaatgattaatttacgaattgaaacggacgaataaacaaacaaaacggagaaggaaagcaatcggaaattggaagcaaaaactgaaattggcattattagcgaatgccaaaaaactaaaattaaaattaatttaattaaatcaaattatcgctgcctgccaattcattcgttttagctttttctttatccattataatatgtgccatttggtggttttccggatttgttattgcccgtcaatccgtccaaatcccctccatgccatcgtcacccctttcccctccctgttccccccttttttgcccccttttctccgcttttggtatttccgccattcgccccccccaacccctcccatttttgctcccgtaagattaatccaaccgaatccgtcaaatgttgggataaagaaagtgccaaaagatacaaaaggagactccccgcgcctccccctttttccgtttgccttcgaacatcggacattanatggcatccaaaattttattagtgtttattgtttttggtaacgaagcgcaaaacgaaaattgcttttaattgccgctattcaatgaaaggaataaaaaaaaagcgaagcgaaaaaaacaaaattaattattttatttatttatttatttttatcggaatgttttatttttccgttaaagttttaatactcacattttcacccacttcagttcatttcctttatatctgaatttctctcatcaatttggtttcgctttaatcattaccgtaataaatgctcttttcgatataccgtagcagcctctcatctcgactcatttcgtctcattcttctccaattccatcggcacatagttttgacaggaaggcataattggacggggattgggcgggggggggggggggggaaaggcgggatttaattgggcgacgcggtggggtgagggataaccatcgccgtgttccactcagtctcttccaatgctttctcttcgcttccattgccttttcttccttttctctctctgttcgtcatcattccccgtctctctccctctctcccctcgggggacaaatcatttccatctctcccctccccgcccttgaatgcttacaaactccaattcccttccccctccccacgcgtttcatgtgagggcggtccctcgcgggatggatggacttgtcc

SEQ ID NO: 15658 - DNA, 1615 bp, Heterodera glycines
ggatacggacaccaaactttactccttcccccctcccgagtttaacctctgtgttgccccctccctccccccccccccatcgccccgggggtcgaattaatttgccctatggcaaatcctcgcgcgaatttgtgacgaggctttgcttactgagcatcatttatggatgggcattatgccacaaacgaattaatcccctttcccctctccattttcggttaatccggcttttttcacggccaaatctggcaatttgtgtcactttttggagtccatcatcttgttcgtacagctactagatcacgcaattttggcgaagcctttcgtcattctttgccctcgtgtataaaagcgttaatttcggcacagacaacggacagaccaatggatggggcatcgacggcagaggtgggactgaaaaggaagggcttaatgagcacgatttctaggagaaacatctcttttattcaagactgtcttactcttgaccccttaattatttttcctttatatgtctggccatcctcataatttatctttatctttttctctctctctttttcactaattttcttccatgtgccgttccttctgttcagatgtcctcccatcaatcgccccatttcgtccctcccccgccgctgatttgtcccctcgggcgttgtgcctccacttcgtcgtcgtcgtccgcctcggaaaagtgccaaaggcgcgagtcaccgatgtcaaagcattcgattcgtgcaattttggagaatgaggcgggagaggaggagaggatgatcaacgtgaagaagaaggaagagccgggggaggaggacagaagcgggaccaattgtctgccgaaaaaaccgtgccaaacagcctccggcaacgacaatggccaatcgctgcaaaatcagcaaaatttatcctctgatcagcaacgatcgggtttttcgccaccgctcggcactcaagggcaattgcaacagttggccttgcagaattttctccaacagtttctcctccaccagcaacagcagcgaaaggactccacgctgtcccattctcttccgccggtgccgctccaatttttggcaccccaagggaaggcacttttgtcgccactgttcacattgttcgctgcaggaggaggaggacaaacagcgattggaggaggcgaaaggactgatcagacacaggtgagaaagggaggacgactgatcagagtgatcggagaatggacggggtaaagagtgatcaaagttagagaagggttgggaaggaaatgatcagagttagagaagggttgggaaggaaatgatcagagttagagaagggttgggaaggaaatgatcagagttagagaagggttgggaaggaaatgatcagagttagagaagggttgggaaggaaatgatcagagttagagaagggttgggaaggaaatgatcagagttagagaagggttgggaaggaaatgatcagagttagagaagggttgggaaggaaatgatcagagttagagaagggttgggaaggaaatgataagagttagagaagggttgggaaggaaatgatcagagttagaagagggttgggaaggaaatgatcagagttagagaaagggttg

SEQ ID NO: 15659 - DNA, 2395 bp, Heterodera glycines
aaaattttataactcgtttctgaaaagtcatactgtaaaagtaaaatactaaaaaaatccgcaattttttgctctattatataaattttatttggcatttttatcacttttttgaaaaaagttatagaaataaaagtgattttggaatttgggaccacaggggtgtgactaggatttttgagtggaaaattttttccaccaaaaatcttccaaaaacatgtcattagggctattttatgacgctgatcacgaatacgtgatcagattttacttttgacatcgttaagccctcagaatccctgtgtgattggggattctgagtcatcatttttttggggggggggtgcaaagttcgaatccggacggtgtacattatttttctttgtattttttgagttaattttcattacttttaataaatttaaatgtttggttttattaataataaatttttttagtttaattaaattttttgatgaataatgattttcattaaattatttattatatttaattaaagaatttcagctattattttaaaatttaatttgtaaaatttttttcatttcaatttaaataactattcaaattttcactgcatttaataaattaaaatagtttggttataaattatttaaacgttgtttttaattaataaaacgagtattttattataaaaaattttaaattaaaatgcatgtgatttttaatctttaattaaaaaattttccttagttatttaatattagctttttaggggttatttatgacgctgatcacgaatctgaaatcagatttcagttaatacatcgttaaagccttagaatccctgtgtgattggggattctgaggctaaatccctgtgtgattggggattctgaggctaaaattttaaattaattattaattttcaacgtcgtttttaattaataaaacgagtattttattataaaaaagattttaaattaaaatgcattcgatttttaagcgctaagcgcccgtcctgaggccgcgaagcggccgaatatccacgacaaaatttaaaaacgggcgcgaagcgcccgtcatgaggccgcgaagcggccgaatgttccccacaaaattaaaaaacgggcgccaagcgcccgtcctgaggccccgaagcggccgaatgttccccacaaaattaaaaaacgggcgccaagcgcccgtcctgaggccgcgaagcggccgaatgttcccaacaaaattaaaaaacgggcgcgaagcgcccgtcctgaggccgcgaagcggctgaattaaaccttagaatacaaaagggcacggagcaccctttgaggccgcgaagcggccgaattaaaccttaaatataaaaaatgcgcggagcgccatttgagtccgcgaagcggcctgaattaatccataaatataaaaaggtggcggagcgcccgtcctgaggccgcgaagcggccgaatgagtccacaatatttagaagcgcaaagcgcccgtctgaggctgcgaagcggccgaatgcacttgctcatcacttaacaaacgcgcatgcactagcaacgaagtcctttgcgcgaagcgctcatgtcagcgcccgcccatatataccaaaagtatactgtctacaccgagcaattactgtgcaaagcatactgtctacaccgagcaattgctgcgccacaacacgctagtttatatatatatagaataaagttgggtttcgttaaaaaaattataagtgcccgtggtttgcccggagggggctgaaattttgcaggcaggggtaacttttgattgcgcatctgggaaaaataaggaaattccggtccggaagccaactgagcgccagcggcgctgaaacggccaactttgaaaaacgagctcggttttcgggctgtaactttttcctgggaaccgggagcggaaaaagtctgctgagagggcacaccccagacatgttggctacaactttgtcactgatcactttttgatcagatcaaatgccgagcctgtagaaattggcgactgaacggcgctcaaaatgccggttttggcttttcgtgaataactcgctgggggtttagcggagcgggttggcgccgcttgagcatttgtgcagtttttaaagctgcatccgatggcgttttcagattttgaaaattttcaaaatttttcgagctaggccccctcgaaaatttttcgtttttgaattttattattttttgccgatttttcccaggaaaacggagaccactttcaagcaaccgtttttcgagctctatcgattggtggcatttttgaaaaatttcaaaattttccggaatagaaatttttccggaatgagctccccattttcgtttgaggctataactcgtcaggcgttgattttagcggaaatttgtc

SEQ ID NO: 15660 - DNA, 2095 bp, Heterodera glycines
ataaaataaataaaaaagggatgaatcaccactcaggacttattttctgaaaattttttcacaatatttttaaatttagctaaacttccgatttccatagctgttttgggtaagcaattccacggattgattgcgcgaataaaaaagttattccgagatttattactgaatcttttattttgaatcctaaatgaatataaatttgaaaattttcgagggtttttcctaattactttagcaattcgaattcctttaacagatttattttcagaaataaagaagaaattttaaaatttgtaaaaattcttttaaaattttgaccaaaagagaacaatttattggattgaatttgggggccgaatattgggtcttcaaaaaaccaggtcaggcagggacttgaaaaacggatatccggttttggacacggtacgatacccggaccatcatgctcaagtataaacaaatattctttattttaaatattgtttaaaggatatcgatagataaataaataacaatttgaaaaaggaattggtgatggttaaactgttcaatgtctaagtgaattactaaaatataaaaaattaattatatggcttaattatgcaaaattttcctcattggttcaaactaattaataaaaaaaacacaaatggaaatacaaaataacgcaataaattgcatatatttcgtattaatgaataatggcacctatgaacaagaaaatgaaaaaataataaataaataaatattcgttagattataaaactaaatatgtactacaaaaatatttatattaatacgagatcgaccaaattcgccgctcgtgtcggaggacacagcgacttgtttaaatgtaattttataatgaatgcaagacaaataaattaaaaataacatttataaaataataaaaaataaatacaaaaatattattaaaaataatcttcttatagaatacagggggcaatgaaggcggcaaatatatggaataaatgaaaaagttaagagaaattataaaacaacaaatatttaaccaattaaagtaaagctaagaataaacatttaaaaaattacattcagttaaaaaaatatatgttagttattaatattaattttgaaattgaataaaattgctaatattaaatcataagaaaattccaatttaaattgaaaataatatctacatattcttataatagaaaatgataaaaaattacaaaattaattttataaagaaattgatcaggagagagaatacatgagacatgattaagaaatttaaaaaacatatatttgaaaaaaggaattaataataacaaatataataaaaaaagaattgacttattctgcatgaaaaaattaaattgaataaaaattaattttcatcttttggacaacaaaaataaaaatgtaaaaaatagaaagaaagtttaaatgtaaatttaaataaataaatatttaagacttaggaacctaaaagatgaaaataaaattaataaaaagttaggtttaactaatagcataataaatataaataaatgacttaattatttgtttatgaaaaacatatttaatactcggagatattccaaaatataataaatcaattaactaaaatttacatattacacaaattaaaaagaatatttaaaaatctataattttaataacaaatctaaataaatattttaagggcgagagttacctgaataaaagagaaacatatttaatccaattaactgtaattacataattatatataaccgaatgaaataaacttattataaattaaaatagcatttataaataataaaaataaatacaaaatattattaaaaaataatcatcgtatagaatacaggagccagtgaagggggagaaaaattcagcgcctttaccatggaataaatgaaaaagttaatagaaaattataaaacaacaaatatttatccaattaaaaaagctagtaataaaaacttaaaaaatgcattcaattaatttataaaaagggttgacaaaaatcagcataaataaagaaaatgaaaaagaaaaaatgataataaagaaaaaataaaggaaaaaatgtaaaaca

SEQ ID NO: 15661 - DNA, 1718 bp, Heterodera glycines
  unsure (1)..(1718): unsure at all n locations
attaaagggtccaccttntacgggtccgggcgcttacttttttgtccaacgcctcaaaatcgacgaccgcatcnccttggccctgcttcagttcgggcaacgaggccaaaaagtgttggtgtttttgctgtttcggcgggtcgccgtcagccgccgccgccagcgccgccgtggtggccatcggcgcagttggcatcgcattttgtgccgccggagtcgcacgagcagaaaagtgtccgacgttgatgccggtggaaaacggcacaaatgccaatcgccgatggatgggcagggggcgcaggaggaaatgcctgagcattttatttgaaatggaaaaattgggaaaagggagcacagcgggttttttttattgtcgctaaaaaataatggatctttgaaaattaataacaaattacttagattttttatttgcatatttattttgtattttggcacaatttatgccagggggtgattttttagtgaaagaccggacgatttcagtggaaaaatcaaaaatatttattttggcaaaatgttctcatgaaaaattaaagaattacaatttttgaatgtctagaaaaaaatgtttcttttttttctgcacgtttaaattagggctggccgggtccgggtatttgggcaaaaatcgggcccggttagacatcctcgcaaaaaaaagagtgggattttgtggtttacctcagttgggcgccagcatgcttttccattataacttttttctttgtcatccaaacccaacaatcttggtatccattcgaaagctcttaacatgctctattagctttacaaaaagcgaaaagattttcaagcttggaaaaaagttatgaaaaaaaaacttcaaaaatttcgacttttcacaattttcatgttataacttttttggtaattgtctaatcgcgaagcaatagcttagaaatatcttctaaacatgttaagctttcgaatgataccaagattattggatttggttaacaattaaaaaagttatagtccgaaaacttgggctggcgccaaaacggcggcgccaaaacgatacagacccatgaattgtatcgatgcgagcgttgattttgtctgtggttggtcatggcattttgttgaacttttgtaattttcgcaccgtaaaatgattttttgaaaaatttgaattttcgactttttgttcgaattcgggtccgggattcaaaattggtcgaaatggatgtcagattcgtgatcagcgaccccgaaaacccctagaaatgtttataaattgatttaaaaattattatttttttatgggctgtaaacgacattcctaagtaccaaattcggcacttattccaggcccttctagattaagtaaatgccacaaattcaaataaaatagacaattcacatacataaatgtgaatttttaaatgttgactttgttcgaattcgggttcaggatttgaaagtgatcaaatgaatgtgtcaaatccgtgatcagcgaccaccgaaaatcccctatttggaaacctggggttagaacagggtggncaagttttttttttttcaaaataaggacaaacgaggctaaaactaagatttggaccccaaaaataagattttttctanaactgatagtagcgcgaaggaaaggtaataaacccatgaaaatcgacttanaacatattttattagcgtaaaacaattgaaattgattatcaaag

SEQ ID NO: 15662 - DNA, 1542 bp, Heterodera glycines
tgaactaaattgtatagctattgaagctctatcgatccccccggcactagctaaataattttgtgattttctctccattccccacaaagcttttgacctttgctaagtcactttcatattgaaattaagtttattttaatgaaaattttattaaacaaaaggcaacattatacattgattttttatttatgattttgatccaaattaatttatgtcaaaattggtttttgtaaatgatcgttaaacttatttatttatatgaattttgttatttatgtttgttttgcctgttttcaatattttttgattttttattccattttctcatcatatttaaacttttcaatgtttgtgtttattatttgctattgtatttttttattctacaaatttaaccttgaaaagaatatattttaaattcgctttcttttgactaaatctttcactgaattttcttctgccatttaaattcacaaaatgagcataactctcagaatttgactttaaaaaaagcatttcaaagattacatttattttaatatttttgtttttcaatatcatttcttatttctttcatttatttctatatttaaaatgtgttttttaattatttcttatccttattatttttttaatcatggctcagtcgcgattatgttattctttcttttttaaatatctatgtattgtttttttcgatttcccttttatttattataatgtttcgttttttgtagttttattttatttatattctttataaatactattttattaaattttgttattgtataagtaaataaatttgtgattttctctccatttaaatgattgcttttgacctttgctaaattgatattattcaaattaaattcacgtcgttgccaaagatttggtcaaaataaataatttttttatagtttttcaatccgaaagtaaattgccattttcgtaaatgaaaattccattataactaaataaataatgtatattttattaacttttacactgcgatttgtatatagtatttaatataatttgtacaattattttattttttctgttttttccattgggtgcgcaatataaaaaattccgtttatatatttgtatttttaatttgtgatttattaattctaaaataacttgttgtgcccaatttccattggccccactcatttactcaatttgcccatctcttcctgtttccccttttcattgtcttaaccaactgttgcctttttcccaaatcgccccgcctttcgtttgtggggggagggattggaccaaccccggaggagaagcgatcactttgatatcggttcatcaacttttgctcttcaccgatttgttccttttccctttttcgctcacatttctttgtgctttaaaataaagggctgttgaaaagccaactcggatttcaatagacggggtcgcgcctagccctgaccttggtcaggggtctgaccttggtcaggggtaggcccaacgaccccacaggcacgcctaatatggtccagctggacggatcatcatctt

SEQ ID NO: 15663 - DNA, 3164 bp, Heterodera glycines
  unsure (1)..(3164): unsure at all n locations
tgaaaatttgagtttattttgttaacagattttctctcttctaaacaatttttgcgattttgggncatttttctacctaaataggagttcttggagcaaggnggtgccgacaggcgccgccgaggaaaaaattggaaattttgacaaattttaaacaggttttcactgaaaattcgccaatttataggtcgtattttgaaaatttttgagaaatttcatccctcagaattacgtttttgaaagaccaataaaatgattacttttggtgacttaataacagcaaatttaaatattatttattctttttcagtctaaagcgctttgagaatcccccggagccaccaagagagcgcatgcctttttattccagtaccgtggcgcgctttgagtgccaaagcgaactggactcagcggccaaaccgagaggaagagaagaaagaggagaccgagaaaggatgagccttggaatgagcggaaagcggatgttcgcaaacacgctcaaatcggcagtcgggacagtggaagatcgtccgtgtattccccctgagggattaaatcgcgaaatgctcaaaagaagaccgactccagcaccagtgccgcagtttacgacacgcagcgcggagaggagccccgtgaggaagacatacgcgccgtttcggaaagggatgccactggaacgcgcagaggaagccatctacaaaatccgcaagtcactgctcgaggccgcggacttcgacggattttcatcttttcctacccccttccccctcacaattttattatttactcattttcaaatattaaataaattagaatttttgctctttatccttttccctagtggccaaaaggggaaaagaaataaggcgaacgtttgaaaaagagggggaaagagagagagaaagagagatagagagagtaaaaagaattaaaaatgaaaaatttaagaattagttgttgtgttaattgcgcgtccatcattcaggcctcgacagcatggaattttggagggtgccgtgcgcaaattttaactgcacttcaaagtgcttcgccataatatggccagaaggaactcaaaaacccagtaattcgaacttttttttgctctgatttttttgtgcataaataaaaatttttgaaaatttgcaggctaatagcatttttcgaatgctttcgaataataccaggaatgtttaatttggatgagaaagaaaaaagttatggtcgaaaaattcgttcgacgacgtttcggctgacgacgttttgtcctactccgcctccggtgtgcctgaactcttcacattggaattgggcttttccgttgctttgcgccgtcttcagtctgctcctttccatcacttgcgtcatggctttccttctgttgcgccgtcgtcgccgcagctcttctcacatttccttttgcagacaatgccatcgcttttccccgaaataaaagaagggggagggctctaacacggcacacaattgttaaaaatttctacttcacagcaattgttaatttgtttacacttttttaaaatattttaacaggatgaaaatgtatgaattaaattttttttttttatatgaggcaaattatcagcagaaaaaaaaattgaggcgaataggtaaaaatggaaaaggagaaatttttagcccaatttttttgtaaaatagcctaattggcgccaatttatgaataaatcacataaaattttccaaaatcatttttttgtttcgctcaaaaattacataaaaattatcttattattcgtttttcaaatgataaaataggctcttatcagaatttgaatgaataataaaattggtattcatttcctaaatagcaaattcattgaatttttcaagttttaacccactagaaactttatattcttcttctcttgtttacattctttttatgttcttattattttaattaattgcataaattattcaactttaaatattgctaatttttttagtttgggatttaatttaatattttgtttttgtttacgtttgacaaaagtttttaatttttattttattttgctccattattttattttttaattatttaatttaacaaaattgctaaaacatttcactttgtttagaaaccaaaaataaaattatatttggtaatttgcttttaatttttccattaaaatatttctctttgtccatatttaatttgagtattattaataatataatttttctaaatatttttgttttctaaaaatgtgtgttaaattctcccatattttaatccaaataatcatgatcgattgcttgcaccttttattgttgttgctccagattatatattaaaaatgtttcagattttaaatttaatttaattacttaattattgtcaaattcactaaggttttctttcgtgattatagcagttgccaaagcaatatgttaataatttttttttctatttacaaattaagatttattaatttttaaattatattatttgtttatatatttggttttaaataatactgttcttaatgaacattaatttgacagcctatccttggcattggctttccaaaaattcggttaattaatgagcggctgttgaatttgttaaatgaatgctcctattgcattagttaattataaagcaattttgactttgtcactttttcatctcaagcccactggtcattcatttttgtttattgtcgatgatttgtttatttgcgccaaatataaataaaatagttcactttttttggaaatcaaaatcaaaaatttatggttgagaattttgattttgattttccattaaatattttagtttgtccacatttaatgatgctgttaataatatattttttaatgtttgatttttaaaagtgttttaattcccaataagaaaaaccttcaaggatttctttcttttcctattagcataagttagtcatttttacactatattactttttcgtaagcagcccttaatgatcttttgatttatatttgcatataatattaattaatgaatgtattatatattttttaagaaatttattaaaaatttattgatttattttcgtttgaaaatatttaaaggaattttgtatcatttaaataataagcaaagataaatggcttttaaatcgttgctttgtcttttaccc

SEQ ID NO: 15664 - DNA, 2231 bp, Heterodera glycines
  unsure (1)..(2231): unsure at all n locations
atacaaatttntgtaacaaaaagtccaacgaaaatttggcataatttaggacatacttgggatttgaattgaaattttaagatcttgaataaaagaaataattcctcccattttaaaataatttttaaatgaaatatttaaatttaaatttcagggaattgtgtgttgtgaaaaataatgacaccacaattctcaaccatcatctttcaacatcagattcatgtttatatcagcacacaaatgcgattgacacattagtacgacttggtaaaatggaaaaatatttaatttaattgactttaatttttaataattattttttaattaaatagctgaacgtaaagaattcaatgggatcagtggaaaatattttgatgctaatggcaaggaaataaagcttggcgccgacacttcggacgtcagggttcaagtaaacgttcttttaaatttaataatggattagtaaaagtaattaaaatataaatattaattaatgaaatatattattgctattcaaggacaaattatggattgaatcatcattaatttgcaatgcaattctcggaagaaaaacggctacagagtcaacaattgaaaattcatttaaatatgccacaatattccaataattataagtagtttctcactgaaaatctttatggcaatttaagcattggaaatattatttttaataatgaaaatttgcaaatattagaggctaccataaaaaaggaatttatgattgagtaattttatttacaataataatatttcaaattgctaaaatttagttgcatttttttctaattattttattaatttattttgaattttaaaattgcaaaacgatctggtaaataaatttgctttcattatgctttgattcaataattagacaattttaaaaaaatcaccatgtcacaacattcctacatttttcatattttcacgaattatggtatcaataaccgagccgataactttgcccaattgatttgtatcggttgcgcatgtttcataaactgttcattaaaataaattttaatattttaaaataataattatttttatttattatttaaaatctaattcattttatttgaatttccttaactgtatagcttcttttgttcactcctgtggattttttgaaattttcttcgcaaaaaagcaacaccttcttcgtaatttagcccaccttaaaaatattcattaaaattattacatattagtaaattaaataatctaattacctttatatgttcgaaataatatggaaagagaaattttctgaattttcatcgcaaatcttttttattcagaaacagaatcattgacgatttaataaaatgcgacgagtttgcgatgctgtcgaaaagctcttaatttttgttcattttttaaatttttttaataaaagtagggttgagcggtaccggtaccgaccggtaattaccggtttttttggtaccggtaccggtaccggtaccggttttttcaaaaatcaaagtatcggtaccggtttgtctagtaccggtaccgccggtaaaaatttgcactggtaagaatgggggtctgggtgagaaaagagtagggaatggtgaagaaggagaaattttttgaaaaaaaaaattaaattatttattttcatttaaagcatttgttcatatgcataagtggtcaagtggctaaaccttctgattttattatttctcgcttgggttcaattccccactggaatagaatattcttcatattttctttaccattattttaattgaaattttaatttaaaaaaatattccaactttttttctttcattttaagcatcctaaaaacccaaaaattaatcaattggtctttttttacaaattctgttaacaaatcgcattaaaaaatacaaaatttttcccgccggcgcctatcggcaccgccggccctccttgttccccaaaagtcttgagaaaaacgtgccgcgaaaaaagcggtgttgaaagcaaaaaaggtcattgatttacattaatttacatggccggagaccccttcgcaaaattggaaaattggccgctgatcccttgttttgcaataatctgaattttgaggtctacatctgaattttagtgttctttatcctgaatttgaaaaaaaaacttggtcaccgagcaatatacatatacttctgaacaattctaatgctaaaaaacaggcactcgcgcgaaaactgaataaa

SEQ ID NO: 15665 - DNA, 1645 bp, Heterodera glycines
tttttttattaaaaatacagaattctttttagttaaataatacatcatcgaagaatggaatccattttctacgttgggatctttgtccacctgcatcatagacacttaaaatcatctaattaattgcatataaaaatatttttgctaaattaaaaccaatatacttgaaatcgatgtccctcaaggtgaattgaagtctgaacactaaaattcatttttttaagcttcatacaacactgatgagtctgggtttcgttggaatttttttgggattattccgggttatttcgaaaattgctcgggatcagcctcctccaaaaaacaaaacaatttctttttgtgtttgcatccggcacttaccccctgccgttggcactcgagtcagcaaaatatccatatttgttggtctgtaatccctcgttgctatcctctcaatttgatcaaaaaagctttaatattcattgatcagattttaaataataataataacttgattaaattacaataaaaatattttattaaaaaaatttctcactggtgtgcgctgtcttggatttgataatttgatcgcttttcaaaagcaatttgaattgactggtcttgccaaattggttgaattgcttgcttcaaaatttccgtgatcattgcaaattctaagccatttgctatgtgtttatgcaacacattaacatcattctaaattggtttttagaatttatatttaaaatttaaaaataaattttataatttatttacgattaatgaagcatttccaaattgtaagccaaggtcagtgacaacatccaccaattccatcatgcttcttactaaatttttatattcaaatttttttattaaaataaaaattagtttaatttagtgtaaatttaatgaaaataacacagtaaaattcaaaattatatacattaagaagaaataatattttgcacctgtatttgaaaaaatgatgcactttctctcttccacttcattctcagtgaatccgtttgtgtgtaaaattcttttaaataataaattaaattatcaaaattatttaattaaaaacatgctgcatttgttttacctgaaatttcacatttaaataatataaataaatatataatttttacttacgcaagtgctttttccgctttcaccaggcccttaatcatgaaaaacaattaaattataatggaagaattctttaataatttgaatttccaattttatttttacaaaaaatatatgtacccaaaagaagcagcttttgaacatatctttctggtttttgatgcaacattttgttaattttattggatgcttctcgggctattattgcttccgtggattggcatgagcccattaaatattttagttatctaatataaatatacctatttaaaacataaatatatttattctaactgctaattcaatttgggtttttttcgctactaaaatattcatctttttaaaaaaattgataatttattaatggtggttgtttcacgatttcggtcgaaatttgaatggctaaataatggtatcttggcggtgctggtaggtaacgcctggggatatacgtaagatttgaatgatgaaaaccttttttattttcactaaataaatccattgacttctaaga

SEQ ID NO: 15666 - DNA, 1315 bp, Heterodera glycines
tcatccattttctgctcactgtttttgttaaacgaatgcttctccggcgactgttggtgttctaatggaacctcaactcgggtcaaaaaggaagccaaatacacgcgttctctcaatcggtcgacgttggcgaagacccactcgaggattggaaagacggcactcttttggccttcgagcagttcaagccgccatcgttggcttaacaaagcaacagaagcacaaataatcagcagcaaataatatttgcatacatttggtcaatgtcccgcggcggcggatattttaacatgcgaagggcagacaaaagacgcgtcatctgggaagaatggtaatggacgctaattagccaaaaaaaacaatcggagtgagcccatcctaaagcaattgctcctcctatacgggctctgctgatcacacaccgtttcatccggtgcctctgatcggatgtctataaaatcagccgccgtttgtccctccacccaaccgatgacatcggacagagtttgcaacagcgcattggcactcaatgagtccaatttgacaatggttaaattccgattaaatggagcacctctcagtccgtcggcaatgattcgaagtccctcagaattcatcacgaaaaagaaacaaataaatttagggaataaacaaaataaaagaaaagccacggtgtgttgccatggcattcttcgcccccacccccttcaattagtaggaccatttgcaaatttcaatagacataccgtatcgctaagaaacaacagacactgtaagagttagacactattaaaagttaatgaaaataaaagtgaacaatgcgccaatgaaaaaacagacagctgaggttagacactatatgttttaccattgtttttaattaaattttgtatgcttgtaacttggtcaatagaaaaccaaaagaaatttttttgtgctcattttgaagggaaaattctaaagaacattcctaatttaatcaaaagttttaaaaaaattgtttattagcaaaaaaatgaatagtgttattttatatgttagagacatggaaatagtgcgtcaaaatgagagaaaaagaaaaaactttgcccagtcgtaaaattttttccaaagttgcgattttcttgaaattttgcataaacacatattttaacccaacctataggatgatgctttgttttttgtcaaaatgctttttaactcgagatcggctcttcagtttttacaagggaaaatctcagcaaaatttttaaattagtggggttttttggcgttttgtccttaggcaatttttgtcaaaatgatgatacatgac

SEQ ID NO: 15667 - DNA, 1431 bp, Heterodera glycines
  unsure (1)..(1431): unsure at all n locations
atgccaaaatcttnntaccagctccaaaaatcanttaattgtagacccgcaaagttgatactaccgaaaatgtttcctttntaggatttcttatttggtcggtttgatcgaaggatttttcggtcgaagggcttcgtttaacttttgtgtgtccaatgcgatgaaaaatgacttggaacgccgctggggtgtgaatgctatcaccgtttatgaccgtccgccnaaattggttctccaagtaaatctgttagcattttcaaagtctttgatccatttttaagaaacacgagctccgaagaaaagataaaattcttgcattgctttacgtcggaaacactgagcggactcaccgagggtaagttgttttgctaatagttcattttatgcttacttaaattcaatttttagaatggaaatttgttcacgaagaagctgatggaactctcacgcttcgtgaaaatcgaccgtttctcgctgtttcttccacaaggtatgaatggaaggaataatgcaccaatccatcactgggagggaaggggtgctagagggctttagcccttcggacccgaagaaaataaaaatttttcattttccggcgacggtggggcgggggatagatcaaaattcaccttgggactttcacaatgaaccacttattgttagctggactcctgacgaagacttctccattctgcttgatgcgcttgtccgcctcgaccaacgaatggccgacgtggaaacacagaggacgtccaaaacacacccgaaaattgtggtggtcatcactggtaaagggccgcagaaggaattctacgaagaacgcattcggaataccaaatgggagaaagtgcgcattttcactgcttggttgtcggcggatgactatcccaaggttcccaccaatgcttagttttctatttactatttgccccttttcagtttctgtcctgtgccgaccttggagtttctcttcatacgtcgacctcgggtgaatagctgatgagtttggactcgtttaatttggtttccctaaggatttgatttaccgatgaaagtcgtggatatgctcggcagcggtgtccccgtgttggccaagaactttcccgccatcggtgaactcatcgatggaaccaatgggctcctctttgatacgcctgaagaattggaaaatcttttggccgacctttcgcttggatttcctggaaattcggttcttgtctattttctagtgatgctcgagaccaaaaatttcccgagaccgagactcgaccccgagactcgagacccaaaaccccgagaccaaaaaaacccgagacttttttcaaaaaatttttcttacacacttaaaaatcgaaaaaaatcaatcttttgagtttttttctcaaaattttttgtttttttccttatttaagctaccatactttttctttt

SEQ ID NO: 15668 - DNA, 2518 bp, Heterodera glycines
aagaattgtagcaggcggcatgaaaaatgccagaataaaattccttaaaagtaaacataataaataaaaaattattttttcattttttaacaagttaaagaaatagagtatggacgagagactgtgggttttggtgagaacagcagataggcttgagtaagacgagggataggcttaaaaatgactgacgcactgaccaatccgatgatggcaaaaatgacaattgcaaacagcaccaatagcccaattgaagcagtggtgccatcgcacacagaatggatttgagcacaacttgtagacctgagatttgaattttaattaatatattttatttcaaattaaaaccagggctggagacgtaactggattttaaataattagcgaaatacatatccttaattatgggattccaaaatgccctatttatgaattactaatccgtaaacatttattttttcatttatgtccaaatccaaaaaaaaacttgttagcatttgaaagttcttagacattagtcatcattttttgacgaaaaatagcaaattttaaaaataacattgggataattttttttatgaatttttggcccaaaaaaattcaaattccccccatctgaaaactttttttcctggctttgggcctgtcaaatttaaacaatttaattttctcaaataaaaaacgcactcggaatgccgctgacaatttttttttcttattcaagacccacgccgttgccttttgtcgtattgtttctgctgcccacccgcgcaagttggttttggtcgcgtccggttgagaacagcgtgcacttctcggtaaatgagcaaataaaaacgaaaatttcattcaaaaacttgtttttgacttatcatgaaaaatgggtccaaaaaaatcaattatttaaatcttggacagaattttgagaataattaatgtcctgttttgccaagtagcgccggtgccggcggataaattttagtttttttttttcaaaatttaaatatattactattaataattcacatttgttccaatagctttgcatcggcccacccttcccgaatcggacgcttgacaaaaaatggagacggcaacattcatcgcgatttgaggatggcgaagaagaagacatttgtgccgaccaatccaattggaccgtgcaacaatactgaacgagcaacaaaagcggcaacaatttgcattaattgaaaaggtttgtcgggggcgtgtaccatcattcggggtctgtgcccaaataaggaacaatttttctaaggaattgcggaaacaaaaatttttcgcgaggggatgggggggggaagggagcaggaaaaaatgtcaccggccgaaacctcgtcgcaaaaaaaaattcagaaaaaaaaattactactttttgtgatatcttataaaaactttttacagtttttttcttgaaagaattcaaagtttgaaaattttttaaagttttggcagcaaaattttgggtacatccgttttccatctgtccaaatcagtaattgtttttttttcattcttacttttccaggtccatctctttcccaaattccgcggcttcctcaaaagtgcgctgcccgaatggaccaacgaattgtgtgactgcaccacatgaaattcatcgtcttcgacgacactgttctcataaggttcgtttttctccattttttccccgatttaatgggtccgtatgtcataaatattgtaggaccgaccaaatccttttaaatttaaatagttaaaggttaaaaaaatttatgggtaagaaaaagaagaaagatttgacataatcattgattttgaaatttctggcaaaattctgactggaaattcgggaatagtacctccggtttcctaatattttgtttttggtttaaaaaaactaatatagtaaatcttcctgattcattagactttcgaatatttgttgttttttttttgattttcattttttttaaattttgccaccggttttttttttctaaaatctctcacaattttccagtgccaatttgtccgaccaaaactttgtcaaccattaagaatcgctatttgctgatcgagactgtccactgttgaccaacttcttcgtcgacctgttccgcctcgttgacaatccttccggcggatgaacgcgtcggaacagttttttggaaaaaactcagactcttggtaatttttttttttaattttctattcaaaattggataactatcaaaggaattattcccccaaaaaaccgctgggctgtcgcccatttgtccctccccaccgaaaaactgggaatgtgttggcaccgaatttttttttataaagctgtaaattatgcttacttggtctaccatgggagcaaaacaaaattttcaaaacgtttattatattttgaatttttgagtgaaagaattggtgttcccggtgatcctttttttgtcgtcgcaatctttccctatgacatttttaaaagaatatctgaaaatgtatgtataatgaatccggaatcatg

SEQ ID NO: 15669 - DNA, 1719 bp, Heterodera glycines
tccattttttaattataaattttcgttgtttacttttaacgctcgatcccgattgttcattaaatttttgttttaatattccactagtcctcgggtcgtttctcagtcgttgctctaaagcttttgtacctatgggtgatggagcattctcgggtgaccgtctcaatattcgctctaatgcttgattaacattactttttaaatatgccgttccatcagctctcagtatatgtcctttagagccaaccccaaatttctcagggtcattatttataattgacataatttttccttttttcttgactacaaaagacttttgtttttgacgaaatttacttgttccaacacgcattggtcttatcagtggtctcgtctttggtgttgatgttgttgactcagcatcactctcttcagcagtagtgtaagggtcttcaagtgttggaatagagcctgtttcatccaatccttcgtcattaacaatttgagtaggaattttgctatctctttcacgctgttttggtttaaacaccattaatgagccatctgaaagctcaacctttaccggtttttcttcaacttccttcctaagttttaagaaacgcctcaattcctggttataaagtaaattttttgaagtagcgtctaattttctctgcttcaaaagtgatgacaatttatttttagcattttcaacgttaatctcgccagactcaggctttaataaatttttgtacaagtcggaaggaacaagaataaatttattctccatattttaaggcggcaattaatactggtaatagtaatggagccaaattaacgaaaaaaccaccaccgttttgttgaaaaactttctttgcacccttctcagttctaactcttcctaattttcttacaaaatttgcgtatggtaaaagtctatatttttgtctcttcgtgagcgggaagtacccctttaatatattataactaatttcaattaataatgcaatttgttcactagtagcctctttaaatatttgttgtctctttttaaaagattttgtttttgtcaatttctttaaaaaatccaagttttgaataacatttttaggtaaactaatcattttgaatatacaatgctttttcttcatcttctttaaatatttttgtccgtattctcagcaaagggctcgaagctgggtgtaaatccaagaataaatatccatacggtgatgcggttgcatctttataggcacttaggaaaaatgtaagattttttggaaacagttgaacgcccaaattacgtatttgaagtgcagcattcggagcagacattaaaacaatatattgtgaattaattcgggctaccttcatctttttttcaaataaattttgggttatgaaaatcacacccatattaagatgatgagcttttttaatgaataattcagataggtttttctcatcaattattgttaaaaggtcatctagaattaataagagaggcttctttagagagctcagcaattcgtccctaggaggtcctttgtgcacgatgcactcccattttttgtagtacgaggaatactatcgattaaattgaccgtaacgataaagcactgattttgggtgtgggctaatcgattcgatctctttctctcgaaaattttagtaaaaatgttgttttacctgctactacgatggtcctactaattaccataccaaaaggcaaatttaatt

SEQ ID NO: 15670 - DNA, 1361 bp, Heterodera glycines
  unsure (1)..(1361): unsure at all n locations
gctccactacagattggagagtcttctttgaagaattgaaagacattataatttaccaaatttagttacaaaaccctgactatttttctccttaaatacctttttgtntggttaatttataccttttaatattaataatgccatatttttcaaatttatttctgaataaatattcaaatgaaaaatacaaatgtaaaattgaggatagaaaaatgataaaatgaaagactcttttgatagatttgaaggcatatcagaatttttagagttcccttaaaagtgagcaaatacacccagggaacggcttcacccttcggtccccaatcaaacactcactcaccaggctgcgcattacaataatgaacagctcgtccaccttcatctcagatggatggcctggagtgttagagaggatcaaccaggggtcattccgtcccaacatgggctttataaaagaagggaacaataagaaaactaatatacacagaaaaaaattatacaatcattttcgataaccaaattcgaggacttggaatgaatcattaataataccttttgtgaatatgggttgataatgctttgtgagggaatgagtaaacactttgccttggataagattaggacgaataaaatggggatatgtaacaattatggggtcagcggggtcatcggaaccataacgtaaaatttgctcttttactgtgtcataatggatcatttgcacagtttgtgcatcaagggtgaaccctcttattttcaaatcatactcaattccagcattgtctttccgttgaagtttcagtccgtagtttttgcagccagcactgatgaattccaaaatgtcgtggtctggtttttcgtccgtcagctcaccgaggtgtccctttcctgttggtagtgggtcgttgtcctcgggatgaacgtagatgatgctgtcggtgtcaaagtagagaatttcacatccgggggtgtcggccacttttttgagggcatcgtagaggtatagacgcgccattgatgttgtgaagagggagatgactacattggagtacttattttcgtcgacaaactcctcctttggtttgtaagtgagcatgaatacgtcgttgtcctcatccatcatttccaagtcgattagctcaatctttttgtcttcggtatactgatgaattaggctttcgtcgttgtcaattattgcttttgagagaaggttccgcatggagaagcggccccagagtgagttgaggcagagcttggcgatgtagcgcttcccaggctccgacttcatcttttctttgtcgagtttaatttgcaattcccccagcactcctcaatgtattcactcttctgctcttcgctct

SEQ ID NO: 15671 - DNA, 2911 bp, Heterodera glycines
ttcgacgattttcacgaataaatcaaaaggaaatgcggaccaaaacgatttaaaaatcgtttcacaaattttaaaaaattttcatcctcaccgcttcgtaacgaaaacaaaaaccattaatcctcgatcagtcaacgacatcgacgtcagctctctcgatcactcttcttcatttcgttttgtcttcctccgcttgctcccgttgttcctcctcccgcttaattagttggacaaggttttaaagccccttccatcaactcaccagcttcaattcgtcgagtctgccggtgtccagcagccaattcgagacgaaatgatgctccagctgctgtcgcatttgttcagagtccggcatcgtcttccaaagttgctcaagtcgccgccacacggaatgcaatgcctcatctcctgaaaaatcacaacatttaaaattgaacccaaaaaatgatatggtcccaccctgctcatccaaaagccccaaaaatcggtgttggcgcgcaaatggaacaaagtggtgaagcagaaaatgggcctttgtattttttgaaagaagggttcgcaccattggttgttcgtcgagaaatgccttgaactgatcaactgccgtctccagtccgtccaaatcacctggggacaatagatgggccttaaattaaaaaatatttacacaaaaaatgaagacaatcactttggtgaaaatttggattttccccaaatgtgccatcgtttggcaaattgttttgccccattccgtctcgaaaagggcctccatttgatcggcgtggacgaggattttccggatgctgttccccgtcatgtctcgctttctgaacgcttccctccttgcccctatccgtctgaagaatttctgggcgacttcggcattttctcccgcttccaactccttgatcagagcattttccgaggccttggaagacatagaacggagccaacagcatctgctcaaaattgatggacggcagcaatggtgcacaaacaatggccgtaaaatcgccttcatccgcttgtacgccttctgtgttccaagttgagcgagcagcaaaagcccatcctcagcgtccatcccctccttccgctccttgcccttctttggcgtgtagtgcgcgaatttgtgccggatatctcggtggatccggtacagagatgcgcggctcgcggaacgtgagcgatcacgatcgatgacgtccacaatttggtcgacgatgtcgcgcctggcgctgcgctgcagttcatccagtcttttcttcggtcatcctctgtttggtggtgctaaaatttaatgatcagattttatgaaattcaaaaaggaaaaatttcactcacttgttggtggtgccatcggtggtaccatgtgctcgtccagctgccgacgcagatcactgatcagcgcttctcgattgcgcacctgctcgcgcagaaatttgatggtgtcgtcccggtccttgagctgcttctccagttgttcgatgcgctctgatcgctcgtcaatggccagcggtggcggggtcgtctctccggtgtccattggcgcagttggtgttgtcgaaaaaggcaccaaatcgccgattggtgtgacagatgtcgacggcagtgaaaagccaaattacaaaatttcctcgtccatttccggcgtcggcactggtcctggagttgatggcggcggttccatcgcttcttcgacggatgcagcagatgttgacggccctgcttcgtcctgcggtggcatttcggcattgggattcggctgtggagcggctggaatacaaaaaaaaagatttttaagtaaaaaatggtgaaaaaattacttctcttggccaaataggcttgtctcgccttgaccgtttgcgcttgtcgctcctctcgcttgttccagcgcttttttacagattctctgccgattagcttacttaataattttctttttgccataaatacttaaagaatctatatttttatttattagcacaaaaaaaaactttctaattcgacctattttaatattaacttgacctattaaccgatgcagaattttttctctatcgatttgcaaaatttggtgtggatttaacaaacagaaaaaaagttaaacaggatgaagtgagtgttgtttttacacacattaaaataaagagatagtacgccaaagtgagagaaattataaagaaaaagagaaacgacgagatagtactaggcttttctctgcacagtggggcgaacccatagtgccgattcctcactatattctctattctttctctgtcttaaatctcttcctataacactctttctttagttgatttttctttattcttcatctttaacaccctctcacttttgtgttatctctctctccattttattttccgccaaaaatcatttaaaaaaattgctttaaattcgctaacaaagggaggtggccaagtgtccgtgggatctcggaatgagattttttgggtagatagagcttttgaaaaagagtattttgacttggcgttttgctcaaaatgtattaacaaaaatgcaataaatcgaagaatacacccatataaatcgaccgaaaattttcaaaaatatacccataagaaatgaaaaactttctcaaaaatctattatttttttgacaagaatttttgattttaaaaattatgtagtgctcaatctggtttggcttaatttgttgccttttgactaaaatttttcattttaactagagtgccacgggaccgggaccggccgggaattcccggtcatccgaggtcccggttcccggattttgaaaagctcaggtcccggtcccggtcccggtagggcaaccgggaaaaacaagcactggtaagaatgggggtatgagtgaaaaattagagatagagattagagtcaaaggaaaaaa

SEQ ID NO: 15672 - DNA, 1512 bp, Heterodera glycines
  unsure (1)..(1512): unsure at all n locations
ccccccccccccggatgcgccgcccgtaagattttccagtgcacttcctaatggtgcatgcgacgtaccgggcaaaaggcccggttcgtattggctcggtacactcgctcgtcgcttcgcttcgctccgctcctcgctcgcgcacctcgaggggcagggcacttcccgcctttattttattttattttaatttattttattttatttaaatttattttaatttattttattttattttattaaaatttattttaatttaatttattttattttattttaatttattttattttaatttattttattttattttattttattttattttaatttattttattttattttattttaatttattttattttattttaatttaatttatttaattttatttaatttaattttatattttcagaacaattttggcgttttccagaattttcagaactgttctggtgtgtttcagaattatcagaactatttggacgcttaccagaatttccagaattattctggtctgtaacataattatcagaattattctgaagcattccagaacaatcagaattgttctggtgtttaaactgtaaaaattgcatgcaaaaacacaaagtaaaacacaaagcaaaaaatgtgaaaatactcgaaaacacatgctaacatattgaaacacacgttaatgtaacgaaaacacacgtgaaatgttgaaaacgcaagcaaacgtgtcaaaaatacacgtaatcgtgaagaaaacacgtgaaaaaccggtaccggtttaaagaattcacgtcaaaaacgcacgtaaacgtgaagaaaacacgtgaaaaacatcaaaatccgtgaaattccggacattccggatgaatttgcaattgtaaacggattgtaaaccggaaggcgaaaacacaaaaaaaatcggcttttttcgacctttgccggggtataactttgttcgaatttgtcgcagagctacgaaatttttttctcacccttcctctcgacgagctctacaaattgttcgcttaccgcaaaagcgtagctcttacggttcctgagaaataaggtgaaaacacacattttacaacccatttttggccaattgtaaaaagccgggttttttttctttaacccaattttacaaaaaatttttgctggtgcgaattttttccacacgggccattttgtagagaaaaccgagctctttcgattggtaccggtcccgtggcgatccgttgagcccttaaggagagggaaatcgtttagtggttagcccccccgttatttttatatacagactaggcgtcccggtagatggctgcgctttatagaaagccgagcctatcccgtcgagttgtagccagtaacggggtagatgcgtcaggttgttagtgcagtagcagctcaggcgcagatgcgtatctggatgttagtgcagcagcagctnccggaagacagctgagcctacccggaaacccccatgcccgctaagtgacatctaaaagaattgat

SEQ ID NO: 15673 - DNA, 2600 bp, Heterodera glycines
cataaagcaaagcgtttttcgtcaaaaagaaattgtgcccatctttatcagagtccggcgcgggacgggaaaatctgttaataaatcgcacaaaaactttctccggcggtgcctatcggcggatccctctgttccaagttttttgaaaaaattgcgccgcaaaaaagcggttttgaaaagcaactaaatagtcaaatttatggaccattaacagatttgcttcccgatctatttttaccctctgacccattcgaaaaatcttagacgcccttttaatgcatcccgccagccctaaaaatttattgttcaaaacttcaggtattttttaatttttggaaattttttgaaatttaataaaaaaaaatttcgaattttccaaaatcccgcaatcccgcgcgggatcctgcaaattttaaatgcgggatttgcgggattaatcccgcgggatcccgtcccgcaaaaaattttgaattccaatcccgcagcgggatccgcacatttgaaatttccggtttctaatttttatacactggcaaaatgaattttctaaaagttttcgttttaaaagtttttttcgacccaaaaataaaaccccgtagtctgtaaaaactttcgggctacgggtccataaaaatctttgtgcggttttggccccattgattgggtcggatgctcaaaaaccggactcaaaaagcttaagaatccggaatggcttttaaaaaaaacattatttgttgaaaaaatttaataaatttgtttgacaatttttaatccgaatttataaaaatgtaagcgaaattagattttacagctaaatgaagggaaaacgcccaccggtttggccaaaattcgcattggcgccaaatgcctataaagtattataataatttttcatatctaaacaactaaataaatcgctcgaccccttgaacataaaaaaccttgatacttagggtgtaacataagtttccgcacaactttttttaaagaatttttttatgaatataaatttaaaaaaccacaatcatgatccgaaatatctgacattattattgagaatgagtttgctatttatcgggcaagggataaatcccattagaaaagtatttaaggagttagagttgataatgtaaaaatggtcattttcgaggtatgtatttttgatggctgatttaaagaaaatgaaaagagatacagaggcagagaaaacgtgagtaaatagagcaaagttaggactataaaaaattataagaaaaaaattttattacttcaaaaatgaattattggagggccgagtctaaaaatggtctccaaaaacggcatttttcaagaccatcaaataacaaaatgttttaaaagtggttttggaaattccgaatttaattaaactaagtaaattgaccacgctgagtccgaatatggctttagatttggtctctgggttctcaacaaacctgtacagctccaacttcatgcatggagttggagcagtataagctcagggttaaaagataggtcagatttaaggccatattcggattctactggtctaatttgtacagaaaaccttcttttttgttatatcaggttacttttttgaccataaaaaaatcgagaaaaattagtgggccaattttcaatttttgcatggtcgggaaaaaatactaaaaaattgaataagcaaataaaaaatgaaacaatggcatgaaatgaaagaagactttctgacgaacaaaataaaaaaagaattattaaaataactgcagaaattacggagttatgaatttttgaatttgtcaaaaaaaattgtgcggaaacttatgttacaccctatgtaggtccgcgtcttggtttgttttttttcattttcattattcacaatcatacacaataggcgattgaaaatgcattcattatgtataaattaattcaaaatgtccggagagaatttttttatgcctattttaacaattaggaactattttaaatttattaattatatttaacaactgaatattttatttatattttttaaaattaattttatttttatatcatttattatttttatttgatatttaaattttggcaatatgatttggtcgtcaataatgaaaacttaaatgcaattttaaaaaattcaaatttttaaatggtactcaaaagaccgcatattaacattttatcgttttcaataatactcatcatttaatgattaattatgttattaaagcaatatatattatcgagtccattgacaattcgagttgttattgggttttgatcagtttcatttattaattttttatttaatcatatttatttatattaaaaataaagaaaaactcaaaataaattttaaaacaagcatttaatattttacaaaaaattcaatgacaaaaaaaaataatgataaataaaaaatataatataactttattattcaaagcgttaacagccccgcaattataccacctagaaatttgaacagaaataatacgaaggtagtgctagaatattataccatatccaacaaagttttagtgaaggtgaacttttgcatgaagaattcgttaataatacgacttatcaaaaaaaaa

SEQ ID NO: 15674 - DNA, 2447 bp, Heterodera glycines
  unsure (1)..(2447): unsure at all n locations
taaaaccctgaaaaacttgctcattcacccaataaaattcgtttgttcccttttagtgtgtgataattaaacaatgggccgtttctcttcaacccttttgccttttatgttcgccgcctttttggttacgctgatcagcgaacatgccgatggcactggactaccgcagcagagttgctgttgtggaggcggaggcggtgggtgatgttgttgcggtggtagcggaggtggacttggcggattaagtttaggcggcggtggaggcggctgctgctgttgcggaggcgggggcgggggcggaggatgttgttgcggtggcggtggcggaggatgcggtggcggtggaggcccaatcatcgtcaattgtggcggaggaggaggaggctgcggtggcggaggcttcggctacggaggaggaggcggctgcggtggtggttgtggcggtggaggtggatgtggaggtggatgcggttgtggaggcggttacggacgaagaaaacgacgccaggtgtcttcccatttacaaattaaaagggcatttttggaaaaaatatttattttttggcagaaaaaattgcaataaaatattaagtttagtttttttttctttttgaaaaatttttttaattttttctcttttgtgtcgaagcatttctccttcaaaatattgttaaatttgaatatatttttccattttgttttgtaaagcttgctgcccaaacgaattacaagtcgagcgactcgccatgtcctcaaaatgactggaaggaactcatggaacaagtgattaatttctttttaattcttgagttaatcaaaatgaataatgcaaaaggcatagaaattttcctttccttgcatttttcaattttcgagaaattcgtaccaaggcccaataatctgtgggcatgttttgcctccatgtttttaagccatgcaaaattttccgcagagcatctcatcagaggactcggtccgctcggtaaaagccatccaaaacgggctgttcagacggtactccgggcgcaagttcctggtgacctgcgcaaccgcggcaaacgaagactctgccgccggtgccgaaatggcggcgacgagcgccgccaccgctgccgccgacccatcagcagcgaataaagtgcacttcagctccgccgggaacaactactgcaacgtggtgaaggagcgcgtgtggtgccaggcggtgtcgatcagtgcgtgagcaaagcgatcggaaaaaagtgatcagaggaggaggaagaagaaggaaaatgcaaaatgatgatcagcaacacctcacaattgatattataataagtttttaattaaaaaaaaaatatatattaattacagttaattgcatcgcttttgtcagttctttgttaggataattattataaattttccatgtgtaagtgtaaaatcgtatgtgtgcaaaatgagtttgatcagagatggtgtcatttgaatttaaaaaaaacatctcgtcagttgtgatgcgttcttgttaggactcaacctcttggataatgtgcgctaaaagtggtaaaaaatgagcaatgcacttttttggtcacagtttttgaaaccttatgaattttaagaaatttggagtttataaaggacattggctaccgctaatgccaaatttgcttaatttatttgcttcagagaaatattttacgatttgtcaaaaaactcgaaatggcgaattttatgaaagctcaaaagtaggacaaaatttttcgtgatattgaacactaatttaagtaacaatttataagtgccgcagaataaaaagtgtaaaattttttaaccctttttatgaaatatttaaatgtcgttcttaattttcaaattcttttaattggaaaacttacattttgtattgtctttcttcattttagacagggctcccagatctgaggctntagcctcattttgtggtttttgataggtcaatgaggctacattttcaaaatgaggctttgaggctttttgtggttttttgagaaattttgaggatttttaggcttttggggaaaatcgtaagtctgtttaattttatgattaattttgataaattggcataatgtttgacagtcatttaatttgaattttgctttttatagagtatcaaacggaaatctcacccaaatttagccagaaaattacaattttttcgaaaatccacaaaattatgaattttttaaatgaaaagctgctaaaaatatagtcaaaattctcaatttttcccccggcggcgcctatcggcaccactggaccctaaaaagccttttttaatttgctcaaaatttggccatttttgtggacaaatctgttaactattcacattaaaaatttaaaaattttcccggcggcgcctatcgacaccgccggaccccccttttttacaaaaattttttggaaaaagcgccgcaaaaaaa

SEQ ID NO: 15675 - DNA, 3948 bp, Heterodera glycines
aaccaaatatttttgaaaatgaaaataattttttaaaacttttattgtaaagaaaattagatgaaaagccaaaaataattattcaacgacaagtgattataaaaaatgaaaaagacaagaaattacagaataaaatgtcacaacagacggacatggccaagttcgagcagttcctccacacagtgaaagggaagcatgtgccgtgtgcctttgtccaatgtgacgagcaaatccgcatttgggtcgtttagactcggcaccgggatacggtccaactgcaaaaaatcgcacttacaatcatacaaaacttcaaagtattaggatgtttttgacaaatgaactatcaatttatgcccattaattggggtgggtatcccgcgagaccacccactgacattgtctttgagcacttcgacaaacacccgctgggagtgggcggagagtgagtgcggcaccggcacgtgctgcatgctggcgggaaggtgcgagagaaaggcgtcccgcagcagtgtgttgtttgcgctcaacagtcgctgggcgaactgcacctcacgcgcctccaatagcgcgggctgttccggcacgcgcccgcccgctcgtcgcgcctgcagcgcccgcctaatgcgctccgaatggtcgcgcaaagcgagtgccgggttctgttcaatttttcttagtcgaactctgaaaatgaatctaagtaatattttgtccaattttcgaatttccacctcaaataggaatttacaatgtgttccgtccggtaaagttccatccgatgggctgagcacgtcaaactgtttttgctcgagctggccattatgattttgtcaatgtgtcccatttgcgctaccattttgtctgccatttccaacttttcgggcaaaagtttgggggccgccaattcgtcaagaaatgcgcgggtgagttctttgaggagctgaaacagatgagtccaacttcgccccccccaccctttgcccacctccgccaccgtccaataatcgtcggcgtcgtcgtcgccaccgccgtcccttgcgttctcattttcattatcttccgcctctccgtttccatcgtcggccatgtccaacaaaatgccaatggacagtcaaaacaaaggccaactttgacgctgacaaatgaaaaacagaattttttgaaacaactgataaaaacagattggacttggattcttccggcacttaatgtaaaaattcagagaattcgatgaaaattttattaaaagaggtcaaaggataaatcattaaattacaagcaaacaattagtcggaccaaatttagattaggaatagagatcagccaaagcatgacacccaatttcatttgaaaattttgttttttaagagaagttttatagatctctatttttattggcggggattgataaaagtgagaatttaaaacaaatattggttgcagccattgtcaaaaagagaaaaagcaagtcacttccgactttcttttccatcattttcatcgtcagcattctttgttgctctctaaaagtttaatgaaatattaatacatttgaactaaaaagatccatttttggttttattgcatttgtttatatcgtaacacaaaaattgccatccgggaacgcaatactttttcaaaatgtccctctcctccccctcctcaccctgatgcattggcggtgtcgcactcgtcgcgtccgctgcagtttgaactattccaccagttggtccttgatgatgttgttgttgttgatggtgatgaacactgccggcaccgacaatcatttcttgcggttgttgtggtccagcggatggcggaagacccatcggttgaggcggcggcggttggccctgcagagaatgctgagtgtgagaaagccgcgcataatactgaaataaaattttacatccccataatttacattgttttctttacttgggattgtccaggagttgggtaatgctgtggctgttgttgaggtgccgacgttggcggagggccatacgacgcgtacggtggttgttgaccgtagcgatgctgcggcggtggttgtccagccgagccggcgtaataatcgtactgaaaataacataattagatagcaaaaacacatttgtaaaacctgaggaggatagttggcgatgggtcgccccggtggtcccaccgcttgcggtgactgtccgtactgcgcgggtggttgtgccgcacgtgacacgcttccgtagtagtgctgaggtggtggggccgcttgtggcgggaaggcctgtggcggtgggtatgtggcagtcgcattgtgcggaggcggcgcgtacgactgattgtgaaccggcgggggatacgcagacggtggcgggtaataggcggtagacagaggcggttgggctgaaatccaacaaagttctcataatctatgtttcagggcaaacatgagataaaagaaaatcttattcactgcttaaacaattacaatattgtggttgttggccttgagctggcggtggtggcatttgttgttgtggtggaattgaaggtggtgctgatgtcggtggctgttgcggtgcgtagggagcggctgtactgcttgccgtcgcgtgcggagacggtgctggaggcgccgccgcaatgggcgcagtgtttggcgtcgaagtcgtagccgcagcagtggaaacttccgctgcagtattagtggccaaagtcaaagggggctgaggaggagcaacaacggagccccattgacggaggaacaaccgtagccagaatcatctgcaaatgaaaaattacccaacatatcgaaatatttgcaggataaagaaagggtcattggacaatgtctcaccactagctggtggtggtactggttgagtttgttgtggaggcaccgatacgggcggaagcggctgttgagctgcttgaacggacggcgggggctgtgcttttgcagcggattgagacggcggaatgccggccggtgcgaccaccgcttgtggctgcgtgggattgctaacctgcaacataatgcgtgcccattcttctaattcaagcggtgttaagtttaatgatacttcaaatcccggtggtaatattgtcggcattcgtccatcatttgtcagttggtgttgtgcatctgaccgtgctcgttgttccaaatagcgaagttggtccaaatggaatgcttgtcgttctgcaatcagctgctgacgctgggcctccaactgaaaatttggggaggggagagagaataaaactccaattagaaaaaactcgccgtttctctttcccggtccatcaattgctccaactcctcaaagtgctttaacttcagttcgaactaaacatttggtttacgttgaacaataattaaaccattcaaatgccacttttttcatttgcgcttccacgagttgtgccaccaatgctttcattcgcttctcctccacccccaccaaatatttcgcttttgttgccgccgctccgagtgccgttgctgccgccacttggatggcttccgtcgtcatttccttcgcctctctcacaaccgcctcttccttgtccttttctgctcctccactttcttcggtattctcgtgttgttgttcatcggtgtccattttctcctcctgctgattctttgctgcctccgtttggcttatttctccgttttctaattttgccgtttcccgtgtgtttttctgctccgatttttggctctcatcggactaaaattaaaacattcattcaaatttaaaacttcaaaaatcctacctttgtgaatgttccgattgcagaaagtccgacttcgccgtccaattcttcggtctctttggcatgcgattcaatgttctttctgtgcgctttctccaacagtggcgggatgtcgtctctcatttttccgaaattctctgcagattaaacataatttatataaatttcgatcctaacctaaag

SEQ ID NO: 15676 - DNA, 1374 bp, Heterodera glycines
tccccctaataatagaccacacatcaccactcaaattgcgtctgcaagacgtatcggacaaaaatcaaaatggatttagccgatatgtgtcgatcatgaagttgcgatacgcaatgtaactaaagggcctcaattctttaatcttcaaagtcaagtttacgtttcaggtgttttgcttttgttgcgtccattgaagaagtcgggatgtgcctgcttttcgatttgatgaattgcattgtaatcgaaccaagcggaataggacggcacaataatgtaatgggtctgcggttcgactgtcgaagataaattcgtttgggttgggtcgagctgattagcagccggtccatcatcatccaattcagttagtttttgctgctttgaatagccaatttctatatctttgtcctttgctaaatttttaattattagttgcaatgaaatttggtggaaattcaaaagcatgaaccgaaacaaaaattacttttaattatggcggaaggagtgagtgtaagacgactgttttcgtcatcatcaatccggtcaagatcaactgattcggccacttccgatccttcttctctctttcgtttaaacccccttcaatagaaacattatgatatttgttaagaacattatgatatttgttaagatagaacatataaaataattactttggtggcatttggtcgttgcaaaatcaatgcaaatgatggtactttgttaaaagtttctttagctaaaatttataaaatgaaaattaaaatcatgacactaaaaaactcataaataggtaaattatatttgtcaaatagaaagatcggcaagaaagaaagaaaagcacggtatgttgccgataagagaaggaggaggtaatgctaaccagagaccgagatagatttcaaaatgccggacttgactgattttttcagaagcaaccggtttccgaacccggtctctcaaaatctgtaatccaaaaaaccggtcaatccaaatttttctaaaaatcgctggactggcttccggatccagtaaaaaccggtaccgggcccggtcctatctattatactaattgggtgtgtcattccgtgtttttttgccttttttgagcggaaaaacagattatttattggcacgaaagattttgcaatttctctctccttcccttttctttctttgttattgctcacatgcacactcgattaagacaccaaacaacaaaaagagtttgttattgacacaccgtgcattttcaaaagcaaaaacaatttttcttatgaaataactttgattgaatattcttctaaagcgaaagcttttattttctttccaaaaaaagaattttccttttcctttattctgtatttgctctaaaaa

SEQ ID NO: 15677 - DNA, 3821 bp, Heterodera glycines
cttcaaaatgccaatcattatcttcttcactccaattttcccttgataattgttgatttcggcttcttctaataactttgtctcactctttccaaagatcgctctgtccctttctttccgatgatcaatttctcccttttatgttttccgatcactctgtcccctcactcctttcctcttttctaatcagtgttgtgtctccccccccttttttttctctgccggtctctctgtccctttctttccgatgatcatttcccccttttctgttttccgatcactctgtcaaatttcctcttttctaattaattgcccctttttctctgcctgtctctctatccttatcttccactgatcactttgtacttcctcctctgatcactccccatcttctgatcacttttcccctcactcaatggcgtcgttccgttccctccgcagtttttccattaatctttcacattccgaatttgtcattgcatttttcagcttcgcttcatgtagtgcttgtgcgaatttgtctcgttctctcaatgcttcttcgtaattttcgcgaccttcgcttagttccgcgtctttcctctcaatttccgtctccaaatgagtccgttgggccatcagctaaacttatcatattatataattattaattgctgtcacgttacctcacatgaccgcgccctttctgcttcgaattcggcttccgctcgcgcgcgtgcctttctttgcgcttccgccagcgttgtcatttcgtcctccactcgcttcgctctcgcgtgtgcctcgcgttccgcctcgtcggcacgcgtgtgttccctgatcagttccgtttcgcggcattccgccattttacgcgtctcctgcatctcggcatgcaattggtccacctcgcgacggtgttgcgttcgttcgtcagcccattctgcttctcgccgggacatctctcgcaacgattctctgtttttaagggtttcgtccgattgtccgtccgtctgcaccttttctctgccgcgtgctcttctcgcctttcgcgttctttcgcttccattttttcctccataagtgtcctttgagcttcccatcggtgcttttccgcgtcaatggcttttcgtacggcggacggaagactttccggcgcagaaattgcctaaagcgctgaattaggaaaagaattgcaggcaatccagtaccggcactcccaaaattgtccaaatttggctttgtgtgcgttcgatcgtcgcccgccgcgtctctgactcatcgaggcgaagttcggaggagaagcgcaactcggccaactgaacgtgggatgcatttcgaggttctcaagtgtccaaaatgccttcgtcttttgctcctccaaaagtgcgcatcgctttcgcaactcttcggtttcggcattccctctccgattggccattaaatgtaccaattctctgcgtgtccgtcgtgccaatgtcaccgccagtcgttccgtcagttcattccctaggaattcatttttggtccattttctcttcgaatttccttatttctcaccaaaattcgcaaattcgtccgctgtttccgttcggtattccatcaatttttgtctcagtttagccaattccgtctttattttaggccattttcgtgcttcgttcgttttctcgtgcggactttgccggaaatgggccaaaagggtttggctggccaatgcctgcaaatgctccaattgcttctcgagctgaccaattcgaacactgtcgcattggggaggggggcgggtgcatttagtgcctaattaatgtctttttcaacccaaattcggcattatttggcccctccgtcgttggccgtgccccccacgaagtgtttggcctttggtgccgaagtgaaacatggctgtattttaattttattttcaattaatttatttgcttcattttcttttaccgctccgtttcttctgatcgtgccgacgaatttggcggtgaatgactccgcgcgcttcgccaattcgcgtgccgaaggcgcgaacgaagcaactgaaaggcaataaaagaaagcacggggttctcctttccgtcccttttctcgcctgctcttggacatgctcaagaatcgctttttgttttcgttgttccctaaaaaaggaaacaaaaaaatttaattatttaatttatttatttttttgacctgagtccggcctcaattcgacgtcgagtgaaccaaaggtcggaggaaatttgctgcaattcgctgatgccaaaggatgaaaatctgtagaaaacgatttgggaatttccaaggagtgatcgcctctctgatcactgagtgatcggaaagtgagtgatctgtcccttcctttacctttgcgaattcgaggggcgttcgtccgtttcgccaatattttccaccaaatttggcaccgacattaccttcctgcgctaaaatgaataatttaattattaaattgaagcaattcttgagaatgcgaccaaatcgacgaaaccgacggaaggcgtgaagagcaacattggcattggcacgggcactgacccggggagattcgcgcgcgggcggaggtcgtgcgagggtcgtgaaacggaagcaagacaaatcgtcggcaacggcacaacattcgccttcgacccctgcgggcatttgaggaaaaatgggcattccccggggggcgactcgtccgtctctatggctaccatcgcaagcgatgcgatggcccttcaatcgctgaagtgttgcccatccatccccggctcattagctaataaaacacagtgaccatttcgggggaggggaaagcgaattcattgggaaaattaaaaaatgaaagggaaagcgatggaattaatttttaaaaaataaaataataaccgattagcccacccaatgcttacattggccttccgcgagaacaattccctctcttccgccgacttttccctcggagattcgcccacaaatttttttttaattcgttgcgatggcaaaagtgaaaacaaaaggacagaaagaagaagtaggacaatgatcggaagaacaccgttaagtgattgggggaagaaaagaaaatgggccaaagaattaattgaaagggacggagaaaagggggagcagagaggggaaaaggcggaagagagtgtgcagaatgaagagacagcagacattggaacagaaagagggacagcacattttggagcagttcaaaagagagcgggagagaaaaagagggtgcagacagtggaagagggacgacacattttggagcagttcaaaagagagcaggagagaaaaagagggtgcagacagtggaagagggacagcacattttggagcagttcaaaagagagcggaagaggaaaagagggtgcagacagtggaagagggacagcacattttgtagcagttcagaagagaggggaagagaaaaagagggtgcagacagtggaagagggacagcacattttgtagcagttcagaagagaggggaagagaaaaagagggtgcagacagtggaagatttgtctttttttttctaaattttaatttctgtaagaaacttacaaccattaaaatcccagcgaaattttaacgagtcgcgagagaattacgcggactgagaaatgggggggggaatgaccacatgtggtgaccaccacagtaaatgcgaagaaaagggcaatttggggagaagggctggcgcaaaatgcaaaaatggggggcggcgcgagagaatcgataggcaaaggaaattcggaggaagagaaagggaaaagggaagagtggccaaataatgaaggaaattcatgaaaaaacggata

SEQ ID NO: 15678 - DNA, 970 bp, Heterodera glycines
agattaaggcgattgcagaaatgcccgtccctacccatttttgtgagcttcgatcatttttgggaatggttaatcatctttagcgatttgtgtaagacaaagaaatttcgtcgatatgtgtggtgcatccggtttgacattattatatatgcgcatgtatggaaataaaatttttttagtggtatttttgggaaagaaaatccccgaaaagtgtgaaatagccacaaaatgacataaaaattactttttttgatgtttttagggaacattttcatacttattttttcttttgaagttttcaaaatatggacaaaaatatttgccgaaattttgaatttttttttgaggatttccaaaaatttcagaacaaaatactcaaaatatgtgaagaaaatgaaaatatatatgaaaaaaatccaaaatatgtagaaatatgtaagaaaatcccgaaatatggataaaaaccacgaatatatgtaaaaatatgtaaataaaagtcccgatttttgttcgcaaagacaaaaaagaaagtggttttcctgctatttagagcaaggagaagctaggaaaaaaatatgtatttacataaaattggcagccctaataccgtatatgctctaattatagcccagtctctattaataccgcagtctccaattatcccccccccctttctgaggagtttaaaaaataatcacccagtctccatttatcccccatgggggataaatagaatttgagaacattgtttgacactaattatttctgaaaaacaaaaaaattttcccagcaaattggttgataatttgcgggaaccgtgttgacccacacatagggcttgagcttatgatcattggttggtgggtttttgtagtgaagaccggacaactggggggtcggaggggatccccgagtccgggataccgacggaaccccgatcccccatcaatccccgaacattttggtaaaa

SEQ ID NO: 15679 - DNA, 1669 bp, Heterodera glycines
tccaggtcccggcttttcgactcccggcaattccccacccgattctgttcagaattccgggtctcgtgcaattaattctagttcaaataatgaatttgtaaagaaaaagagtaacaattcataattgacattgcaggcatatgaattcaaatcctcaaaactaccgtatgtcgcattttacaagaagttctgattcactgatccattttctgatcacggaaaaatgcaatttgttcagttggttgcatcattagcagcaggaacgggaaggtcgttctgtcatgtgttcgttcgtccgtcgatttgaccccccggggggtacaaaacaaagcaccaccaattttcaaagataaagaaacataagaacagccgaggataacaacaataaaatcacataatattcataatctttggttgcaaaatgcaaaaacaatcagcccccggcttttaccatttacgggattttaaaaatactttcattcgtgctcaatggatttaaatttcaaccgatccttgttttgtaataaatttataaatttcgcagatgataagcaaaagttttcccgtttcaaatcacatttatcacatttactttctgatcaattcaagattcaaattctcagtctctccgtgtttaagcctaagccaaggcctagcctaaagcttctaagcaattgtacgagttgtctgtgtacaagttgtcacgacacccgaaagaaactgttaaattttaaaaaatttaatagtttattttgaaccaagataaatattttagtttatttgtttcattatttttcaatttttatagtttttgtaaattctcgtaaagctgagttgtcctcagctgactgatcctgtcgcgtccatattaaccggtccatttgaaaccaaaaacaacgattggcttatttgaaaataattggagtttaacttttgcttatatgaaatgagaaaccaattttaaatttttaaaaatattttttaacttttgttttgaattttttgtttccttgtaatgtccggttcccggtcccgaatgaaaatccaggtcccggcttttcgactcccggcaattccccacccgattctgctcagaattccgggtctcgtgcaattaattctagttcaaataatgaatttgtaaagaaaaagagtaacaattcataattgacattgcaggcatatgaattcaaatcctcaaaactaccgtatgtcgcattttacaagaagttctgattcactgatccattttctgatcacggaaaaatgcaatttgttcagttggttgcatcattagcagcaggaacgggaaggtcgttctgtcatgtgttcgttcgtccgtcgatttgaccccccggggggtacaaaacaaagcaccaccaattttcaaagataaagaaacataagaacagccgaggataacaacaataaaatcacataatattcataatctttggttgcaaaatgcaaaaacaatcagcccccggcttttaccatttacgggattttaaaaatactttcattcatgctcaatggttttaaatttcaaccgatccttgttttgtaataaatttataaatttcgcagatgataagcaaaagttttcccgtttcaaatcacatttatcacatttactttctgatcattcaagattcaaattctcagtctc

SEQ ID NO: 15680 - DNA, 4113 bp, Heterodera glycines
  unsure (1)..(4113): unsure at all n locations
tttcaggcccatgcgttgtgccaaggaaaaaattgtgcaaagacagcgatggatttgaaaatgggggaaacggcgtaaagaaacgcgaagtgccggagggatgtttaagcctttcaaaattcgaacaaaatgccaaaagtgaagggaatgaacaaatgggagcaaatggaacggacaaagcgatgaacaaaagcaatgaaaacggcataaatgccaacggaacggaggagggaaacagcggcgaagtcagtgccaaagaaatcgccgactttttcaacagctaaaaatgggaccaaattgtgaaggagaagaagagattcctttaaatcattccaatatcgcattttaattttcccttttgcttttttgcatttaaaaaattaaaattaaaatttatgttttcggtgtttggccggataaacatggccaaatctccccccccccccttcttccctctttacccatagattttacgagttaatctctgccgtatttgtcggcctatccttttggcgctgtgtttgtccaaattcttagctttcccctgcccgagtggccttttgcttccggccggtagagagaggtcaatggcgaattggcggaggtgggcctccccgggggttaagggctcggggataagggctgatctctcacctttgtgttccgcccccttcccctccgggccctccttttttgcttaattcacatacaatattttggcctttattttttattttttgccaatttataaatggcccatcgcaaaattcggtcaatcaacggcttaatgtttttggaacaagtaattgaaagtgagctgagtgccattgtttttttgttgcaattgccaggcctttgcgttctgcgccgtttttgttgctgtgcaaagtgccaccgtaccactcgttgaacaaacgctaccgtaccagcagatgttgggccatccaatccatggcgaaagatgcgacccaaaaacggacggacaaatgtttccgattggcgacgctttagcgagtgacaaattcctttactgccatcgcgaaaaaaggtgaaggcaaactgagcaatgccttctgtttgggcatttgtccattcaattgaccgtttggcaccgaaaagaaaaggacgaccgaaatgactcatccaaaaaaggataattgccccatttaaattattccaattaaaaaagaaatgccttcatttccgacagagtttatgacattggtttttgcgttggcaattcgttcgatccgataaagcgaaaatgcattgccaaaacaacaacaattcacgtggaggaaggcgaaacgacgacaaacggagcacaagtgacaacaaaaggggattattcagcagcaaaaggcattttaaaattaatttattaatttatttattattttcccaaagtgccgacatttttgaaaatattttccaaagccacaaaacatcggaaagtcccctcgtcggaacaaaaaatgaccggacagcgaatccgcgaatttttgccgaaaaacaccgaagctggcattagcactaacataaagacacggaaagcgaacagttcaaagaaagcgatagaaacgaatgttcaaaaattggcccaaaatgacgacgaaaaaagggacgaaatttcaaaggatggaagggacgtgaaaatattaatcaaaatgagaaggaattcatcggaaaacgttgaacaatttggaaaaaaagacaacatcaatgggccaaagaaatgccaaaaatggaaaatcggaaaataaaattgaggaaagcaaagtgcggcatttgggtattgactttctaaaaattgagattaataaaactaaattattctctgctcattttcagtcgtttgttctgacggttcgttgccattcggcgacaacaacggccattcccaccgctgttttcccgaccacgggcacaacccattcaggcactttccaaaacaatgccaacgcattggcagggactgtccaggatttagcacttttgggagttcgggataactcgctggggatttagcccttttcggttttatgcattatcgcatttttttaaatttaaaaaataatttatatagactgataaattcaatagaatattaaacaattaggaaatattgtaaaaccaattttttattaaagcgaacaattacaattgaaagattttgatcattactcaaaaacgctgatgaattgtccactgacggattgtccggatcccccgcgtatccaccgccccttccccttgggctttccctgcgcatttggcattggcaacgctctcattctgtgccgtcccctcgtcgttcagttcgttcgcctgtcccttctcctatcgttgcgagttcagctccatgctgcgcacccaccagtgctgccccgaattggtggacaaatcaaaattatttgaggaggaaaattgggcggaggacggagaagggaccacgggggagcagcaaagcgaacgaaggcccaatttggtggggagaaatgcaaattgggaggccaaatggacgcacaattctcttaaggaattcgacggcgcatgccctgcggcacattttcttcgaatccatccgaagaatggttttaagcactcatttcaaatgccaactttccattctcctcaggccaaccgaccctttgctcgccgggttggctcattctgaccggccacggcggttgtcctccgttctcaaaatgcgtctatagccctccgctgctccaattcgtttgctgtcaaccgaacaatttgttaaaggcaatggaaaacgaattgaaaggccaaagttacgccctttacccgccattaggtcagaacggagggattttcatcaattacataattagcgaaacttaagggatttttccggcgcagtcgggttgcatcgacgatggccaatgccaaatgagattccctggggcgaaatgccaaaattgggtgtgcatttgcccgcgaaggactcagtgcatacaaaggacgatgcggtaggtaattaaagacacaatntaatcaattttccacagttattaattgtcncaacggatattccgccgatctcaatggaatttgcacgacaaaagaagcttttgagcagaaactgcaaaagaatccggcattttttcaaggaaatgattgattcagtgcatcactttttgtttttaagtattggaagatccaaaattgtatttttttttctttaattttttctcttaattttatcccaattaacccgaaatacaaaaaaaaagcgaaagtgaaggtcgatttccttaaattacaacaattaacagttcgtttccattaatgtttctctcctccgactcttttcactttccccgtttcattttcccttcgaattcttttgccaatgagctgagtttgagtgccgcataatccataagttcggccctttccgaatttgaaatataaccgaaattctcaaaattggcacaatgcaaaatgaaatttgtcacgaggccctttctgatcgtgagcagttcctttccgtgcgtatcgatgaaacgtttctgtaaattttaaacaattaaaaaatttaatctaaaacttaagagacaaagcaaagcagattaaaaatgatagagaatttaagcactaaaattattattacattaaattccaaaaaataattaaattcactcaccaaaagagcaaaaagctgacaaactccgagttggcggtttgttctcttcccaatgaatccgttccacaggaggaagaaagccttctcctttctggtcacatccgtaaattggttgagtcccttacgaaattaattaaaataattgaagttaattattattccaatcgccctgctcactattcggtgaatgccgctcatccattcgtggaaattgtccactaaaattcttgggatttttttgaattttatcccaaaaaatcattagtctttccgtccatcgcttacctccgtaaaggttttgaaacggcgggtccttaagttccgtatatttcggctcattgaacggcaaaatgcctttgaaactaaaaatttgcaatgttaaagcaattaacgaccattttgcctttccctcttgaattccaactaaaaagccattcccg

SEQ ID NO: 15681 - DNA, 3642 bp, Heterodera glycines
aaaaatgcatattttttattgttgttcgttgtatcacctctactccaagtttgccaaatttcgaaaaaattctcattacaaaaaaagaaatgttcgcaaaaaaatgacgaaaatatttattgaaaatgccaaaatgacgacgaaaactcaaatttttcgtgttttgtggggtgtaatttttaaaaatttccaaaaagttgatctttaggggtgtatttttcgtttttttttcatttttcttgtgaaaatttccaaaaaatggccaaaatatggactaaaaacccaaaaatggcgaaatatggatttattcccgaaaacccccaaaatatggatttatatggactaaaaaccttcaccaaatcaaaaaattttaacgcagaaatgctatttttaagcccctttcttcatagcatatgcgcagaaaaaatatgttaatccatataatttacaaccctactcatatcttctgaaaatagtgttataaatttgaatggaatttttgcatttttcactcgtaaaaacattttccctaataattagagaagtgatttgattaaatatatcttaacccactcgtcaaacaaatgaatgatgtgccggttgtgcttgattttacggaacacctctaaaaattgttgctcccttttcaaatcttctagcacatcggctggcaacaactccaacatgatcgatttgatgataacacattggtttatcggcttcccatcaatgtcaaccgcatttaagggacttgcatgaaagacctaatcaagcggaaagttaaaataattcaaaatttaaaaaatggtaatgaaagctaaattcaattctatttggcctaggaaatttcgtattgatttaattgatttctaagtaaatttataaatttattacaataattttctaacaaataaattcaaaaattgcagttttgcaatggactgcgatttttgggcacaaaaaatcgcgaaataggcacctaaaaaggcagaaaaaacgcaaaataggcaaataaaatttttaaggatttttagggagcaaaacacataaaaatttaatcaaaaaattaatttagattatatatcaatttaaataaattattaaatattctgtaatttcgaataagaacaattttgccttagtattaaacataaaaagcacaaataggtaaaaataggaattctaaaagtcaccataaaaaccccaaaccaagcgaaaaacgcgttttttgtgcttatctgtgcgtatcaagtgcaaaaattttaggcatttgcctaaaaatcgcagccctattaataatatgtaaaaataaaattttataaaatgactcttgaagttgctcctccgcttattggctccgggaacacgtaatattcattaattttggtttgagctgaattttgaatacgcaaaattttcattgcaccaatggaaaatttgttgcatttatccatttcatcgagtaattcttcagcgtttggattgggctccaaatccaagaaatttccttgtttcaacattgtgatcatctttgttggattatccacagcaagactaaaattaaatatgatttgaaattaagcgaaagacgaagtcaaacatttgctatttttgctatttttgaaatttttaattgttattatgtctcgaaattcaagatatttgattatgatagattaacttgccaaaaagtaaaaaaggattgatcaacaggtatagcgatttaaacacgagactttgcttacttggtggggccggaatttcggtcggcagggatcaaatattttttttgctcctcaatttgctccctaaaactgcctactgcttttaagctaccctcatgaacgcccaaaatagggccgtttcgtcggaatgatgcgctgggacttggcttcggcggcaatggtggcaacggtggcttttttgttttttgattggaatacattcgtgccaaacttttttttgacgtcgcattatcaagcgatggcattcgggaggtcatgcgaaatgattttgtccttatattaatatttgacaaaaaatttgggtctggctgttttggtggtgaacaggaaaatttaaaaaattttgatattccatgatgcttttcttgtggatacgattttgacaatgctaattgccccgaagcttttggcaccgcaaccaatgaacttttgctgccaacttttggcgactttatactaagtgccattgatgttgatggagtgccaatgttggttgcgtgactagcgaaagattttgaagaatggctcgattttgataaaaaattgtcattgttgccacttttctgctgattgtcctttgccgaagtttcgtcaagctcagccatcattaactgtcttatatttcctccaatcggggactgatcttgcttgtcagccacttgatgctcattaggctccttcatgtcgacatcaccggcgattgggatttccttggtcttcgaatctgcctgataattcgttctattgattggtattgtaatcgaatttgtcataggtttatcatctcctgatccttcagtgatcggaatttccgtcgttacctgatcaggatcatgtcgagaagtgagattagtgattggaatttgaagttgctccacaaaatgttttgcatcttgaatttttaatgtttttgttgattgatggcttggattttctcgttcactttggtcctcttctgttacatttaccagaccaattggaccgatttgaaattttgttgatgtcttctcagtttttttgtccgtatgtttttcatttgttgcattaatttggcagcatcccaaaaacaaaatcaacagcaaatgaagtgatactttatcaaatcttttgactcgttttaaaaatttatacatctaaaatttaattaattttaatatacataaaagcaaaaaaatattattttaaaaataaaatagtaatgcaataaattaaataaaatgaaaaaataaaatttgaaaatgtcctttgtaattgtttaaaatagaaattatagcagcataagcattgcgtgtcattttgtgaagccctaatttggcatgtgatttttataaattgtgcacttttcaatgctcatctgtctattgtggcaaatgactgaatcattgatttacccaaaatttattgaaataagcaaataaaatataataatttggcatattttaaaaaaaatgattgtacggtgattgtcagtgtaatagttttatgcaattttttacgaaaaaaaggaaatttcaattagaatttacaacaaaatgcagtgatcccaaattctttaaaatgttcagtcaaggaatgtactgggccgggctcacccaaaaaagtaatcgggacgctgtaaaccttttagtctccttgagctccgcctacaatttttggttttgtccaacaatttataattaaaattttatgtgacgtagaagagactcgaaccttatctattattataaaaaaagacccgttaaaacaaatattttgcgaagattttgataagcaattggacgcattttaaattgtcatagattgtaaaaatccaagaaaggacctttctttgtctaccgccgcatggaatcttgaacgaatgttagaccaaaatgatctggtcaaaatttcaaaaacc

SEQ ID NO: 15682 - DNA, 1478 bp, Heterodera glycines
tctaatcattttgtgtgagaaatgcgctccatttcgtcaatttgagcagcagcgaagggtggagagggaggggaggagagaacacgtgaaaatcataggcaaaaagaggacagtaaaaaagagaggcaaattcgtcggatggtatgcattggcagaggaaggcggacggatggatcaccaacactgctgctgatcagagtcaattcccggggaacatacgtaaatgtgctctatccgatacgaatgttacaaaaggtgtcaatcacaaaaatttgtacctaattaactattaaatgaaaatgcgtcggaaaattgtgacggagggaaaggaaaaaattatatatgtattgatttttcatacaataaataaaatatttataagacaaatcgttcaaatgagcagacagacaaaagagagacaacaagacacatacagaaaattgatagaggagaaacaaaaataatgccgaaaacaaaacgaatgatttttaaaactgattaatttaatgcccgttttgtgtcaattggagatgaactgcttcacattgtggacaaagtcctaaaaatgcaaggaattcaacaatgataagcagaatggaggccattccccgctttttgttaccatgacaattgggattttcgcagaaaggctggactcaatgaggcgcacaatcagatgacaagcttcctcatcggataattggaggtggaaacgttcgagcacctgaacagtgaaattggattctaatgagttgggaaaagccaaagaattgtgatttaggcagctaatgagaatgagtgagtgaaatgttgtaaaaaaattagcaatatcatcccacaaattctcagtaatttcagtatgtagttcaaggaatgataaaattattctaattgagttttaattagagtgagggatgccaagggcgtaccagggggagacaaattgaaaacgtacaccttccccaatgggcgggggtggaaatgaacaccctcaccccatcattttgtcaccttcatcacggctttgtccctctccacggcaatgtcgggaatgcccgcgtccagcatcaacgagaagagattggtgatcagattggcatgccgtcggagaatgcaaaaagcggttgtgcaataattgacaaatgcgcggaagtgctcactaaaaaaaacaacaaattttgaaaataaaaatgcatccacagtaaagagaaagtagaaaactgtatagaaacgctttattgagtgccccctccccctgactggacaatcggacagtggacattccgacagtaaaatgcacaaaaaaattagaaaatgccgtcgccgaaggggacagattgtgccataagcgacaggacggcattgtgtgcgaggaacggcaagacaaagcgcttatattcagcaaatgtgcaaccgtcatttacgaaatgccaaactcaaactaatttgcaacgaaaatgttttagactgcattggca

SEQ ID NO: 15683 - DNA, 1805 bp, Heterodera glycines
  unsure (1)..(1805): unsure at all n locations
gtccgggagcccccctccctcctctcccccgttccttcacctgttttgtccgcccatcgcgttgaccatctccgaagtgagtttcatcgccggtggcatcggtttggggtctctgccgaggatgaagctaaagtcgacgtggaacattttccctaaacgcatttattaaaccaaaatgttgccaaattcgtacggaaaagcatgaacaaaatgccaaattcaaaatgcattcttaaatgattaagccagcaaaacggtcattagtttgtgtgcactttattccccctgcatcgtttcccacacgcgcgatttttttaaatttttactttaattttcttaattatttaccgtaaggtgtggatgaacacggtctgaatgtgcgcagtgtgtcctggaaagaagtgagaaactcatgaggaaaaagtgaaaaccaaccaacttgaatacttttgatgtccgcaagaggagtggcgccgcggatgaattggacaaaacttgaaaaaacgactcatttacttattttgttggtacgttttgaaatggcccacccttctgaacaactcgtggccaacacggcgtacggagtcaggcacaagtccaacttgtcctccttgagcagctcgtccatcagtcgaatcatctgcagcaccaattggtcctggcgcaagtcgtcgccccgcttgaaaatggtggtgtacgcctccgcacattcgtacggcgtgagcgcgtcacggacggtggagaaagtgagacgcatcggcatcaaattggaagagaacagcacggcggactcgggctgaaccgcgcggacgtggatggacgggtcgagcggaagaccgagacccttaagagaaaatgnggagacaattatcaggngcaatgaaccaacatgatttagttttttggcaagtccctagcaaatcacccttccctgnngggagggggtaaagcggaccaaacgatgacagaaaatcaccttcaattccgtcaaatccacattctccgacagtttcttccgcagcacctcctgctttttggaccgactgccgctcaaatcggaaatgactttagcaatgtccaccaaagtgtcgacaaatttctgaaggacaaaatgcatcttttctgttctttccccctttcccatgattttgagggctgtgggggtaccccagttggtaaaaaaaacttcattttgcaaaatttagtttttttttcggaaattttacccgggtacgtccgccctggaaacgcactctctacccaaccccccttttgtccgctcactttttgtgttgcgattgtgctcagtgtgtgccgtgccgacccgtttcccttggacagttcctgcttcaagcggcccatcaccaagcagtacatggcggagactgatgacggcgcatttgtctcgtcactgtccgtcgcgttggcctccatttcaacctaaaggaaaccaaattgcacaaataaaggaaaactacgcaaaatgtcaaaaacatattcgcatttgtcgtccaaactgtgcgtaccttcaaataccagaagaggaagttggcgatcagactgttctcacaggccgcgcggatcaaaaaggtggccaaatccatggattcttgcgcaccaaacattgccattgtttctattgggccgagaagcatcgacgcggtcggcgacgacaccgccggggcgactgttgccgaaactgcagtttggacttccggcggncgttgccgaacggatgagcgatcactgtctaaaattcattattatttttgagggtactaaaaatggaatcctccatcacatgc

SEQ ID NO: 15684 - DNA, 2425 bp, Heterodera glycines
tcaccttcgacatttttgttgtgcaatttgaaacgtctcagcatggcggtcccgtcaaaattatctttgaaaaagtcagtgactcggcggttgccaaacaattctgaaaaaagcatacataagagtaaaggaacataaaaggatttgggtatgtgattattttggtattacctatacatatgataataaagaaacacacccaatgggtccacacatgatccgagcaaccactgactgatttcccccggtcgcgtaagtcgttcctgcaattcgaaagcagccgccgatgacttggcagctctttgagtttttaacgaccgttgttgttgttttttagcagaaaaaaaatttgcaaacattttatccaaaataaaaggtaaatgaaggattataatagggttaggcggggtttggcaatggtatagattattggtcccgaaaatttttttttaataaaatttgagaaaattatttttaggggtaatcttaggcgccgagcacgaatccggacttattttgtctcagtctcgaaccccgaacccggattcgaacatttcgtaatactgtcgattgtaccccgcacccttttttgaaaaattttaatttttttttctagaaacaaagttggggttttcagggtcggagatccgattttgacatcaatctcgaccaaattcgaacccctgacccagattcgaataatagttcaaaaatttaaatttttcaaactttacatttttacttcaaaatggtttaaataatcttttattgacgtattaataagatcatgtttgattccacgtatatagccgggttttgaactaaaactgcgaagtacgaaaaattgaattctcaaacttttgttcgagtccgggttcgggattcgagactgagccaaaataagaccggattcgtgctcggcgcctcagattacccctaaaaataattttcttaaactttatttaaaaataattttcgggaccaataatctatacctttgcccatttggcggacaatgaaaaaatttttgcgcttgaaatcttaaattatgtttgatttacaaggcgggaaaagggcaaaaaaagttggtactccttgcgtttgggttggaatttttgagaatttatattgtaaggaagaagctggctgggcggttaaaacgcggaaagcgggggttgataagatccataaaaagaaagggcagatgtgcctcggtagcttaatggtagagctgcccacggaaagggtgcatgagtgggttcgattcccacccgaggtttaacattttgcccatttcttattatatgtattttttgcggcgatatttcgaccggtgttttgtcctctccctcaaaaaaaatggcagaaatataaactaaaaacgctaaatatggatttatatggactaaaaactttcaccaaatcaaaattttaacgtagaaatgcttttttgagcccatttcttcatagcatatgagcagatacttaatatgaatcttagcatataattggaaaaaacctttttttttgtgtaaattttcatcttttagtcttaaatacccgggaaacgacaaaattttccgattattacagaaaaccaaattttaattgaagaagaaaaacataaaaatgataaaaacgagcaaattgatcgaaaacattagtgaataattaattcttccttcagagagtcgccaaatcgaatttgaaattgggcccaaaattcgcctcaatttggtcgccaaatgcgcgcaaagaagcgaatggatgaaatgaaccatcagcaaaagatggatcaaccaaaaaatcagaagtatctgtgaaaaagttaagggaattttgattattttaaacataaaataaattagataaaatagacaattaaccaaattgtaatttaaaatcgtaaaattatattatttattatttgctaacccaaacgaagtccatttttggtgaaaatgagctgtcgagtggccgaattgacgccaattccaacggtatcgccaacaccgtaggaatattcggcatttattccctttccttttccgttaatcaataaatagccatcgctttcataggcataagtgcccttttcccattgaattgatcgatccaattttatctgctgtttaacagcgaatccgaaagtgatgcccaaactgaataaagaagaaataactaataaaatatttcactttttatacaaaattcgcttacaaatgcctttcgtcttttttcataactgaaatttcgtagtaaaaaaagtcggacaaatgcttattcagcacaatcggatatttagcgaagacggagcgccaaccttttgaggagaaattgaattttgatgtaaattttaaaaataccataaccatttcccttatgatggacaatgagacttttgtcacactgatttcggtgtcct

SEQ ID NO: 15685 - DNA, 796 bp, Heterodera glycines
aaaattttcagtaaatttttttgaaattttaagtaattttcttaacaaaattgcattaaaatactcaaaatttttcccggcggcgcctatcggcacccccgcggcccccccccctttccatatccttgaaaaatggaggccaaaatggcaaaaaatattaattttttggcgaaaaacggcgaaaaattttgtaaaatacaccccctaattcgggatttcaaaaaaccaaaaatacacccctaaaaatcgatttaaaaaagaaaaatacaccactaaaaatcgactttttgacttcaaccccccccccccccccccaaaagccaaggtctggggctacgcccttgcttttgactgttcttttctatttgactgtaattataataataacaataatgatgttatggtaggtacagtaatgttgctcatttcccttacctatttgacagtaattataataacaataatgttacggtaggtacagtaatcgttgctcatttcccttacccttttgctgttgatgtgccatttccattttgtcaaccttcgtctgcactgtcacaattcgttccgtgacctttttctcttgctcttcttggaatgccttctgccgaaattaaacgatttttttttgccaaaaaaatgattgattttgttcttaaattggttaaaagaagctagaattaaaaattgaaaaaaatggtcaggtaataatagtgctgttggtagcccccgtttaagtcgtaaaacatgttataggcacagtcttcacgaaacacacttatgcattcggagtgat

SEQ ID NO: 15686 - DNA, 3741 bp, Heterodera glycines
tttaaaagcggtggcaagtgactccgattttgtagcagcatttttgtagaatgaattcaaaaattgtttgtttgcttttctgccatttcatattgttttgatgtgctttttttgggcgtttttttcttcaattttgttgtccaaattttttaaatttttatgtcaaagttttagcacgcgtgcggcgccaccgtcgccaaaggcgcggcgcggcgtgccaaaacggcggcgcttttttggccagcaacaggcgcaacagttggcgatgcgcttgtgcgtgtgccaatcctgtcgctcagtgccgagacgtgcattgggtgggtttttgatgcaatttatcatcctgttgctaatcacctttttctccgtctaatgcttcattttgctgaaactgaattttcttgttttggtaccgctctgattttagtgtttttttcgcaaaaatttcaatgccccgaattccattaaatacatttccgaatttctattttcccgctttttagacgccatttctctgttcactccgctgaacacgccctcaaaatgggcgccaggtcatccacgacatgtggccgtttgccaacggcagttacgtttcgggccgggccgtcacaaagtcgcgggaagtccaggttgtcggttgggtgggattacatggcttatcattatgcttttgattaggggtggcttgggtgaaacaatttcaaagattttttgacccattttaacctaagaatgcttttcaagttgattcgtacatattttgacttgtatgtcgattttcaaatcgaaatttcgaaaaaaaataatgttttcaccaaaaaaccgcatctttttttttcaaaatatttttatttctcagcacaatgtccgtgtccaccatgagcaccgcaactgctgctcccgcgacttgtgcctgcagatgaggggagggcgacaggctggcggtgcaacacagacaggtaaccagaaaatccgaagcggacacagggggggggggggggaaaacgaaaattttttgcatttcgcaccaaaaagcttttaaaatgacagtcaatggaataaattaagaaaacgtaataaaaaacttcctttaccccatccccaaacccacccaacccactcgggaaatcagtgaattccgaacggttttttaatttattttttgccatttttctcaaaaaaaaactggcactgtcatagccttttgataatttttttttaattttttgctagcaatgctaacatcggtgccattctttacaatttattcccattttcattattttcccccattttctgtccaggtttaccatctccaattctatccgtccaatgtgtcctttttgtcgggcctttgggagaaggaatttgagcgcacaattcgcacttacaaaagcccatacatcagcttcacctatttccactcacaggtttttattcggaaaataacaattgggtgaaaaaaaggcaaactgaaatatacaaaaaaaaaaaaaaaattttttttttataaattaattttaccaaggccaggtcgaatcaaaaaagttgtttatagtgcattttaaaacccgttttttatgtaggttttgtggccaataaaaccagcggtttggattgggtcaaaattgaaaacatttttttggattttcaaatttgcttttgctttgcaatatttactaatttcggcaatcctaacgaatgggtgtccttaatttaatctttatttttggactaaaaatctgtttcttaggatttttgggtactgattacgaatctaaaccggattagctcaattcataatcgcaaaccgatttcgaacggaatttgaaaaaatttaccaaaatatgcgttagcattctcgaaaactccatgaaacggatttagagcccaaatttattaaaaaaggattaaaattagggacttccattgattaggagtgccgtaattacaatatcgttttaatttcattaccgtatcctcccctccctttttttttgttagactttggccgaagaagcgaaacgcaacgcgcacacgctggtgctccattttgtgttcgcctttttcattctctttgctcctttctcggtaagacacaatttttcttttagcctataaaaacttaatattttaaatgaacgttttttatgcttatattgttggataaatttcgaggattgtatcgtccggcggtgctcaaatgccggcgcccccacaaaatgtccaggtcacgaaatgtccacaagagtaaaaatccattaaatgtccatgaaaaattaaagtttataaaaattcgggaaataagtctaaagtctattttagggttttcggagtcggtaaacttatttttcgggtttttataaaattaaattttatttttttctggacatttcgtgggcttgtactcttgtggacatttcgtgggtagcgcaaataccaccaaagaaatttttttttgagttttcaaaatttattttcctaatttttaagggataaaattaagaaaagccataattaacttatcgctattatatgcttctcaaatccaaaacgcaaactatattgggactaataaattccaaacaattaaaaaattaattttttgtatttccctgaaaaaggttggatacatccattagtttaaacgcatcatttttttatgaaatttagggagcagctcggttcttctcgcatcgtttccccacgagaaatttttttaaaaaaaatttgctaacttagaaatttttttagaaattttaatggtggattagttttttaaaaaattttccaaaaaaatcgctgagaatttctcgaaattttttttcttagaatattttataaaaagatttattttatttttttttaatttctcttgggggaactgatacgggggagaaatgaagtgcacccaaaaattttcttgacctccccatcgttcgtcgtaaggagggcggctgtaaaagagggtggtcgtcgtggaggggaggcgttaacgtagggggaaaatttaaaattggtacaatttccttagcgaaacccatgcaaattcaaaattttttcccggcggcgcctatcggcaccgccggaccgcctgccaccgccttccccaaaagttgaatgttttttttccaaaaaattatagaacttttcctacgaaatatgatataaatttttaaactatttttttctaatttttttactcctgtgttttgtagctacgaccctacgcaatattttataatttaccaattcttttattaactttaccctacaatttgcaggcgttgtacaacatgtcccatctgtcgtgcccacaactgttacattgactggacactgtccaagccatttctggcaattttgggtgtggtcaacgcgggcatgggcattgtgacggccatcggtctgcttaacatttgcttggtgccaaaaattcctaagaaatttcttagtaagaaaatttaaattcgaaaacacttagtagtgcattataaaatctcgaaaaaaccgctgaaaaatttttcaaaaagttttttgcttgaaatttcttgttaagaaatttcttaggatttttttcccccgcttcttgcagatgactttcttcgccgctctcgctgttcactcgactgttcatgctcggctcgcgcgcaaacccggacccgaaaatgttggaggcgaacctcgcgatccgcaggcgtccaatacattcagaattggtcagtcagtctccatgat

SEQ ID NO: 15687 - DNA, 915 bp, Heterodera glycines
gacggacaaatcgggcatcgcccgttttcggcggatgggcgaagcgatggcggacccggcatttttggtctcataataataaatatcacatacagaattgggttgaaaaatcaatggcacttatgcagtttaggccacacaaacattttttgtttttatccatgaatcccatattttcgattcattataaaaaatttttatatggcctaaactgtataaatacaatcaatttaacgattatatttctactcccatttcgcattgcgatttttttgaattgttcaaaaaacaaaataaaaattgttataatttttcataatttttgaccctttatatttttgccagatcctgatcactgattaccgcgttgagtgacgcgctttcgttcggcgttggcgccatcaccacctttccggcggtccaaatcttttacatttacatttgtgcagcaatcaccatcaaatttgtctaccaggtgaaggctgtcttttgaaaatattttttgttcattttctcttcatcattatttgaatgtagctcacaaagagaacattaaacattcccaacattgtgtgtccaaaccacattaatcctaattttatcgtgtagagaatggtcgatttgctattcggaattcacggctttaaaaaaaattcttgattaaataaaccagagaaatcagtcaaaaaatcgccggaccggttggccaggcctggtaaaaaaccgataccatgcccggcccggctcgtctctattgatttaaaataaggaaaacttgtgaaattagaggttcacaacctaaaatgtttttattttctataaaaatattaaaaaaccaactcaatatttataaaacatccgttagttttctacacttaaaaaaccctccttttttaaggaatcccgtcgctattt

SEQ ID NO: 15688 - DNA, 3187 bp, Heterodera glycines
tgcttagccatgccagctcctcacttgttgacgcctacattcagccaacttggccacctgttcctcatcgaaaaaatgtatgaaattttaaagaaaattattgctcaatttactatagaaatgctccattttacaatgattctgattttttaaaactaaagttacaaaaattatgagttacttaaaaccaccataaaattaaaaaatttgagtttttatttaaattttccgacaaataaacatttgatatcgaagaaatataaatgagtgttctattagcaaatattaaagtaattttaaattttattaatttcatagatatttaaagaaaaaattacccaattaatttggttttttaatccgtttcatttatgtttagcgtgtcgtgctgcttgagcttgggcggcatgcaatcagtgccggcgtattgacacaaaagccatcattaccgtacagctttttccccacactttgcgcggttggcaacagcagcaaaaatggcacacaaaaagtggtgacttgtggtgccaatgcatttaatgagcatcaaacgcatgggtggcaattgaagaggccaattgaggcataattataataaatgaagaatttaacattgtaaaatcccatttgaatcaaattgggccgtggtgagccgaagtgacaaaagtatcaatgttcataatatttaaatttaattaataattttaatctatttgctaaataataaatcttaacttatcttaaacttagccaaattaaaaaaaaacttgagctagctctacatagtctcaatatattatatatatatatatatattttttttaattagaaaaatttaacaaaaaatttgtaaccaaaacttccaaaaaatttagatttctgaacaatcttgaccctaacttttttagaactcattaagatttttgaaatttcatataataataggtaaatttttgggctatctaatcatataagggtgttatgaatgatgtttgaacaattttcatgcatataaacaatcttatatttttatataaccataaaaatttgacacatttaattctttctaactttttttcggatattatattaaattttaaaaatcttattgagttttaaaaaagttagcgtcaaaaatgttcagtctaaaatttaactattacgcacattgatgcttttgtcacttcgtcctagcactaaattgggcgatcagagcattaatctaaattgttttctaattattatggttggaggacaatcggctcctaattttggttttaataatttttctaattatatattttttcgtttgcttgaattaaatacaaaatcaaataaaaattacaaaatttataaatgctcttttgtttataaattttttttataaattttcattaaatcaaaaactttatttttaaaatcattgtttagtttaaaaatgatgatggtgaagtggtcgaatttgacgacgatgttctaaaagcagtgctgaacaaagctttgctgtcggattcggccgcccaagctcaggccatggacataagcttcagaccgcatgattatttggtgggtatcttggaatggatcagtcgggatcttattcccttattctatcaaattcatggatatcctggatttgattttttaaaattcttttattaatgaaaaggtgaaattataatgctaattttcgaatgcataaattttaaataaaaagtgattttctgtatagattaattgaattattttaatttaaaaattggttcatttgatttcattggagcaaatttctttgtccaatttctcaggttggcatatttaatttccaatttcttagcaattttttcgtcactaatttttggattgccttctttaatttcaaaatattgctccatctttcttaatttggcatcactgatatatttattcttagctaaaaacaaaaatttaaataaaatagttttctttcccttacttttcttgtaatttggcaccaattcttttttccattttataaatactctttcaaaaatgcccaattccttcacaaattctttttgtttgcgatggccatataaatttttaaattcattaattcgttcaatgaattacttctttttctcatcataaaaactttttttcattattttaattttatttttatttaaatttaattcttttttccatttgtatatttttaagcgatttgtgcctaataatttcccaattttcgcctcaattttggaagtgtttttccattgaaattttcctttttgcttcaacttttctttaattgcttcaaatttttctatcatttaattttttgttgattatttggttcttctttcgtattttgatcagttctattaatattctgatcttttgcatttgatcaattgattcagcttcattttcttctctttcatttttatcccattcgttgccgaatatttcatcaaaatttggtcgggttttgctggattcaatttcaaaagcaaggaaaaatcttataaatattaaatgccacaaattcatggcaattaaaaaacatataatattatgaattattgcattaaatgaatttatttaatattttattcgctttttcatattaatatttattttattatttggattttctctgcaacaaaccttcgtaattacgagccaatcaatttttcacttagatttttatgaaaatttttggcaaaaaataaaataaattcagtcatagcggggaatcaattttttacggatttttttaaaatcgctcaaacaaacattgtttaattttattataccattcgaaagagaattttgaaactttgctcttattaacacaggttcttctggcaattccgaattcttttacacttcgcgcagcgtctgaattggtcaaaatgcttttggacactgcccaatttggttttaaggtagaaattaattggttttaattgcttgtcgtattataaccttcatagcgcgacttttttcgctaaatactagagttaagcgggaccgggacctgaacacgtacaactgagtacaactgagtaccgaagtcccggttttgaccgggaccgggactattctcggttttcccagccaaaaattcccgattttcaacaacccaaaaggtcccggtcccgggtttgcccaaaattcccggtcccgctcaactctacta

SEQ ID NO: 15689 - DNA, 3379 bp, Heterodera glycines
tcaaaaatggggagaagatggtcgagaataatggtgccttttttgattaaaattggttaatatgttataaattttcaaataaatttttgtccgctatgaaagaactttccgaacaccccaataattagttcaattttaatgacaatgagtagggttgtaaattatatggactaaaaaacgcgaaatatggacattaaatatggactaaaaaagcccgaaatatggactaaaaaggccaaaaatggccaaatatggaccaaaatatggataaaaaatgccaaaatatatgttgtaaacccccaaaaatcccaaaaaaggtgtgcatatttaatatttgcttaaataaacctaaaaagtacaataaacaaccaaaaaatggggtttaaaacttaaaaatgcatattttttattgttgttcgttgtatcaaaaacacctccaagtttgccaaatttcgaaaaaattctcattaaaaaaaaagaaatgttcgcaaaaaaatgacgaaaatatttattgaaaatgccaaaatgacgacgaaaactcaaatttttcgtgttttgtggggtgtaatttttaaaaatttccaaaaagttgatctttaggggtgtatttttcgtttttttttcatttttcttgtgaaaatttccaaaaaatggccaaaatatggactaaaaacccaaaaatggcgaaatatggatttattcccgaaaacccccaaaatatggatttatatggactaaaaaccttcaccaaatcaaaaaattttaacgcagaaatgctatttttaagcccctttcttcatagcatatgcgcagaaaaaatatgttaatccatataatttacaaccctaacaatgagtctctgcatttttttgcggcgcgctttttcagaaaacttttttgagttacggcggtgcagatcgtgataaaatttgaagcaattgtaacagattttgcccaaaatacttaccaaatttttaagccagtcaaatccttttgcgaattgttgatcatttttatcacatctcaacaatacaaatgtgccagtgtatgtgcgattgtcttctccttattttgtgcttcatttttccagtatgttttttaatggggtaaaagttttttgaagttttcatttgtagccaatcgccgtcttaatgcgccaagggtgcaccatccatttttgcattaacattttgcttacttgtttggcttggattccgggagtgatccacgccatttagtatgttaaataaaaatcgtattatgttggaattgagggttattttttaaatttcattattttacggttaaaataaaatttttgttcagttaaaataacttacgattcaataaaaatttagtgtctgcttctacgcgggtgtcactttgcgtcgctaagtcgaaacaagcgttgaccgcggccgagaaaaagttagacggatttttgatggtttgacatgctttacaattttatttacggtttttcagtgaattttgaataaaatttcaataggagtgtttacgcttgtttagtcgaaccaaaaccaaaaaaccggtacgcccggttagcactcgaccgtaaacaaccctaattttcattataaaaaattctgctgaaaggccggatccctttgaatgaattcgcttatacttactgatgatgatgatcttccataccattctgacacatcccatttttatacgtagacttccatctgatctaaaaaatcctattttccttcgttgcaatgttttgtttaaactcataaatttcaaaaatgctattgcattttaaaacgatacatgattgagaatttcgctgtttacattatacatttgctttttctttttagtaataaatgtttaaggaaatgcccactcgcttaaggcgcttcgcaatttgcgtcggcgttgacgaagaaaatgggacttgtctgatggtttatgagaacgacttaaacgccattgaagtgaggatggtgttttccggtgtgcaaattggcaaatggtaccggttcgacttggcaaaaggcacgagacgaaattgggaggtagcggaggaacgattgccgacgcggattatgccacggggggacgcggggagtggcggaacacgcggggatcgcattcaggtgaaccacggcacaacaaggcaaatgatccgacggattgggtctgccataaaatgtttctaatgctgtttgaaattattctgctacccattggtaattcctttctgtttttagctttgccttcccattttctttgtccccaacttcaaatgttttggctgcacttggcgtgtcacttcaccaacttcttttaatgacaaaatgcacttcaatttcgtttcgcctcgattggaagcgccaggcaaaattaatttcagcgaagaacgactggccgaatggaacatccgtccgggggagcagtgttttgcatttttgacattgtattataaaatttgtttatttaaaaaatggatgccacttttcagggattgccaagggcccgggccgagcataaaaccgccgcaatggacactcgatgcagtggagcattttcacagggtatgatttgtttataaatcagtttttgtgtaacatgttaggatttcaagaggcaacccgtttccatttgcgacatttcgatacacagtgaaaatgcctcctcaaatagataaatttgaaaagcttttcaatatcttagtatccttccttttgagaaatttaaacatgaattaaaaattaaatttttgataaagaatttacggattggatgtcaagataaatgaatttttcaacaatcaaaactcattccctgcaatatcaaatttaattttaaaaagtccttcgattgtttattttcaggtcaatgttgacccattggccctctccgttctgtccgtttccctcggcgcttcgaaagaatggggcattctgctcgatttggtcattgaatctgaggacgaaagaaatggaatgggtttcattctgtgcttacgcgacggaaaattcgcttttggacgaattttaaaaaccgaaggtcacaacgacagctgctggagggcaaatgtgggcgacactgtcggcttctctttgatgttaattttccaattagacatttctccaattttcctttcagtgatgttgattgctttaattaccccgttcggttggctttgaatgttattgcctggcaatccccggcgttcacttctgttgactccgatgttctttccgaccaatttccccaagaatccttgcccgaatttccttcagttcgccttatttctaaaagtactggaaaaatggctcaacatttggtaatttgatctttctgatttgcaaatgataacttttttgttgcttatgagtgtaat

SEQ ID NO: 15690 - DNA, 2739 bp, Heterodera glycines
ataaaaatattttcttatagaaaaaaaatctcctctattcatccatataaattttattgttaaattttaagggaatcatttaggaaaaaacatgctaaaaagttgacgaaaaagggaaaggcgcgttcatttcacaaaattataagtagggctaaatatatttttttgtacatatttcgctattcttgaggattttttaatgaaattttatgggtacatttttgaatataggcaatttttcgtaacaaagtgcactcaaattttcaaattttttttcaaaaaattttcacttgggaaaattcccggttggtcccagtcccggacgaaaatcgaggtcccggtcccgacttttctgatcccggtaagtcccggtcccggtttttgtcaaaattcccggtcccgtgcaactctaataattaccttttttgctaccttgctatagcctaatatgcacgaaaacgagtttttaacttggcttgaagcttttatcttgaactttttggtgcattttttgcctattttttttgaaaaaacggtaaatttttttaaaattttgcaacttttcctaccatattttattacaatttccaaaaaattttccggcggcgcttatcggcaccgccggaccttcattttaccttaatttttgaaattttaaccacaaaatgagtagaatttgtcattttctatctgagaaaaagatcaaaccggaaaatgcagatttttttttttgcatcacaccctcaagctataggtaaaattttttttaaaaaatttcgcttttcgcatttcgctttttcgcatattttggcttttcgcatttcgcttttttttcatttcgcatttttcagtttcgcaaatttcgcttttcgcatttcgctttttatttttcaatttggcccatccctggtgtatagtaaggcaattaaaaaaaaattaaaaatgttcagcaatttttgctgcgttttcaatctttattgtttaaaaatcaaaattcgtttgtatttggcaattgtcacatttatttctgcgttgcatggatgtattgtcagtttgggtttgcttaatagtggaaacttacatggtgacctaatgatcacttgttgcttcattgactttttcatggtgtaatttaaaaaatatataaaaattaacgtgctgagacgaagtacgaaaagtgcaaggttgggcgaagcacgaaaaagtgcaagtcatcaaattaaaatcaaaataattaatttaaaaatgaaatcaaaaataattatgttaattacatttaattgtaacatttattatttaaattccgttacataattaaaatatttttttatattaatgattttatggattgctttgttgattttgacttataaggctaggaagcatggctggacgtaattacggaaattacggcctttttggaccgccgtaatgacggattacggatggccgtaactgaaaaatcgccgtaattacggattacagatttccgtaattgaaaatcagttacatccagccctgctatgaagacttccttaaaaatcaataagaatcattcataaatttttttctacaaagcggatcctgattggtggattttctctctctttttcagaaattagttttgctcttctcgcaaccttgcatacgagattatgttggaaatggtcgtttttcagtttttgaaataaaattagcgcaaaatgtgaaaaattatttgctgtattttatttttaagtaattatccattaattagtatatttttagtgaagcttcggttcaccacgcatataattagtataaaaatatatttccattatgtaacggaatttaaataataaattttgtgattaaatttaattaacataattatttttgcttttcatttttaaattaattttttgattttaatttgatgacttgcactttttcgtgcttcgcccaaccttgcacttttcgtgcttcgtctaagcacggggccaaccgtgacggcccacctgctgattgtgagcgagtccgaaaaccgaaaaatacgctctcgattaatgctatattttaatttatatatatcatatctttctatttattattaattgattaaatatgttctgtctttattaattgcctcgtcagatatgtaatataacgaagtgaacacattgattggataatacagttgttgcaaaattgggtcgtaatttgtacatattgtcaacagagtgtaccatggcataatggtgacttgaccaagtaacgcatgacatacggcatggatttggacagcaatgcatagcacagtgattcgcgcactttccttgtccaaaggattttgtgccggcgccgcttctgtgccggcattattccaacggcgcttttgtgcttaaaattttcaaattttgctggttactctttcttatttataaatatggagaagttttttatttccaaaaatttgaaatatttaaatatgagaaaattatagcaaaaattcattgctttcaataaagacctggacctagatttttttcacattttatctggaactgatttcctggacacaaacccaggaaaatcctgcaaagaaaaatccaggttgtctaaaaatggcctgggcctggacctggatccaggaaaaatccaggcctggacccaggtccagtctgagctctagtttatataagatatctttgtggtgatgtatttttgcttcttcaaaaaaaggtgacaaaaaaaataaaa

SEQ ID NO: 15691 - DNA, 1072 bp, Heterodera glycines
  unsure (1)..(1072): unsure at all n locations
gtagaaaattaacgacaaaaattccaaaattacgaatttttanattttaaaaaatgaatnnntagggtccttgctgaattacnagggttatcgtcttaccaagaaaacatggcatntatcaagttcttggtttctgtagccatgaaatacacccttttttcattttcatgttttctgtttattcacgttataatatttggattcattcaaaaaattttaaatttttagaaaatattttaaattattatttttaatttaggggtcaaaatgttgcaaatctgtttcataaaaaataatgaaaaaaagtttaatacaaattttatgccccatttgaaactttttcatcatttgacctattttttacaagtttgggcaattgtttgataatgattaattaattagttaactaattacattttctattacaaaaatttggccaaaaaaaaatgaaaaatatgccaatgcttgtcgcggtgcttttgctggccaccctcatcaccatgaacatgttgatgttgaccaatggcttatgcgaatacaaccacacccttggatggtgccaaaatgatggagattgcctgaaaaactgtgcgcccgtggcggaaaatgaatgcgactgcgtttcggtactttcaaaaaaattatacaatatttaatatatatatatatatatatatatattaaagtgaaattttgaaaaaattagcgggcatgacttgagaattttcaaaagaataatacttgtggactacggtgcctggcgatttaaaaaatatactgtatctcccagatattagggacatttggttttgactcaagtaaaaaaaacaagcaaggttagacggtgctaatttgggggtcagggaattaggaaaagcaaggttactccgtgccgatttatgagtcagggacttttttaaattcaaatgctctaaaattaaagaataataatctcctttaaagcgcataagaatcgacttgattatctgttcataaaaccttggaaatataaaaatggtttttcataatgtaaaaattaaaaaaaaatccaacttaattattgcgcaacaaa

SEQ ID NO: 15692 - DNA, 3210 bp, Heterodera glycines
  unsure (1)..(3210): unsure at all n locations
tttcgagtaattcccgtccctaattatcgggtcgggcttttttggcgcggcatattttggcgccgcaattttaaagtttatataatattttttttatgcaatcgaataaaacaatctcttgatatcaatggataaatctaaatattctctattagaaagagtaatttaaaaaaaaatcttgtgttcaaaaaacgatatggcatgcggcactaaattggcaaatattttcctagagtggtacttcttgatcacttataaaaaaattaaatgaaaatgacaccatcaagtccgaattaatatgcaaaatgtcaaaagaaagttcaagaacgaatctgagaagaacgcatattcagcaatggcacaacaacatttgatccgtattgatttctacaaagatatttgcaaaatgctttgcggtattcagtgctaaaatatgaaaatttactatttttagaaattaaaattaattgattaattaaaatcacctgcacatgaaaagcactggagtacagctggaatatgccatcaaaaagagaccattaatgtattcaaatgttaaaaggttcaagccgagcaatggaagtatgccattaaagaacacagaagtcttaaatgggaactgaattagtgaccaaagcaccccaaattttttttatagcttctgctcaaaaagacaaaagaacacaaaaaaataaatccaattttcaacctattcaggtttaaattcttaattttttaaatggattttcataaatgaaatttttgataaattattaaattaggggttttcattaacaaaatatctttacaaaaaattttaaaaaaattgacgcaagttgattttgcgatccccaattctttgatggcngttttgtttctgaagtcctccgtccacatgtatattagtgtccacatctgaagaacatttaaaatgctgttgtggaaaaaactttcatcacgaatggatttgttgaccgaacaatctgatcaattccactaaaggctaaatttaaaaaatctaaaaattgtgttttaccaaaaaaccatcctttttgttggttctttttcataatgacattttgttaaaattatgccaaaaatttatttaatattttatttgaactaaaattgacataattagaattcctcaaacttttcccaatgctttgagctgccataataaaaattaacgttgacaaacacagctttggcacaacaaagggcaataaaaaattttgaaaagtttgaggcggccaccaattttatatctaatcaaattaaaaagcaataatggctgacaccaaagtgggcggttccgatcactgataaaaaatattaaatgaaatgacatcatcgagtccgaattaatacgcaaaatgtaaaaacaaagttcaagcagaaatgccagaacaacgtatattttgcaatggcacaacgacatttgattcatgttctgttctgcaaacatatttgcaaaatccttctcgatattttttgctaaaatatacaaaatcaattaatttttcctgtcattaattaattaattataaacacctgcacagaaaaagcaccggagtacagctggaaaatgccaccaaaccgagaccattactaatgggccaaacaatgtgttcaattgttaaagtgtccaagctgagcaatggcattatgcaataaaagaacacagtattcttaaatgggaactgtaatgtacagtaattgtgaataagtttattattaaattagggtttttcattagcaaacataatcataatgaaaataataatattattactccaatatagcagatgagaccgattgacataataaaactcagcgaaatgattaaacgtctgttattttctgattctaaattaagaatttcgattactctaattaattatcaaatttcatcaacccgcaaatgactgtccgtggtgttgtccattacgaaaataattgaccagccaaatcaatgcataacatgtgaattcagcacaatatgttattaaagttaatatattcgacattgaattagtctctggctggtgtgccggatcaccaattgagcacatcactggtcttaattaggggcataaaatttatcttaaattataatgaccttaattaagataccaaaatttatttttaatttaattaaaattcaggggcaatttatatatttaatagacctcaatattagggaaattaattttaaaattatattcaaaaatcatttttaatttttcttctttctccaaaatgtttctcttatctctctctctctctttctctctcacttctctctctctccactctctctctctctctctcactccctctttatttctcactatttatctcctccagcattgcaactctgacaatttctctcactttactttattcatctcttgcgctttatgtctttgtatctttccatcgcttttttctctctttctatctgtctcttttcttctctatcacatgctctcttcctcgttccgtttttctttgtctctctctctctctttcgctctcactcttactctgtctcgctttctctctatctctctcttcttcccactggcatgctttcttttactctcataatctctcttagtttctctctctctctcactcttagtcttacgctttctctgtgtgtgtgtgtgtgtgtctcttttattttaacaccttacttatttttaagaaaggtcttaaatagaaatttattttaattgtttttttattaaaatttgggggcaatttgcaaagccgtttattttgaattttattaataactaaagggagaacccttttgaaattaaaaaaaaaaattcataatctgaaaacatagggctttagttgtctttaaccgcgaatgtaaaacacctattttaaacaattccgactactttacttaaatttgaaaaaaaacctaaatcgaaaaatttgaattttcggcttaagttcgtgttcggcttagggattagaaatttgtcaaactagattcagacccttaattaagaaaattcaaggtatacggtaataaaaatttaaaatacaaaaataaattaataaaattcaaaatgtacggtaataaaattcaaaataagcggtaatgaaattcgagatatacgaatttgcaagacgagccaaatttanatatttaatttcacacaaactttccccaatgctttgagctgc

SEQ ID NO: 15693 - DNA, 1418 bp, Heterodera glycines
  unsure (1)..(1418): unsure at all n locations
attcaaatttcgagattttgagtcaaaatatgnaaactttgattgagtattgatggaaaccctgccaaaaaagtacgaaacggagagaaatagtttttgttacagcaatccaaattaggaggcatcaacaaagcgaatgcttttagtcgcaataattagcgtagtttaaatagcctatgacttttcgttaattaacaaaaattaataaaaaataaaaacaaattaatttatcgctataataagcctaaattggcacaactaagcaatgctatatcagagcacatttgtatcagaagccgaacaataattatcaattaacaccagttactaagcagaccataatttttccgcgtcttttgaatgatgaaatcattttcgggatagcaatttgctgtgaagccaattttgtaaaaaactgttttttaatcatttaaatagggtaggtccccgaccattcgtagtgagacaagtctgggtcgagatttttgggggtccgctaggtggtggtttgggatagtgatgctcgagagtctcggtctcgagtctcgactcgagaaaagtctcgggtttttttggtctcggtctcgagtctcggtctcgggttttcaagtctcggtctcgattttcgagactcgagaccgagactttttacaccccgaatgattgttggcctttggtaaacttctatttttataaattttaggttcttttttgttaaagtttgttaatatatgcgtggtccagcgggttgtgttcttggttttgttccttatttttgcgttggatcacttcccctccaagtattattttttcttctcatttttcaaaattaatgtttttttcgatgggagttcaaacacaattttaacaattaaaatcgtaaaaatgtcatttttggactaaatctattaacaaagtgcactaaaaatttcaaaattttctccggcggcgcctaacggcaccgacggcacccaaaactcttacttttattttaaaaaagtagctcaaagacgcaaaatttggtcattttttggacaaaatccgttaacaaattgcagtaaaattttaaaaaattttcccggcggcgcctatcggcaccgccggacccctgttaccgaaaattttttttgaaaaagagcaccacaaaaaatggtgtaaaaaagtcaatcatatgaaaaggaaaaatgtatggtagcttaaataaggaaaaaaacaaaaatttttgagaaaactcaaaagattgatttttttcgatttttaagtgtgtaagaaaaaatttttgaaaaaagtctcgggtctcgggtttttttggtctcggtctcggggttttgggtctcggtctcgagtctcggggtcgagtctcggtctcggtctcgagtctcgagtctcgggaaatttttggtctcgagcatcactac

SEQ ID NO: 15694 - DNA, 3315 bp, Heterodera glycines
  unsure (1)..(3315): unsure at all n locations
ttgaggagagggggtccggcggtaccgacaggcgccgccggaaaaatttttataatttcgttctgatttattaccagattttcaccaaaaaggccaatttttgccacaaatcttatattttctttataagatagttacattatgcgaattcaaaattttaatgttaaaggaatcagacaaaattggggcactacctccaaatcaggaccttttcattttatcattatttggacccttcggtggcagatgattccgccagtgagtgattcctatatatttaaccgaattaaacttaatatcatgagtttatttacgcacaaatatttggaataacttttgttaaaattattacatagtttaaagtgcgatgtattttgaatgatttttcttaattttttataaatacagcattattgtaatataatcccggggcgtgtatatttcaattccctcttccctccaaaatatttgtattttaggggagtctttaccaattggctattgtattgggactgggtcgttttggcgccgacgttttggcgccagcctcagtttttttattataactttttttcttgttgaccaaatctaacaatcttggtatcattcgaaagcccttcacaagctctattagccttacaaaaaacaaacaaaaattttagcttctaaaaaagttattaagaaaaaaactcaaaaatttcgacttttttggaatttcatgttaacttttttggtaattgtctaatcgcgaagcaatagcttagaaatatcttctaaacatgttaagctttcgattgataccaagatgctggatttggttatcaacaaaaaaagttataacccaaaaacttgggctggcgccaaaacgtcggcgccaaaacgatacggaccctgccgcggaaccttcaaaaaaaaaattaaaattgaaaagtgttggcgttccgtttccgaacattaatttaaatttatttttcccttttttcaaaaatttgtgcatttttttttctgcgcgtgcaattgtgccgcgtgttttttgaccaccaatttcagttggcgaccaaagaggccgacccgcgggccggcgacgttgccacagttttctgcgacccgtcgttggccaacgcgtgcctcggctggcatgcccagctcggcattgacgacatgtgccgggatgcgtggaattggatcagcaacaacccggacggattccgaggggcggcggcgagcaaatgattttttaggggaggggggcaattcgtgccaattacgttttttttattttttttactgggtttgcgagggcaccacagaacgatggatggcacatatagaaccgcacaggatgttcgagggtgtccgatgccgaccggttttccggggattagtaccacggcaaagggaatgatgattagttttcggcattttgcatgttggcaccgtacatcctcgcccggggccgtccatcagcgatagaatttattattacttaagcaattgtttttcacatttttacatttgcggttattccattcactttttctttgctcttttccccaacttttttcattttgttaatttattttttaatttttgttattttgttccttgttggtgtgttttattcgattacatatataattttgttcattttaatatgttagggatttgttttactttttttcttttcttttgttggaaaatttcacaattttatttgaaaatattaaataaattatataaagaatagatttaaaaacgattagcagataatcgctcacttaaatgtcattgattttgtaagaataccatgccctagggggtacaaatcagggatagtaccgcaagtcaagaaaaactcccggaactcgggattccggcgccaaaagtggtattgcggtccaatcctttgtacaaattcaaaaaaaaaatcgattaatgcaattggtgccgtttttgccttcattcctcctccttcttctcctcattcgcataatcttcttcttctgctgttgcttctgtcactgtttttgccacttcatcgtcgttggcaccgttttgcccctcctccgtttcgtttttgccacgagtgtcgtcgtctttgtcggtttggcattggcgtgggcgtcgtcgaaatgcgaacacccggtacatggtcagcacttgccattccgatgttgatagggttccctgaacaatgaacggggtcaataaaagggaaaacagctcgtttccccacgcctcgaaaaacctctaaaaccttttttttaaaaagtgaaaaatttttaattttctaaaaggaaaatttctgaactttggctaactttctttataaattccataaaaaatctaaaaatcgatttatatgatggcttgacccattcgctcgcaaaaggtttggtaactccgccccccgttttcagatatgttgattttagatcaaaaatgaacgagttttataaatggcattgaaaatccatgtatgaaggcatttcattgtgtatcacaaaacgttgcaaatcacacgtggcaaaatcaaaacggaatgccactaccggtgggtagccaacattggtcaatgatcacccaccactgttgtttccacgggtctctgctgtcgctggtgccattgtctctgctgctgttggttgtgtggtctcccccaccccgttggtccctcatttcttccgcttccgtctttgtcattggcactgtcgccctccccgtcggttgttggtgtgccgctgctctttctcagccgtgccaatgccgcgccgtactcgcgctgtgccgcttcgacgccgcccttctccgtctccaagcgtcgcgcgtccaccaccgtctccagcgcgttcatgctctccatgagttggcgcgcctcgcgcccgcgctgcgccatgaaatggccaatggcgtccgggaagcttttgctgtacaccaactctaggcccatctcgtggagcatcctgaaacaaatcgagcttaggggaatgggcaccgaaaaattcatttaaaaacgactccaaatcgaaatccaacattttctaatttttctacaaaataactaaattcaaacaaaaatcttttaaaattttttctttcataccccaaaataccccaaaaaattttttttcaaaaacctcaataaaactttaaataaaatctaacaaataaaatattacntccatcttttctccttctcccatttctcctccaatcattttttctaactcccatttttattaaaattttttcaaattaaattaaacaattcaaaacaaactcactctttaatcattaaaaaataacacaaatact

SEQ ID NO: 15695 - DNA, 1039 bp, Heterodera glycines
ccatggaaacgaaaaaggaaatgacagaaaaaaggaggcgagagagaagagattggcaaaaagaaatgaatgattctgagaagaggggggggggggggcaattaaagggagggttaattattaattacggcactaatttgggatgggattcgttgaaaaagcacgagggaatttaatggaaaggagcgaataaaatgaaaaaaaaaagttaaatgccaaaagaaatatttgggccaaacatcaaataaaattaaaaagttaaaagggatatcgttctcgttttggggttcatcataagaaagaagtgatgggagaaactaataaaattatttcaatctttttacaaaattttcgtaatttaaatttcgcagataaatcatttggttatatttataaattatcaattttattattaaatatttttaaatatcccaaggtcactaaaatgcaatcaaaacccgttaaaatgtgccgggggggggtaaagcgtaaaaagaaagtgccgtcgtctcccaatcgcttttcgtcttccattctttgcccttccatttgaatttcccaatcatttcaaagtgttcctaaatgtaagcttattttccaattgtcatttccccttacatttgtcctgtaaagaatttaatatcactttggacaatcgttttgttttcctccagcggcccaaggattagccgtgccgtgccacgccgagaagggaagggattagccgaagtcggcattccctcctccccttttggccctttccttgcgccgtgtttatatttatacactcaccggcacagtcagtcactaattaagtgattgtcgcatcatcagcagtgcctacgtaagaatggcctaatttggccatgacaattggctgctgacatttggctttaattcgcaaaaatcggcgtacaaaacgccgaaattggcggcaaagtgagaaaggcattttgcagcagtttcagtttcaatttgcattaaaagcttgattgtgatatttttgttaatccgatttgtcggatgaaatgtccgtctc

SEQ ID NO: 15696 - DNA, 3233 bp, Heterodera glycines
tcttaattcattccacgcttccctgagctggtcattcatcttttccctcctccgtcttcaatcgctaaatccaatccgactcatttcggccccattttcacatttggcactttcaattattccccacttatttcattatctcaatttgcttcctcatagactgaccaaaccaaaaaatgctgaatccctccggtgctccaccagcattgagtccgctcgtttttccgcccgcgcaaaatcagcagcaggacacgacggcgttcgagcagttggccaacttgcagtacagcttcgcctcgctgctctcctcctaccaatcccaactccatttggaggaaccgctaaccgccgcactttcgcacgactcttcgcagtgtccccaggcgaccagcagctctatgtcaatggcacccctttcgtcttcggcaaatttggccggcacgaaaaacttctcatcgtgtcgacggagcagaacaacattcaacaatgagcaggtgggcgaattgctcgatgataagcactgatcagtccatcagatcaataagttggaggcggtgttcgtcggcacccaatacccggatgtgtgcctcagggaacagttggcaacgcaaaccgggctgagcgaggcgcggattcaggtgccaagggggggggcaatttggccactctttgtttaccatcccaccttcgcggcttaggtgtggttccaaaacaggagggccaaggcgcgcaagtcgatgaagcgatgctcggcccttccccccagcacttcgctgccttcgctgtgcgccaaccccaactttctgtgtccgcccgaaatgactttggacgtgttccgtcgctgctccctctcctcctcctgctcgtccacctccaacaacgagtcgagcccccaactgtcgcctttgccaaccccgcaaaagccaagcaaatgccccaacagtttcttcatcgagaatctgatcgagaaccaaaatggaagcggataaaaccgagtgaatggatgccaaattgtgcggtgaatatcctgaacaatcccataaatgcaatgaatttgtaattaatgaaaaataatcagccaattcctctcaatatttattgactctaacaatgattagttcaataaatgcttgattaattatgcaatttaatgtcaaatgaggtcattcttccgctcgttctttttaaagttcgtcattccctttggcattttttgtctccgcttttccatttccgtttttcctttccccgggcaacaattccatcgccgcgttgggaaaagcgagaaaagagacggaccgatgcctttgctcatctccaaaatgccgttgtcgcaccacaaaagcactgaaagtcgagacgcaatttgctatgaaatggtccgccattccaagcagtgccaaatccatcggcacattcgctcctccggcacttcttacggtgacgggccaacgcacagatttggccaaatgggcgccgatttgggccaagcgatggtcgcgatcactggcgacgaaaactgcggacgcggagagacggacgacgtgaaaacggacctgagaagggccaatgtgcaaatggaagaatgtgtttcgaggcttccccaaacgaaagacctcctccaaaatgatgtccatcgacgggtcgcatgcgtccgccgtcaatggcccattctcttcttccggccccgtgcattggccactggcaaacagttgtcgttttcccattacattttcttcccggagaaattggcacacattttcctgtcattccaaatgcgattttgatcataaaatgccaaactgacccaatctctgccatttctcaaatgaatgccaacgaatgcctttccgtggccaaagttgcgggaggcaaattcaatcgctttttgcttaattcgatcattccactggccgaatcgctggatgaaacggtggtcggggcggacgggaaaagcggcgggggcagaagaaaaagcgaggacaggcgaagaatgggcggggaatttaaaatgggacaatggaaattaaaatgaaaccactaaaaaagaaggggttaaaacgattcatcggcattttgccgaaagtcgtaagacccaccaatcgccgcccccccacgtgggactgaattggccgagactcactccgtcgcccatttttctctgattgtctccctttgcgtgtcgaatccgcccgtcttcaccccaaaatattcttcgcccacaaaatgtgtgcctgcgtaacgccaaaagggaccgaacggattcccttcggtggcatgacagcccaaaagggaggcattggcaaggccagggcgaggggaccaacagaacactgaagggggggggggggtaattaaaaagtgccgatttggaaaaaatgcatttgagtggcataaaccaaagcggagatttttgcgcttttaactcatttgtgttttttatttaatttgagaaaaaaaacaaatttcggctttttttggactaacaatttgcaatcaattttttcaaatttcatcttacaattttcttatggccaataaatttttttaaatttcgaaatcgcagcactgacataaacaatgttaaaatatttgttttttttctcatttctcagcacctcttcgtttttccattggccaaatttttggagcgattccatgcgaaaagtcgcggagcgaaacaattcggtgaaattgggccaatggcggcacgaggaaaaattggtcgaattcgatcattcccttcagttttattaattttcaaaatgaaatatgtaaaatgcccaccgcctcttcagcgcccgggggataatttataatgggaggcaaaaccaaagtccgattcagcgatttagcaaaggcaaacgcacccaaaaactgttccatttggttgccaaaacgcccttaattaaaaaatgaaaagctgcgactttggcacggcacgaacccatgcaaggacaaaagagaacgaaggcatcggaggagggaaagggcagcgaaaagagggaaagagcgaagagatggcaaaacaaacgcatggaaagaaagagcaacaaaaggggggggggacttttgagactcgacaatttgaatggttacataaaaaatgaaatggaaaatcggaatttaagtcggaccattggcaagggaaaatttttttaaaagaaaaaaatgtaaatttattatactaacaaataagaaaagtcaaaatacaacgagaacaatgagcaaaa

SEQ ID NO: 15697 - DNA, 1185 bp, Heterodera glycines
atttaattgttttatttgttatttaataaagggtattttattttattttttggttttaccaagtatttgaattttaaaaatttttgcttggcgcccaaacgagctggcgcccaaacgattgcgcccaaacgtgagcgcccaaacgggtgggtcccaaaagtcgcgatattacaaatcagctcgccagctgttgattttaaaaaaactgaaactttggcctcaaaacggaaaagtaccctttttattagtgtcgccctgaaaaaatgatggaccatgcgaactgttggttcggggtgagggacactatagtctggacagtatagtctgagccaagtttagagtatcataacttttttctcagcgagccaaattttataatctaggcatcattctatagcactatatgtttagtcgatggcaaagagaatggcgaatttttctcctccttctgacaacactgccccaaaaaaatttctgtccgaccttgaccaactacaaatccccaaagaaatcgactcagacaactccattcccgactacgccaagttgcttatcaagcagcttcattcccttttaagcaccgcctccgtcctaattcattcacaggctgcggctgtcgacgcggtcgaggaggaacgacgactgagaactgtcgttgtgacaaatgtgcccgaaagcatatcggacaaagcggcggagagagcccgggaggaccgtgccgttgtggacgaaattttgaatgccacggacgtcgaccaggcaccaattgtcttccgcgtcggcaaacgaatggatggacgaccgcgcccgctcaaaatggaattcccgaccaaacatgcagcgcgacacgtcatccgcatgcgcggaaaggtgcaggcattgaatggtctccataatgtccgcgtccgcgagagcatgaccaaggaacaactgtcggagcggcgaaaattgattgaggattgtgcgaagaaaaggcagacggacagcggtgattgggtgatttatgccaatcaggttgtgctgagacaggacattgaccatattcgaaaaaattttttttattatttttttatttttttggcggcgatctcgtttttaattgttttgcgctttcttgaggacatttttttaaattaatgttttgtcctcaatgtaagcggatttttcccttttgtggactttttc

SEQ ID NO: 15698 - DNA, 1722 bp, Heterodera glycines
ttgtgatcattttgagggaggtgaatgttattaatttcttcctcagggtggacgagtcggagaatccgtgcgtcggcttcgtgatacaatgaagtgatcatcttagacttctcggcgaaagcaggatcattgttgtaagcctaaactactaagaaaaaaatttatcatctgaaaaattcaattgacatgtgtgaggccaaggattctgatctgcctcttcatgttgcggacaaggtgaaaaaaacagtagcggacactgcatgccggaagcactgtgcggaccgcaccgaccattgccaactcgaagtccattgaaattgtctgcggcgcgaaattcggccatcgttccaaaagaagctgtaacatgcgcgtataaattgcggcacacttcgatgttaaaagacagtagcaaattggaaatacccaaccatctctcctaaaaagattgaacattgtgataacacaattaactttactttgccaacaacacataaatttggctgaaaagcggtggcgtcaatgaaaacgtgccgtccgcgtaaatgtcactcatctgatgggcccaatccgccgtagaagctcttccaaaaatgagaatccttaataccggttcaatgatcagcatttaatgtataaatgatgtctcaccgttgaggtccattttgtccttgaatttgaaaaacgccggtgtcgccaatagaaattgttccaatttcagttcgcttgtaaatacgataggtatttggaatttccaactgctccaaattgagaggttcggtccgcggtgcattttcatcacggcgcaatcgtttgattacctaaaaacaaaaaaataacaaaattgtttttggatataaacccacttttttgtggcgcttttgctcggaaaagctgctagcacaggtgtgcatgtgttttgcagcacttgagcacgaattgtcgcaggtgcctcgcacgtctcagcagcacgtcgcttgagtccagttacaagtcgctgacattccacatgcgcagcattcatgtcgcacgaatgaactccgaccaacttctgcacaacgttatttaaatccgtgtgcaaacggcctgaattttaaaagatttgcatcaaaataatatattaacatacccttgcatttgtctgacgggccatgaaactcacatcgccaaaatttcttaagtccatctgcgctcaattggtcgaaaacatagagtgcgccgtcatgttctaacttaactttgtccctgatctcatgtcgctgtccagtgggccttggactcaaaaatcgaactttcttggttgttctttttgatcgtcgcagttccggtgtttgttcttctgtttcttgttgttggtccctctgatcagtccgttcttgtggttgcattcgatgatcgggtgatggtgtgttttgcttgtgtccttgtggcgatcggactggtgaatgaactggtgccggaagatattgttgaagcggtctgatcacttcgtcgtttgaccactcatgatcagtgccagtcgctgccgatagcctcactgcgtttgcttgacgtgtgatgatcttatgtgctaattgtggggattgaattttaagaattaatccattctttgccacaattttgccaaaaagccaaactgttttaccgttttggtaattaacaaactgtacttgatcgcctattttgaactcaatcctttttgctcccatgttttctgttaaactg

SEQ ID NO: 15699 - DNA, 3962 bp, Heterodera glycines
aaaattgaagtttttgtgttttgctacctaaaagcgttaataaaattttgtttgcccattttaatgcctatttgaggatttttgtgcccatttaatgcctattttgcgattttttatgcctatttaggtgcctatttcgcgattttttgtgcctaaaaaatgaagccctactcataataaataaataaaaaaattttactaaattgaacaaataaaaaatccctaaatttgaaaacgtttatgtccatatttcgcgattttcgatccatattttatggtcatattacgaattatatccatataaaattacaagccctacatcatgaataaaagaagtccagcgtattctttttgattggaaaatatgagatttatacacgtacatacatataagtgggggaattctccacctacaaatgttatttaatttattactaatcactagggatgggaattttatgcaaatgcatatttttttcctggcttctacatgctctaaatagtaggaaaaaccctttcttttttgtgtttgcgtataaaaatcggacttttatttgcatatttttgcatatttcgagatttttgtgcatatttgcatattttggctttttgtacatatttcgccattttttggaaaatttgttaacaaaaatgcaataaaaacggaaaatacacccctaagaatcgaccgaaaatttttaaaaacacaccactaagaattggaaattttctcaaaaattcttcccccaaatttttttttcatgagaaaatttttgatttaaaaaatgtcaatatttgctaaagagaattttataaaagaaatgtagaagcgcattggcaagtgcattagtaaaaaatttttttttattgaatttgcacccctaattttcaattttttagtgcatattttacgatttttgtgcatatttggtgcatatttcacgactttatttgcatatttaccgtatttcctcgattataagccccggggcttctattgttcaacccccctccaaagggggcttatattcgaggggggggggggcttcccgtataatcgaggaaatacggtatgtgcatattttggccacttttcgtgcatattttttgcatccctgcaaataagggtctggtgtgagttaagtcatactgaaatgtcagtactgaaatgactgatctcagaagaaggtgatttttctcatttctcttccttctttcgttttattcgccatcgccacgttcacgtttaaaaatgtttctacaatgttaccaaccagcatctaaaacattttaaagaaactttgtttttttaatattttctagagagtacataaaatctcaatgccattgcgtttggatgtaaaacggcgattgctggcgagatccgatcgcgttaaatcggtggatttacatctcaatgagccttggatgttgatttcactttacaatggctttgtgcacatatggaattatgactcacaacagctcatcaagtcatttgaggttgtcaaaattgttctttttctacaatattttgatagagccttacaatttcaaggtttgtgatctgcccgtgcgtgctgcaaaattcattgtgcgcaaaaattggatcgccactggttctgatgacatgcagttgcgcattttcaattataacacgttggaacgtgtacatcaaatggtttggttcataaacttaggctaaataagaaaatttacaggaagcgcattccgattatctccgatcccttgccgttcacccaacccaaccatttttgctgacttcatccgacgacatgctgatcaaactatgggattgggaagacaaatggaagctgaagcaaacatttgaaggttcgaactggtttttgtcgaccatgggctataaccaaatttctaccgaattttttaacaaattttgtcaaaaactgcaactccgttcatgattatccgaattgagtgattttgctttcgacggccccgagtattctcaatttccggtgcaaaattttattaattttaaaaagattatgaacaaaaatgtttggaaaaccagtttataatacaacgaaatttttgaaatttcagtaaaataaatattttatgatatttaaattataaagccaaaaactggctcgggccccaggtgaccaagtactgcctgtaggcgccgtctgggaaaaacgaaagttactaaaaaaactatttttctccatgacatttacaattggatttttgggaaattacaattaattaaaaataccaaggcttttaataaacatttcttattttcttgcataaaggttttctcaatgctttttaaatttatcatcttaaggacacacacattacgtgatgcaattggtgataaatccaaaagacaacaatacctttgccactgcatctctggacaaaacaatcaaagtttggcagttcggaagctcagtgcccaattttacgcttgagggtcatgaaaaaggggtcagtccatggatcccactatcattcgaactttgggtaatggtttatcgaaataggtcaattgcgtcgattattatcacggaggtgagaagccctacttaatttcgggtgcggacgaccggctaatcaaaatttgggactaccaaaacaaaacttgtgttgtcacgttggatggtcattcccacaacgtgtccgccgtgtgtttccaccccgaattgcccattatcatcaccgggtccgaggattcgaccgtgcgcatttggcatgtgaacacaaacaggtgaattcatgtccatatatgaactttctttttgatttttatacgattattttcgtttggtcccatggcttagtcagaattccctaaaatttgcttcctttcttccatgggtttgaatccgcttcatgtcctgataatttacactgattatttggcttatgattataaaaaatgctgttcacgtactgaacaattatgtcgaccatttacaaaatgaagccataaatctataaatcccaaattgcttttcaattttccttttttggaaattgtttttcttttccgacagacttgaaacaacgctcaattatggtttggagcgtgtttggtgtgtcatggcccagcgcggctccaacacattggcaattggctacgacgaaggctcagttgtcatcgcacttggtcgagaggaaccggccgtatcaatggatcccagtggcaaagtgatttgggcacggcacagcgaaatacaactggcaaacttgaaaaccatcgaagagcagacgcttgaaaacattcagggtaatactgaattttatttatttcattctaattcatttaagacggggagcgattgtcattggctatcaaagacatgggatccacggaaatatatccgcaaaaagtgcagcactcaccaaacggacgctttgtcgttgtatgtggtgatggcgagtacattatctacaccgcaaccgcattgcggaacaaagttggtttcggtgccgaacattattggacaaaggggggaaggtcaattttcattttcgcacagtaatggaggcaatacgaagagagtatttttattcgtgcgataattttgacttcttaaataagggcggtgaggagaggaggggtatttcgcaaagaccaaacactctctgatcagtctttgatcctctcccataataacactgctttcagtcctttgggtcgagtttcgattttgcatgggcaaacgatgccaacttttacgctgtccaggagaattcgcagctgatcaaattgttcaagaatttcacggttcgatattacggcttacttttttttctagaaaagtaacatttaggaacttctccaaatccgacccgatgtgatggttgagggcattggcggtggtcatttgctcgctgcgcgctctgccggttctcagagattttacgattggagcactggacatttgatacgccgtatgactcta

SEQ ID NO: 15700 - DNA, 4048 bp, Heterodera glycines
tggcttcttaacattgtttttgtgtgatttaaccgtccattaacaataagagtcgagttttttaggaaagaaacatgggaaccattgggtttatacctggagaatttagaagagagaggggggtgttaacagatttttaaaggggatgcgatggtactcgaggatcctttttttgcagcgaaaaatgcatccataatgatgggctcaagaactaagaaagaatgatttggcgtaaaaaatcttaaaaatagtgcgaaatttccaatcccccccccctcatatggcggcgtttatctgcacggccggaccccttctgttcgcccaaggttttttgaaaaaagcgtcacaaaaatgaagtagaaagcgaataaaggccgtcgccaggggacttccccaagccgaacccacgcccccctccccattcttgaattaaaaaataattttgttccaacaataaaaatggtacatcttgattatcttcattgatttgatgaaccatattctaaaggactgatttattcaatctatatcacaaatttttgctttttttatatgctgtacaaatccctcctacagtataaaaaggcaaaatcgtttgttgctgttttcaggaaagcaaacttgaaggacctttcaacttttccgcagtgccattgcatgggaacttcaaagatgttgaggcaaaagtgaacgttacaaatcacattaaaccggtgtggatttgcagcattaacacgcacaaaaagacgttggcttacaggtatttgttattaaatcagaaaggtattttccattgctaaagccaggctttgtttttcctttccaacggatatatgtctaacgcttaagcagcttttcgatattttagtaacacttttaatgccaataattgtgataattacatgaacaaaaattaagacttttttcgaggtgctgatcacgaatatgacatcgactgcgaccaatttcgaacccggaccggaattcggaaataatgtcaaaaaatcaaattttatgaattttgactttgtcgagttcgggtccagggtacgaaattggtcgaaagaaacggtcatattcgtgatcagagaccagaaaaatcatcctgaaattttttaaactatattttaagcacatttattagcattttaaaattgattaaatttgtatcctaaactagaaaaaatgttcctgcatattttgttactactgtttttgtatttatttgataaccaacaacacaatttcagttacgaagttccgttccaaaatgcatccaagctgatcatggacaaactcatgcggtggtaccacagcgaaaaccacgacaaacagttttcgcttgttccgcttccatttcaaaatgttggacggatgagagaagcgctgaacaaagagttggatgcgaactacgacggttgtcgggatttcgtaggtataaatattatcgttgtgctctttaattgagttatttttaaatttaattgttgttccattactatgagcaaaaaattaaggaaaacataattgttaaggataccttttttagcagtggcaacattgacttcgggatgggggctgaattcaaaaagtcgatttttaggagtgtattttcattttcagaaatgtagaattaggagggtgtgttttgcagatttgttttttcgccataaaaatgaatttttttttttcattttgggggtacggcggtgccggcggaaattttaatgcatttgattaagaaatcttttgctctttgaaagtttacacggccataaaaatttacgcaaccattaaaaatagcaaggtcatttaagctttcaaaaacttatggagggaacattcaaaaaattaatttttttattcatagagctacgcctattacaattagcatggacaaatcctcaaataaatgcccatttccctttctaatttaacgcgttgtttaggcggtgttcatttcttcaaagtgaacacctccaaactgacagctgcgctgcactataccattctgatgccaagcaacaacgaacaatccaggtaaaaaagctttgtctttgtcctgttgtgcaagtgggtagccagtcccttggctttgggtgggggagggctgaattcaaaaattcgattttggggatgtatttttgaaaatttggcctgcgatttgttaagagttgcttaaaatattctaaaaatttaaccaatttcttgaaaatttttactttttttgggtttaaggcggggaaagccccctccccccccatggtacgcccttgtgctgacgcaaattatttgaaatttaacagacaaaacagttggtacatgcaactcattaaccaattctggcgcgatgatagcagcaaaaaacagtttaaaaactaccaaattcccggatctccgccctattggtcaagcggtttcctgtcgcttcagtacgcaatcgaaaaggcgttcatcgaattggtccgtatcaatatatatatttatataatattttttaatggacttattgttaattttgtgtattttttacattgtgctcaattaaaaaaatatatagagatttcacttttttacgtgcttttaaggccaatggtgacgatgctttggcaaatgtttcgctccgtctccaccgtttgcccattccgtcgtacatgaacaagcaaatggccaccataacggtgcccccttttctgaccacgcttttgtttgtgtgcgccttttccatgctgaaggacattgcggtggaaagggagtccggcattatggtaatttaaatgggataacacatatcttcagaaaatacaaaaaaaaaaaattgatgaaaccatacattaaatcggtggtcggcccggtcgtttacgaacgaatgttagaggtgggggggggtttaattgtgcgaaggagtccttgccatgtagatcgacgagcttttcataattttttttacgattttagtcaaaaaaaatttttttttttttttggctagttgcaagactgaaaacttcttattattataaataattaacaataatgattgcgttttttaaggcttacatgtctgtcatgggcttgaatcagttcgctttctacggctcacatcttttgattgctgtgctcaaaatgttgccttttgctctgatattcgcttcactttgtgttatttatcgactcattgaggtttgctatttgctttacgacgagggcatagccaaaccgtcgacaaaacactaaaataaaattttcaaaacatggattcatcctttatttgatccaactttttgtttcagtcggactccttcctcttcatcgtattgttcgtcctctttggcatttcgatgttggcatttgcgcttttcctcagcattctgtgcaagaaattcccccaacttgggcccatttctctgatggcagcgctttctttttgcgcgcctcctctcttttataagccggatctcgcaaatgtgccgttgtgtctgctctcatcgcttaatccctttttcgccttcggaagtgccttgtatattattgaccttgccgagcaaaaaagtaattttcaatattttctaagggcacataatcacgcgtcccttttgccacttattgttagtgccaaaaatagttagctctttacgtgccattatttcggaggccataaatgacataattcaaaccaaaatcattgcgtgcaggagttaaaagaaaaagtttcgtttgaaaattggttttcctaagatttttcttgaaaatttttcgtggggaaaacgacgcggtgggggggggggaatgaagtgcaccccagggacggtcccaggatttttttcacacccgtttttttatggtggcgcggtttttccaaaaaaaaattttgggggacagggggtccggcggtgccgataggcgccgccgggaaaatttttgcggttttaaatgcggtttgttagcagattttgtccaaaaaatgaccaaattttgtgattttgagccatttttagcagattttcattaaaatttgtggattttttgaaaaatttagcgacatttcttg

SEQ ID NO: 15701 - DNA, 1076 bp, Heterodera glycines
ccgatgaactgcatttagagccgcaattaatacactaattgattcaatgaagcccccatttcatcaacagacagatgaactcgcgactgatgactcgtcgcagggaatgaacgcctctaacgctgatgatgatcaaccgagtgacgtgccgatgtgaccctgatcaatttgctcattatacatacatattgtagaaaaaaataacaatgataataattcggcatttgtcctttcacccccaggcactcctttcggcacttattgtacatttactgaacacactcgccaatttcctcattatacaagttcgtcttttgtgcttcttctgtgccagaaaataaatgttcgagattcatttatttatttttcggtttcggtgggctttagcctcctaagcccccgcccccttcgctacgcccttgcggagatccgaatttgaacagcattgtggagaaatacgagggttaattttctggggatttcagccctcatttgagcagccctaattggtgcatttaatgtcaaaagtaaaaagaaataaaaaatatttcgtcggaaagaatcattaaaattaatgagcaaaaatggatcagcagatcaatttgtccattcaataatccccaataagccgatcatttctcaattaaatttcacttccgcacaattcgacgccgcttctttctgccgctttttcgcgcctttggtgtggacgacaatggcctaaagaaatggcaaaatctacttcttttttttttacctcgaaaatttttaaattttaattgaatttgcctctgaacaaaaagtcgaaaagaaacaaaaaccccaaaaattaattgcaattttaaattttgattttttaaagatattctcaacgtaacaaattattctaaaatttcaattattttttaataattttacgcaaattttgctcaccaaatgcaatttgcgccattcaaataaatgctgacattgttcaaattgttgttcgaattttgttggtccgtccattgtgcagtcgttgtctccccattttggcatcgcttaattatccatcgttcgttgttgaccaccatccg

SEQ ID NO: 15702 - DNA, 1320 bp, Heterodera glycines
agaattgtcggcgaaattcggcaccgcaatttggccccttcaccatcattccgagatgccaagtggcgaatgttttgtgcaaaacgtggccaaatctgtcgggccaaaaaatcccagctcgggtggattttgccataaatgcacacgtccaaacacaaattgatgcctcttccatcgtcgaaaatttgtttgtttgagcgcagaaattcgagcacggattggttaatgtacctgaaaaaggggggtgcctatttcaaacttagaaatttaaaaaactacttgagattttttttttgaaaaattttcggaggggttagaaatgagctgctccggaaaaacgatgcttttttcattaacaaataagtgcttataattaatcaattttttaattactcaatccgaaggtgcgtaaagcgaattctgttgggcagcgaatggtcgggccacggaaattccacaaatttgccatcgatcagaacagaaaatttggcgagttttttgtcctgtgtctttgaaattctgatttgtctccaaattgtcaattcgattttgccgccgaaatgtttgtccaccaacgcattgaaacggggcgaaagcaatgccaatttgagaccaagttgggcacggtcaaaaaatgggagaacgtccatcaaaacgtcgttacaaatccagctaaaaaatgcggggaaaaatgattgaacggtttttaaaatgcttaatttaacacaagaattcggtttttgtcggtattacgcattgcatgaatgaccaatgtcctcagtttcttatcatagccttcatttttggtatcaaacgaaagtttaaagcctgtaaataaaaaaaaaaaattttttatcgaaaaagttttataatttctttttaatgccagtgatttgatcttttcttgcatttataaattgccgagactttaagctttcgattggtaccaagaatgcgaagcatgattaagtaagaaaaaagttatggcccaagaattcatgggacggacgcgtaaaaccgaataaaactgaaaatttggggttttcggtttttcacattttcgtcaaagttcgattctttttctttgccactcgaagacttcgccgtttgccaaatgctgtcacaagtgaacccatcaattgctgctgcttttcatgaccaattgcggcggtagaagaagaaatgaggcggcgattgtcggcggaggaaaatttttgcttttttgtgacgggcggtgccattaaaaataataataataataataagaattgcctaaaggaaattttcgtatggaaaaaaatactaagggatttcgaaaat

SEQ ID NO: 15703 - DNA, 1060 bp, Heterodera glycines
agggggtcatgatggagggaaaggggagggaggggatgtagggaggaggatgagaggggagggaggaggggatggatgtaggagggggacatgatggaaggaaggagagtagaaagaggggaaggggacggtgagggccgttctcctccattacccccgcccctctcccactaaattcgtcactgttcttaaatcacaacttaacatatgcttttacagattcgttgggctcgacaacgacaggcttggatggctcgtttaaggtgcgcggattggaaaatgaagtgagagaattggggaagtgaagccatgcgaccgtttctctcctcagatcggctccatccgtccctatttgagaatcacccacaaatgcgacgtgaaggacgaattggtcagtgaaatcaaaagtcataatgaaatatagtggggtcgaccccttatttctctgcttttattgagcctttatgggggatttgtccaacacttttccttttttggcattacttcccttccccttcttctgatgtgattttttgttcccttagaaatgccgtcgtgtaacggagatcgacatccccaaggagaaggtgaacaacgacgtgtacgagatgcattttgtgaatttaaatgtgcatggccatagggacacagagaattgcgatgagtgaccaaaagggaagaaggaaaagcgaaatttgaacagatcaattggtaaatcaaattcaaaatgaactgatcaagggaaatacacatcatttaaaaatgagaaaaaaagtttgtttcctctccctccaaattgtcacttcgtccgtttctcttttgtccctctccctccaaattgtcacttcgtccgtttctcttttgatccgaaagtcttccgatgggccaaaagttcccctcgaaatcagaaaggtcgtccctcttctgagtccaagtgaacttcgggtcggacacaaagtgaatgaatgagtcgtccttttgtcggccttccaattcgatgagaacgatcaaattttgctctttcatcaccgcccccggcacaaagagagtcaactgacaa

SEQ ID NO: 15704 - DNA, 1477 bp, Heterodera glycines
atttcaaaattcaaaaacacctgcggcccctgcgttggccaataccgtcccaaattgaacccatttgcgagagcgacgccgtggccccaaccgcgcgagtcgagaaaagtgtgcatttgggcccaatcgatgtgagcggtggggaatttggccacaaaaatggtcggctcttggagaagcgcagaacgaattgtgtcggtgggctgacaaatgagcgaagtcattcttcgcattggcaaatgctttttcccttcaaatccctcgctttccgacctcttttcgattttttgacttggccattcgcttttcgatttcggcgtaaacattgtccaaattcaccccgcactgaatccatcgtttgctgatcactttgccatcgatgaaaggtggcgagaaaagtcccttaaagttaactgaaaagcggcgggggggggacggcactttggggtccgttttggtcagagggtacgtaagtcggccgatgttttccacttaattggtgacatcgttccgttgcgcgtttccttctccaacccacccaaaatgtccattctctgtcccctttttccgcctcctttcagttccattttcatctgtccccccgttttgtcattgacactcaaattgccctgcgatgagaaagaccaatgttttcacttaatttttccctttgctatttgcctgaaatatcccatccaaaaaggcataagcgtggtcgcgaagttcaggcacttccaatgtttttccgtccgtctcgagagatgcgctgtaccaaacaaagccatggtcccggtaaaacgcctcaaaattcaacggcccatcggaggagtgaatgcaccgctggcgactgtccgaagaactcagcgaactcgaattggtcagagcgatgaaatcgcccaatttaacggcaaaaacattttggatggaaacgccactaatgagtttggtaaatggaaggaggggggggggggggaccaacgttctgttcttgggcagtggcaacggcggattgggccaatcctttttggcgccgatccaatttcgaatggccccgtaaagtggggtgatttgacccgcttcatcaatgggggcagcgtaatcgtacgaagtgatcacctgaagtgacgtcattcatcgcccctttcgccactcacaggcccattcgtttctcttccgctccaaaaaccaaagctcgtccctccatgaatcatgtacagactgaacgaagcgttttccgcccacatgtaatccattgttttcagaacaggaccgatttcctggcgaaccatcgatttttcgccccacatggaaaaccacgtggtgtaaaactcggaattgacgggaggacctttttgggaaggtgaaaatacacgcgaagaaatgaaagagagtgcacaaagacaacagaatgccaaaggcggaataaatgaaagtgaatgccaatggtccttctgtttgcttttgaacctccttggag

SEQ ID NO: 15705 - DNA, 1829 bp, Heterodera glycines
ttttgatcagagtttagaaaaaaaagttatgggccttcaaacgcaagcaaaaagtgagaaattagcccgccgggactcagttggccaccggagagaaaaacccgtatttttcccagatgcgcctcaaaaagttgtaagacccttccacaactttcagggcgctcccggccttcggccgggagattttgtttttgaagacgaactgcaacgtttctctatagtaatataaactagcgggtggcgcagtaattgctcggtgtagacagtatgctttgcacagtgattgctcggtgtgtaggcagtatgctttttatatgtatggacgggcgctgacatgagcgcttcgcgcaaaggacttcgttgctagtgcatgcgcggttttgaaatgaatttatggatgtgataagggattttggtatataggtatcgcgaggacgcattcataattttgtggaggactttcggccgcttcgcggcctcaaagggcgctccgcaccctttttatatttaaggtttaattcggccgcttcgcggcttcaaagggcgctccgcgcctgacgcattcataattttgtggaggacattcggccgctttgcggcctcaggacgggcgcttcgcgcccgtttttaattttgtggggaacattcggccgcttcgcggccttaggacgtgcgcttcgcgcccgttttttaattttttggggacattcggccgcttcgcggcctcatgacgggcgcttcgcgcccgttttttaatttttttgggggatattcggccgcttcgcggcctcaggacgggcgcttcgcgcccgtttttaattttgtggggaacattaggccgcttcgcggcctcaggacgggcgcttcgcgcccgtttttaattttgtggggaacattaggacgcttcgcggcctcaggacgggcgcttcgcgctctcaatattgttcttcttctctctatgcgtttctttagcatttaacataatgaaagcaatgaatttttgaaaagttattaaggggttgtttcattaaattaaaatgaaaatattttttaacaaatttaatttaaaaaatacatgaaattctatcaattaaaaaaataattaatttaaacttataaaatttatttatcaaaaaaaaattaaatataattttttatttattaactcaacaaaatattttaaattaattaaaatcattgaaaataacgtaaaaatacaaagaaaaataatgtacaccgcccggcttcgaacttggcccccccctcaaaatgatgcctcagaatccccaatcacacagggattctgaggtcttgactatgtcaaaagtacaatctgttacgtattcgtgatcagcaccctcaaatagccctaatgacatgttttttgaagatatttggtgaaaaaatttttcaactcaaaaatcctatgctcacccctttggtcccgaatctcaaaatcacttttatttttataaaaattcttaaaaaagtgataaaaatgccaaataaaatttatattatagagaaaaaaattgcggatttttatagtattttacttttcccgaatagcttttcagaaggcagctacgaatttttttctgaaaaatcgaaaatttccagaaattctgaaataacttttttcttttttgaaataaaaaactcaaataaatcccgtaaaattctccttatttttctctatttttaaagctttattatagttaaatcgatgaaaccatcaccgagttatgaattttccaatattaacccaaatttccaggccaaaaattgccaaaaaataagaatttttaaaaaattcaaaaatatgaaac

SEQ ID NO: 15706 - DNA, 2885 bp, Heterodera glycines
aactttttttttgaccaaccaaatccaacactgttggtatcattcgatagcccttcagatactctattaccctgcaaaatttcaataaatttcgtcagttttgaacaaatttatggccagaaaggttagaaaatttggttttttgaattcttctggccataacgtttctgaacttaaacaaaattttgaaaaatttttaggctaattgatgacaatcaggtctatagaatgataccaacaaaatgctgatttggttgacaaataaaaaagttacagtaaaaaaaacccggagatcgccaaagtgggcggttcccatttttagcaactattttgggggtttttagaaactaaaactaactattttggcactttttagtaactataaatcgtatccctaattatgacgcggagggattttgacgggcagcggcctattttaggtccctatttatacgggccaggacgttttcgcgtggccgttttcgcgtgagggccgttttcgcgtggcagttttcgcgtggggtacgttttcgcgtggccgttttcgcgtggttgcatataaatgagaattcataactcacattatattttaccaaaatttgtttcactcttttttctaacgagtttttattttataatttaatgagtttataaactaaattaaggctatttaaattatataatatggatcagcagcaaaaaattaaaacaaaacgaaacaaagttaagttagaacatgacggcgcactctataacgacatcaataacattcacctcccccaaaatgatcacaattatgccaatgccaatgtgaatcccgaaaacattatcaattttctcattggtgtttcctgaaactatgaaatgcgaccttagtttgttctgaaatttgttatttttttgttatatttttataaaattttaattattttttccgtttgacgcacatccgaccaaactgacaaattattgtagaagatattagccgaaagaaataaaagaattaaaaagttaagaaatttgtccaaatgcgggttcggattcgaaacatggatgttttgcacaaacccgaccaatttcagtcctaaacagctactcacgcgaaaacgtaccccacgcgaaaacggccacgcgaaaatggccacgcgaaaacgacccccgaccgaaaaatgtgttagcactaattatcagcatttaaatctgacacattgtcatatatgttattttttacaaaaataaattataataatttgtgaatacagtggctactcgagtccaaatcgaaaaaatgtatgctaaaaatcatttaatgaaaataaaacagtgtctaggaaatttagctatatcatcgttcttgaaatacattcctgttgccaatttgttagttgttatacaattgttatgccttaaaaattgaaaattggttgaaaacaattattatttaaataaaactttaatttaatctttatataaaccctagtataaaatgcatgcaaacaataaaatatacaagcgtaaattcaagaaaaaattgcgaaaacgtagaaaaatttaaaaaaaattttcaattagtcaatataatacatgaagtgttcctctcttcatttataaacccttatcaatttgtaaatttttcgataattctgtaaaatactgttgcagtaatatcaccccacaggcagcaggccaataatctattatcgtttaatatacagacagactataataccgtatccgtatttgtccattaagctcaccataggaaaagccccacgtttgtgccgcattttcatttttctgtctttctttatttgcttcattaatgctttttgcgtgtcaatttcagccgggtcaatggacagcaattcgtggccatttccatttccaaaatcatttcgcacttcgctaattgaaatggctttggccaattcgatatcttcattctctttcagctttaatgattccgcaatcgcgtgttcgagaagtaatacttcagtttcgttgtggttagctaagcctagacatgatgtggtgattgacatataaaattttatcaaatttaattaaaatttttattggcattaaaattcagaaataaatatttcggctgcaccccaaaatgtcgctctgacgaaaaaagttttttttttttggtcataactttgtttgatgtcaatccgattatgctaattatttttttttgatattaatgttttgcgaaatctcaaaaatttcgttacttttcaaaaaattatggcatggccagaaggaattcaaaaacctagtttttcgaagattttttcccatgattttttttaatcatgcacaaaaaaaatttatcaagaattctgtgtgttaataatgcttttgaacaactaacaagatatctttaatttattttagaaagaaaaaaaaagttatgatccaaaaattcgtccaacaacgtttcggctggcgacattttgtcatggtggaaaaacctcatattaattaataaatttagttttcaattttttaaaaaatctaaaaatgtcagatagtctcaattgaaatatatataatttattttataaaattcacccgaagttgaagctgccaatgagctgctggatgttggaagatttgctgtcatatcatccgcatcagaaaacaacaaatcatatgcgtcggatgctaaatttaattaaaaattgtgaaaaaaatatatgtttaaaattttttttacgttttttgcccgctgagatgttcggctgtgaagaatcagcatcagacgtctggccatagctagttgctatttacaacaaaaaaatgaaacaaattaattcaaaattttcaataaagtcaaaagtaatttataccgcaaattcttggatttttttctggat

SEQ ID NO: 15707 - DNA, 931 bp, Heterodera glycines
ttatgtgatcactgataatttaaaacttagctgctattagttctgaaaaatgtactaaaataattgccaaaatgctgaaaatcgttgcgaaaattggtgttaaaaattgaaaaatccagtggagttctttatgtacaaaattccattggagacaaatgccgagaaacgagtgcagtatttttcattcttactgtactttgctaggaaatttctggtaaaaggcaaaatatttgctaaaagttcgagaattaaccaaataggccataaaaccagttttaggtgtttttaggtgctaaaaagttcgcttaaaagaaaatatagttttagtgcttctctcatcaagtacaattcttagaaaataggtaaaaacctaaaaatcataactttaataatattaaataaaattatatattaaataaaattaaacttactccatcctaaagcttctagatcatccgaatcgtagttctcataaccggttccgtcaatctgattgtcgtctgccgcctgtccatgtgctcgattcactattatcaaagcaaaaacaaaaatttggtgaaaatatgggaaatgcattggttgacactaaaattgtatcataattttttaataaatataaaaattgttaaacaattgaaatatgaaaaggcttaatattttaaaaaaattcacaaggattaaaaaatattataatgatatttttataatatttgtataatttattattttcaatgaaatgaagaaaatgaatttatgttattatacaatcaaaaataaaatttgtataaaaaatctatatttttgccaaatatgtcattgattgaagggctgagaaaattgccacaatttttttaaaaggaaacatatatttcaaatttaaatatatttattgagcaaaccacaggcacattagtgctcttatgtggcgcat

SEQ ID NO: 15708 - DNA, 1095 bp, Heterodera glycines
ctgttgcgcgtccgacgacacttggacaatcgctggcttttgctgctgcgacggctcgtcgccttctgatcgcatccgcattccatcttcgtcattcggaatgtctttcttcggtgggtgcgctttggagcagtacaaatggagcaacagctgtcggatgggcctttgagcagatgcctaaacatttcaaatggcaaagtttggcattttccatcaaaaaaaggcccacgagcactgcgcattgctccggggcagcgatacaattcagcgttttcggatcgaacgatttgcctgcggtaatttggcgttctgttattcatctttcgttctctcacccgaagggcacccaatcgccaacggtgccgaagcgatgccgcggcacaccaacgcctggcgggaacacttttggattgggcctttcccgtcaaaaaaataaagggtcgcgtcgaaagggcttcgctgagcgcaaaaattgatcgcctaatgaatgattgagcttggcattatggcagcatttactactaattatccaattagttaattactcctaattagccaattggtgctaattacccctgttttactctttcacctgtgccagcttctcagttgcgtcgtttaacaagttaacttccggcacaaaacaatctttgactttcctcgccattttgcctgtcaaagtttcattatttacgagcgaatgaatgcgtttcccttgcattgtttgcccacaaaaacgctgcccagcggacattcggcaaaggtaaagggtttttggtcgttgccgcacttcaaaaagctgaaaacaatcgcaaagaatttaattctttcaatttgtggccaaaaatgcttaaggatgggccaaaaggaaaattaattggaaaagcaaatgcaagtgaaagttgctgttgtttttgtgctgtactcttggaaatcgacagaattccatcggctgtttgtccctttttctgtttgtccattttttgcccttttgtccctttttctgtttgtccatttttttgtccctttttctgtttgtccattttttgcccttttgtccctttttctgtcgtcccttttgtccgcttccctttt

SEQ ID NO: 15709 - DNA, 1942 bp, Heterodera glycines
cttttcttcctccctttggttcttttctcatttgaccacctcgaactgcacgggccgagctgaaaagtgtctccgctgccgaaacagaaattctcgaggtccgttcgtttaatttgagccgaattttccaagggattttcgtcatttatttgtgaggaatccgacgacgaatggtccctcgccttcggcggtggcactttccgctcctccgattggacagaatctgaaagaaactcccaaatggcacaacagaaagggagtacggtaattggggggggggggggggggttacggtatgaaaggacagaaaaagcacagtcaaccaaaaacaaacaaagttctttgagaagagagcagcagataaatccgcgaaagaaatcagacgaagacaccaaaaagcaaaaataaaaaaacggcgacttatttttataccaatttaattttaaaatttatcggcaccttccgccgaagaatgtcgggagcgaacgcaaaacggcaaaaagaatatcaaaaagaaaattttcattttaatgtcttgggagagaattgaacggagtgttcccaaaactaccaaatctttgctcataataattcccactcagtcggtgaataatccaacatttgctaagacactgactaacgcagcattcagcttaaacttaaggaaaattgcttttgctatttttcggagaatgcataggacagcagcagtgacaagtcaaaaatgctcagattaattgtgagtttctgtagccccgtaattgacaaagtaaagaaattaagtattttatgcatgtgattagaaattgaaaaagtcggtgacgagaataaacggaagcaccggcagaaaaaaaaacaataaaaatgggaaacgaggagggactaatgatgcttagggaagggacaaaagaaaataagatggtatatacaatgttaaggccaagaataaaattcaaattgaggcgtaacaacaaaggcggactaaacaactaatccaagagataaggcgcttacaaacggaaaggaaagtgtcaaaaataagtcggcattgtgtaattgtcgagaataacaaaaggaaatgttgggattagtttgatggaatagtaaagttggacaagccgacgatgaattggactgaactcacaattagctgcaaatggaaatgccaatcggaacctgtccaaccctaagaatcatttcaaaaatggtatgtgttcgaatagcgagggtaattcccattctttagtcgtgttccgctattaaaaccacgggggtaagacgttaatgttgagtgactgctaatggccattcgtcctgcactcggtgtgtataatgttgcggttgatggacgagcaaaaacgccgctgttcctaatccttgaatatgtagggtaattgcgatggttatcaacggttgcagttgtgctgatcggaatgactgaagacgatctgagcggcactacgggcgtggagggcggcacggcactcactccgttgtgccgagccatcactctgttgcccctcccctcactatcgccatcatcgattgaacaacgtcgtttttcatagctattctccaatattaacggttccgccgagctgagtcgaataacgcctttgctggccaatggcgaatgcccgttgcagctgttagcattggtcggcccgactccgttgttgtacttggccaatacgtgatccggaagtgcatttggaaaccatttttcacatgataccgtcatcaaagattgttgatcatctcggtgtaaacgtcgctcgtaaaacagcaagtaggactttgtggagacgcggatgtcgccctgtccgatcggttgggacacacgcgaatcgtcgaaggtccgccattggccgtccaatgggttgcgcgttgtcgcagtgtaatgaccgagaatttgttctctgcagagaaatacctttcaata

SEQ ID NO: 15710 - DNA, 3366 bp, Heterodera glycines
atgcatttttctacctaaaatttgcaacttctcacgctctcttagtttaaattgtaatcttccatttgttaattatgcacttttaaaaagtacaattccgtataaattacgcctttataaaaccaaaatcatgtacaattgcattcattcccacaacccccttagttacaatagggcgataccgcttcgacaacttaacagaaataaccgtcccgtccttaatgttgggcctcaggaaattggggtactcaatcaaaattgaacaaatgtcatcatcatcatcatctccttcttcatcatcctcatttgaatggcacattgcgtagcgtaggacactcctcttgaatgtgtcaaagtggagaagctgacaggcatcggcgctcagtgttatgccccgtactttgagcaccgttttctcctccccgctttggcggtgccgcatccgcagggcgtactgtttgcacccaccggaaacaaattccacgagctcgtggtccggccattcatccgaaaggtcgcctaggtggggtcccgtctccagagggcacccgtccgcctcacgatgggcgaaacacacactgtccgtgtcggtgtagatgagcacagagtttggtgcgcgcgcaaccgtctgcattagccgcaacaagtggaggcgcgcgactgatgttgtccaaagagaaagcacaatgtttgagcactcgtgttcctcaacccattcgtttcctgccgcataggtgaccagaacgcattcgtcggtgagctggtcaacggagctgacctccaccgctgggttgtcaagcagagcgcgcagttccgcgggcgagtcggtcacaatcgttttggacaacccgttgcgtaaagagaatcgacccaaagggagttgttgcacagttttgcgatggtccgcttggccttgttgtgcaccatcttttcccgctcgattcggattccgaatttttcctcacattcctctatgaattgctgctgatcttcctcggctgtgccaatttcgtccgggaagccgctggcatgcgttttcatggccatgaattcggcaacgtagcctcgaaaaacgcggtcgctccaccgcgtatcgtcccactcgacggagcgatagtaggccgtacaccggtacccgttgcgaagcgcctcctccaactcgattgacgtcacagtggacacccacccccgctcatcatcctcgcgatgcgtgcactcgtagtcctcattgacggctccatgcggatgttgcagagcacaggtacggcacagcgggaaaagaagccgctgatcaaatttcacgggcagtacaggcacatcaacatggtggggcggcacaacgaacactttgagaatgcctcggaccggcacctggtcggcgcgtcgccagtcaaccgcctgctctgcctcaccaatgatgttcactcgtgttgtgtgacccacggggtatgctgtcacagcattcgtgtgggggtagagtgaacgaacgtcgtaatatttcatccgccacccctccggcacctcgtagtgtagtcgttgtggacccacacgtcctccatggtagcagtccttcaaacgaattgggccgctgtcattgtactgcgcaaaggcgcgcttcatttcgtcgttgttgcgcttctccgcgttgatttcacactcccaaaatacgagcacttgttgcacctgagatgtgatgaaggccatccgtctcgcatcgtcctcccgtatccgctgcgccgttttcccgttcgccatcactgtttggggctgaaagcggtgacgcgggtggtcgtgcgcgtgccagtggcagccgttgacctcaatcacggtgtcggtcgccgcgatgtatccgtccacagtgtactggccaatttttttctctccgtcgggcgaatgtaacgtctgaatgctcaccccgttctttttggcgtaccagtccatgaatttgagcgctacaaggctttgcgtgtttgtagtgtcgtagccgcactcgggcacaatggcgagctgatcccgcttgaggtgattgagtcgaaagtgtctcattgaggcactggcgatggtcatcggctcccacgttatgtcaatgccaccgccgatcacttcaaatgcattgtcgtcatcctgctcctcctcctcttcgtcgtcgtcgtcgtcatcatccaagcatccatgccgctccatcgggtcactgatcgtcaagaactccgtgcgaaaagcaaccaacgcctcaattagtatgcgcgtgtcgttggtgcagtaggctgcgagctgttcacataggtcgaactgctgatggcggtgttccgcgtaccactggtcaaatctgcgctgccggtcgggcgtcattccaccgtataagtagtcagcttttggcggtagcgactgcagaatgtgcccataattcgcctcaacattcgccaaatgagggaagaactccttatcctgcacattgagtccaaacgctccgggcagagcgcctagtggcaccggcataaggttccagctgtctcttacgatgatttccggatttttttcgcccctcgcaattttcatttcgtataatttgttaccacgtcggatcatctacgggcaaaatccgtagaggaagaactgccgaaacagcataatgttgtcaaagcgacctccgaaatgggtgaagagcattgtgggatagcgcggatcgaattcgctgagcagccattgagcaaaggccgccattggccaaggagtgaagaaaagggcatcggtttgccccccccccctcccccccccatttcggtgaccatcgctttggcaagtcggacagccccaaacagcagcagaagcggaacagtgctgctaatacacataaatatttacagctcttaaaatgcataagcggatcggcggatgatgtgatgatgagatggaaatggctgtgatggaaatgaagcggaggaagtgagtaattgggaaatggaagcgatggctgtgttatgttggccacagaaaaggcgacgctggaaggggtggacgtggaaggatgaggggacatagagggcagggggaggggaggcggggaatgatgttttgggacggaatgttgggaagggacgcaccgttggaatggggggggcaatggacaggcgaggggaccattgccaggctttgacgggagaccttttcggtgtccgcgtccaatttgcgcttatcagcaaggcaaaagttttgatgcggaaagggcggcattgagcgagcgaagcgttgatgatggtcgggaatgaatatggaagggaatgggagaagggggatggagaggcgagagggggcggggagggcggatgatcaaccttatcgggaaggcgatttcggagtcaacttcat

SEQ ID NO: 15711 - DNA, 1618 bp, Heterodera glycines
cgggcggatggcccgggggacaggtttttcggctttttctcgaggctagtgttaattagtttgtgccctttgaaattaggcatgccttccggcaatacaaatggcttttgaagatgaaacatggagcctgatttattgccaaattacgcattgttacttcatcagtttaatagcaaggcatcaaaatgcattttaaatattccgtcaattttaaaacaattttaattttcttttcaatccgtcccttttcttcaatgccaacctggcctcactgcttggcaattatttgaattgctttacaaacctccgaccaagctgatcttactttcgggctgcagtcccgtcacgacgctggtgaaaattttgaaaatcacatttttccaaataaattttaaggggccgaagcggcgcccgtatggaaccttctcgtggttacctaattcaataattaattgatttattttttacatttaaattttttctttcatttcaaagctctcttacggcgcttcttctcccgccctgtccaatcgcgcccgcttccccactctgttcagaacacatccatcggcaaatatgcaaaatccgacaaggcataatttaaaatgcaaatgaaaaattattaaaatttattctccaaagaaattcagagtccatttgtttgagaagttcaaatggaaacggatcaccattcttcaatcggtggaagaagtattcgactcaaccgcaaaagtgatcaaaaaatgcatgaaaaacataataaacgaattaattgaggatttggaagaacaatgcagcgaaaagggaattcgcgtggaaaggcacagtttttatggaggtaaatgttagaacagaaaatgaatttaaataaaaacagagtataaatttaacaactattacggtaactctcgtttttatatcgtaagacccgacggatgctctgaaggcaatacggcgccaagatgcgcgaattattgtcggactattttatgtgaccgaagtacgtcctgacatttgctcatatgtttttttcgtcaaaatgatgctcgagagtctcgataagagagttcaaaaagtgttaatttctggttttgaatgtgaatttgggcctgattctctgtcaaatttctcaatcaagcctcaaaaattctcaatgcgggcacaattaattagcctcaacccattcattttcattaccattttaaatttaggcacgccgtgttctctgccaagttcaatttatttaaaaaaacagtgttttcaagcgaattttaggcatatttacatggtctttatggacgaagatatggtcagtgcaattaaatgcttctttaattttggtcattccgctccaagtttggtttatgatcggatggtattccgacgcgtggttcattccgcccgaggaggaggcgttgaactgctcgcgcgcacaaatggaacgggccgcgcagtttcacttcaccacggagagtgtgatgctgtcgcgcgacttgcagccggcgatctctggcatgacgggcgagcaaattttcagacgcgacttcgccgccggatcagcaccgaccccgcacgaaactggcggatgccccgaggcgccgctggcatacgacgctgt

SEQ ID NO: 15712 - DNA, 1035 bp, Heterodera glycines
tcccgaggcccaccgcccgactcaacgcgtgtgaagcagtggccaatcactgtggattttcgggtacaaaaaaaaacattttcaaaataatcaacagatggaaatgattaaaaataaataattatcttttgaaaatttgtgaaaaaataatatgtttatcaatttaccaaagggtaattttgttatgagctaatgaatctgttggccattatttagctgttctgtgccacgatggttttcacgtgtgtcggcatcgccctcacaatcgctctttggctgttctgtcgccgacatgcaaatcgaaggtgactaaatttagaaaattgaaattgctgtatctgcaacatacaaatttcatattttgtgcttaatataaattgtcttactttcttccgaccaaatcccataataattgtctgtctgttcatcccaaccatccaaagtcaacctgctcttctcatatatcttgccatttctatatgctgacggatcaaaattccttccttatttcaacatcagtcccgtcatctcctaaaccttttgccatcacttgttctttgtcctatccctctaattgtcagtgggcggtccgttcccgatcgctatttaagcttgtagcgttccctcacaattgttcatcccctggttcactttattccacctgtctccaattgtgcagacacgaatccggaggtgttccacacagtcgactgttgttccccctttgcccttccgaataaaggatattattcgaattaccgcgacacagtgttttggagaatgcatcaacaccaaagtatcccaatcatatttttatttaatattcatggaggtcccgccgctgtacatttggagacggctatttgttcatcatttttttggtttcaactaaatattcattttttgatttgtttgatctggtaacaactcatattttgaacggatgaaaggctgaaagatcagtgatcagagaatgggaaaaaagaggaaatctggaggaaggtggagaatgtccagcagaatgagcgatgagaa

SEQ ID NO: 15713 - DNA, 996 bp, Heterodera glycines
tttcgattaattcgttcttcttttgttctgatctggtggatcaagcttctttaggaacgctgtattctcctttacttcggagctaaatttatacatttttaatttaatttaaattcatattcttatatactattcaattggtaaataaatttccagagtctcatctggaaaaattttgctacataatctgaattcctcatcagaatttgggtgcatgttaatcatgagatagctaaattgattattggtcgcatcgttatatgcatccatgaaataattcagtctttttgggaacagttgtgaccccagtgtcctcacttgtaattgtcctgaagggttacgcattaaaatcagataatgggcgttagctcttgccgttttaatgtcccgaccgtagagactctgggttacaaaaattacgcttacgttccaattatgggagcccctggtaaagagtaaatcaagaaaattgttctgcatgttaagcattaaatcgtcaagtatcagtaagaggggtttttcctgttctttaatcttattcatgtccggaatcccgttaaaagtctcgacaccctccccgattaatcctaaaatactatcattcatctcaccgtaacaataaagaattttggtgggcgatggttcaattagattcttatggtgttttaaaaaccgtaatagccaacgggtcttaccactcccggtagcccccgagagaattagagtgaacggaccgcgaaacatttttaattcctcttatttatttgacctatttatattttcatagggaacatgtttcgcgcatttggggcatagccagaaattatcaaataatgatgtaccgaaatgcaaaagactgtgctttttacacctgctacaaatctcgtaatgacagggacagtaatgacaacacttaattttatgtgggcagttcatttttcaatttaattttatattgggttgctatttatagaaggggtatataaagggagtgaa

SEQ ID NO: 15714 - DNA, 2306 bp, Heterodera glycines
tttaattttaatttaaattcatatttcttatatactattcaatttgtaaataaatttccagagtctcatctggaaaaattttgctacataatctgaattcttcatcagaattttgggtgcatgttaatcatgagatagctaaattgattattggtcgcatcgttatatgcatccatgaaataattcagtctttttgggaacagttgtgaccccagtgtcctcacttgtaattgtcctgaagggttacgcattaaaatcagataatgggcgttagctcttgccgttttaatgtcccgaccgtagagactctgggttacaaaaattacgcttacgttccaattatgggagcccctggtaaagagtaaatcaagaaaattgttctgcatgttaagcattaaatcgtcaagtatcagtaagaggggtttttcttgttctttaatcttattcatgtccggaatcccgttaaaagtctcgacaccctccccgattaatcctaaaatactatcattcatctcaccgtaacaataaagaattttggtgggcgatggttcaattagattcttatggtgttttaaaaaccgtaatagccaacgggtcttaccactcccggtagcccccgagagaattagagtgaacggaccgcgaaacatttttaattcctcttatttatttgacctatttatattttcatagggaacatgtttcgcgcatttggggcatagccagaaattatcaaataatgatgtaccgaaatgcaaaagactgtgctttttacacctgctacaaatctcgtaatgacagggacagtaatgacaacacttaattttatgtgggcagttcatttttcaatttaattttattttgggttgctatttatagaaggggtatataaagggagtgaaaggaccatttgattgatacattgtatcaaaaatgcaaaaaccgataatcgtaaatataattgctctcgctaatctcggtaccggaattaaactaaactctctgacgatcaccgaatgcgaatttaagtataaccctagaaaattcaatgccgcggttatcaaatgtacaactcctatcaaagccacggcattattatgggaatccggaaaaatgatatgtctggggacgaaaagtctgatagactgtgaaaatgctattaaaaaatttatagaaataattaagggttcggggtgtccgggggcttcttacaccggacacacggttgaaaatattgtttcgacctttaaattcggacgtgaaattgaactgaacgagtttcgaaaaaatcgtcgtgcattttatgaaccggaaatattttgtggtttaaatttcaagcggggtaaaagcatgacagcgttaattttctggaccggtaaagtcgtaattacgggaactaaaaacaattctgaaattgaggaaatgtatcatcatattctcccctatttgaaaatggctcaaaagaagttagggagacgataaaaaaattttcatttatgggacggtcccccaatttatagttctgttggctatttattttgttatcgattacttcgcgcggcgccggcattgcggcgccggacgggcggggagggaggggagaggtgattaaaaccgcacggttttggctaattttcaaaaagaatttttaatttcaggatccgaaaaatcatcataaaaaaattcaggattgagaaaataaaaccggcccaaaaggtttgggatcaaaaagatttaaatttgcaaaagaaaaaattgaatttccttcacctgccactttggtgacaggtggatgattgatgaccttccgcggcgctgcgcggcgcggagagggggagtgaaaaaaaaaatcgccagtgcggatttgaggaaattaaatctacaaggcggcagacttcaaagaaacaacccctcacatagggttcggttggcacgcacccctcctataggcttgggattgtgcgggaaaatgtccccgggcggtaacatcaaagggctgcgcccctcccataggcacgggtttgtgcggtaaacacccgtgcgcaaccgtgcgcttttgacgtcttatactactcccctgggagaagggagtgggaaacatgatttcaaaattttcaatttttctagtctaatctactcaaaacggttcagaattcaataaaaataacattcacggtgcgaaaaatggggtttgacaagtttattggggaaaaaaagactttacaaaataatacccctgggagaagggagtgggaaacatgatttcaaaagttttcaattttttctagtctaatctactcaaaacg

SEQ ID NO: 15715 - DNA, 3607 bp, Heterodera glycines
acgtgttttgaataaattttgtaaaaatgaggcttttttgcctgccaaatgaggcttttgaaaattttgatctgggagccctgagtaataatataatttatttgcgttaataaattaaataataaaaatattccaacgataaaaagtttttgtaataaaaaggaatcttgaagtttttacaactatgtcttgacttctatcttttttagatgcaaaaatgttttatgaggcggtgcgacaagttttggacaatataacccaaatggtgtctccatcgcatacaatgaattctaatgggacgatggcccaatctaacaatcagcagcagaaggcgccactgagcagtgcgcctccgcctccaccgcctcccccaccgccggacttcaaaaacttattggctggcaaacaacaacaggcaacctttgccgacaaacttcgggatgtcaaactccgaaagtgttctgcaggtcccttgatttagcttagcacctcccgcccccaccttcgcctttttaggaaacggtgtccagaaacgtaccgtctcgccatcaaatagtgttggctcttctaacgggagtgggtctgtctcgtctaaattccaaagccaagatttgatcagcgaactgtccgatcgactaagcaagcggaaaatgactgtggaagcttcgtcaagtcggataagttatttgatttttaaaattgccaatttagatgcaaatggcaccccaaatcaaccgaattcacagactcttcccgtgaacaatgcgaaaggctctcaatcagcgattcctcctttcggaaagtcgctttttggaaatcagcatttaattgttaaaaaaacactttcttagaatcggcttcgttgttgcatcgtacggagggacaccgtcgacagcgggcgcagcctccgctgctcatgactcacaattaacttgcgaaccggtggtgaaaggcccaacacaattaacttgcgaaccgatggtgaaaggcccaacttcatcagctcataatgacattgccaattccgaggctcgaccaaaggcgacgactacgagcagcgatttcgagcggatgaaaggcgaactcctggaactgttctcgaacgaactgcagaacttcaagcgggaacttgcgcaaacaatccgagacgaagtggccaaattgtcagccgatcggagatgactcaacttgttcagaatatgtctctgttgtacattgtcttcctttttaatgtgcagtcactaacgctcttcacctttaatggtaaccataaataaaatttttatcagtttcttttttagaaagcgagtagtgtcaaatgatatatcatttgttggtaatactaccgatggtaggacccctttttgaaaaaaatatttaactttaaaagtcactgaaaatatgtttctaagggatttcagggtcgctgaacacgaatctgacactcattttgaccaatttcgaatcccggacccgaattcgaacaaaaagatcgtaaatttaaattttcaaaaatctaaattttgctcctagatgaataaaactattctaacaattaaaatgagtcattctatgcaggatctaacgaaatagagaattttgaaaattatagatttttgactttttgttcgagttcaggtccggtactcgaaattggtcaaaataaatgtcagattcgtaatcagcgaacccaaaaacactaagaaccatgtttcaaactttactgtcgagatcaccaatgtcgaaaactaacagcacctgaaatttgacattttttgggtgaaaaaatagcttttttttcttaaaaataataggcataaattactaattgcataggttaattatctcatttgatggaacatgttaattttttttatcattttattaattttaattcatttttaaagtgaaagctgagattttcgcattaaagtattttcctttcaacaatttcatccctttcatttggattaattccataaattaattttcaaaatcatggacattttcacaagaaaacattaaggatacggttggttgttggattaagcgaatgaagcattgggtttggcataattaaggtttgtaatatttagtaatcggttgtccatattcattaattatgcccaaatcggtcggttgccaactcaatccaccagctcctcttttgttgggaaaaggagtgactatttacacgttttttacagcgctattttttcaaaaactttttgggaacttggaggagagtacggcggtgccgataggcgccgccgggaaatttttaaaaatttcagttcaatttattaacagaaattgtacaaaacttactagttttgtgaaaaaaaaaatttaaaaaatttccgacttttcatcaaaaatttcggaagtcggaattcagaccccaaaaatgtcggaaaccggaagtctttccgtgccatacctggtgcctatcgacatttgcgagaaattttatgaaatttaatgcgatttgttaacagattttgcctaaaattgaccaaatgacgcagtttttgactcaatttctacaggattattaagtaaaagcctatccggcggtgccgataggcgccgccgggaaaatctcacaaattttgaatgaaatttgcgatgaaaaatgagttaactttaattaaatttattatttaatttatttaaaaatatttggcattctgtcttagaacaattttcaaaaaaatcaataaaatcccgcataatcccgcacaaaaaatcaaatttgcggatcccgctgcgggattggaactataaattctttgtgggacgggatcccgcgggattaatcccgcaatccagtattttccaaaaaatgcgggattgcggactgggatcccgcaaaatcccgcgcgggatcccgtcccgcgccggtctctaatattaattaacaaaatgaaaaatgaattgaattttcgtggaaattataaattttacacattcaaaattgtttcttccatctctctttttcttttataataattttcaattatttctccttttttcccccattttatatttaaaaagaataatatgaataaatttatttagttttttcaaatattttctgttaaaaaattttcctttaataatatataaatggtggaaatgaaattgaaatgatttattattattattattgttgtaacaaattataaaaatgtatcttaaattgtttttttagttaaaaaataaactaataatattttttttcactatatttttcaaacactacgaaatgaccattttgctatgtcatatttctaatgcttataaaaagaaattttttgtatataaatttaggaatctttttgtttcatttttcttaaattccgacaaataatttgaatttctctttttttattgtgaattttttaacttatggactaatttcttgtaattttttgaattttttttatgtttttaatctaattaaaattttattttgttttttaattcaattaaaactcttaatttttgtaaagtttacagaaaatgaaaaaataaataaatttattaataatattttttttattcgatttacatccaataacaatttataaaatcgaattttaat

SEQ ID NO: 15716 - DNA, 1949 bp, Heterodera glycines
aacaaacagcaaaactaaacagtgattaaatttatatttttattaggggaggggcggggggatttttttcttttagcaaaataattccattttatttgagatgacaatttattcactaaattctgaagaccggtaaagaaaatttgcgggcgccgggagcgggagtccaaattgtcccgggagcgggcggctttccgtaaaaaacacgtcatttttaacagggagtccggcgggagggagagggagtaattccaaaatttaaaggaataaaaacaaaaatatatttaatgcaaagctgtgatcaaattttcaaaaataagcaaatcataaataaaataagattttggggtacagacacatttttaaatagattataaagcctaaatttttgagcggtttgcatgaaaccattcacagattcagtccgaatgtgtgcctgattgttatatattttgtgttaaaatgggttaatatttagctttttagatctaattttaattaaaaaactgtgcctttgagacaggcaccgccggtgaataatttgtaaattttgagttcattcatgaacagattttacaaaaaacctaaccattttttatggatttttgagccattttttcaaaaaataagcgagttttggatctgctgtgccgataggtgccgctgatgaaacaagaaatttcatatccaaatttgattgaaaatgttttggaaattcgaaaatcatctttttggggttggaatttttattttattatattttttgtcaaaaaatattaacaaaaataatttcttaattataaaaatcattgcaattaatttgtattttaatacaaaaaactcacttcccttattcttttcgtgcaaattgatcatcgggtaaattttgttgtgcgaattcatttggcaacaacaatctgagaaataattaaataaaattacgattctataatatgaaagggtaaaaattaattaatccaaaacttgttggatcaaatttattaatttccattggatatatatatctaaacggtttattgatccgtggtgttaattaatccaggtcattattcgacagaaaactggaagcttattgcttccgatcgggataacaaatgattgtgatagaaagtacaaattttctggaaaacattagaaaattttggtgagacacgaactaacatttaatcagtcataattgggacaattacacccaattctgatcagttccagccagaccgtactgtaggaactattcagcgtaattaagacttaattacactcaatatattttgtgaaataacactaattggcccacccttcctcaagatgacatcattggattgtgcagtcccataacattggaaattgctttgctgatcatctaaaacattctctttgttgttcttcacaatcgccgctcttccgcctcctccgatcagtgccgtccgttcaaatgggaccatccaagctcactctcgtcccaaccttttacatttttgtttttaaatttgaagtagtcattcaaaaacaaaatgaataagagccacttaaaatctactctcaaaatttctaactttttggagttaaacactcaaaactttttttgttttttttattaaataaaaatcttttttacaataaaatcaatcaaaataataatttatttttaaataattgctgtaatgtcaaaatcgtaagatgattaatagggcgcgggttttaattgctttgttttttctgcagtcttaattttgataatttttagctcgaaaattcttcatattaacctcactattcggcagtagaaaatatccattttgaacttttcgtaactaaaatggttacgtcactatttttatcatttcgtcactgttttcaaactccaaaaatccacattttctttaataaccaatgtatcgaatcatataaattgataaaaactagag

SEQ ID NO: 15717 - DNA, 1633 bp, Heterodera glycines
  unsure (1)..(1633): unsure at all n locations
tgatcacaaatgtgtagagtgacgtcaccaatttgtacaacctttgtctntattttgtatcnaagatgtgaaatgtgtttatcaattggacaatttttaacaaacaaattaaaactgataagagacaattcgaattgattgctgattgatagcggagaggtggaaaaaaattgaaattgataaaaaaaattcatttaaattaaattatgataaaaattatattgatttagcctatattgaagagaatagctcaaacgatcaatcgctttactgaatttatattaaaaaaaactaatgaactccgaggatatcgatgccggttgaaactcattatgccgcttaatctcggcttttccggtactgacaaagtccagcttcttctcgacatttaaatccttgtctaaaaccaatcttttatagccaaactgcaaacagaaaaattttaaaggtaaaacttggctccctaaataagttaaaatcactaacgccaaatacatgaccaacaatgttgttgtttttggtgtccaacatattcaaacactaagagtcgacctagagatataagacctgacttcgggacaatatgaatctcaaaaaaccccaaattttttcattatttaagactcgagagcctaagcactcgatcagcattcgatatttttcagcaattttctcaaatttaaaataaattcaatttgttattttataaatcagcttcattcctttttctaatttctaatttttaaatgagaacgaggcactgccgagaaaatgaaacattaaaaacacacataattttcagatttcgcttggactagccgagtggcctacagattaagcattgtttcatgaacagattatgaaaaatatttaattcgaaaggatgatatgaatgttttcttgttgttgttgaattgttaaactgttggggattcaaaaaatttgcaattattgaggtaaatataaataaagtaataaatttttgaatttttaattaataatggaactgatggacccagaaaaaggcttttacgaggggggagctgatttattaacattcagagctgaaatcaatttagcttttggcggctcaatcggaatttttcaaaattttctttttttggatatgactcatccgatgaaacgcccaattattaccaatgctaaggaaacgccaaaaattgttattaccgtaattgaaaatgcagtggaaaaatttgagaaattaatttattgtgaattctccgagcacagaattggatggtaaattttacactaataaataatatttattttagatgagtgtgtggaaaatgttcttctgctggccaatcattttgggctggacacaattgagaatcgtagtgtcgaatttttggtggaaaaaagcaaaaaatcggccattcaaaaattcaatttggcacatcagtacgccatcattagcatgaaggtgaataacaaatcgaaaaaataggaacacaactaatttcagaaaaaaattctgaaggatatgactagaaaggattttgttgttgctgggaaaaacatttaccgtgatttgttggaaatggaaaaaaggacacttgaaaacggtggaggaattgacancacgccacaaagcactttttggcgc

SEQ ID NO: 15718 - DNA, 2628 bp, Heterodera glycines
gcgcattcttctacctagaaaaatgcttcttaaattttttaattaattttatgcagaaaccacaaaactgcaccattgccaatgcttcttaaattttttgatagtgagattttaaaataattgatttttcgacacaccgtccgaaaaaacgagaagtgtaccaataaatagagagtgccagagaaaaacattactttttttctctaattttttgtctccttttggcgtactatctaatatttttattattaggaaaaacaacattcacttcatcctgtttaacttttttcctgcttgttaaatccacaccaaatattgcaaatcgatagagaaaaaaattctgcatcggttaataggtcaagttaatattaaaataggtcgaattagagttttttttgtgctaataaataaaaatatagattctttaagtatttatggcaaaagaaaattattaagtaagctaatcggcagagaatctgtaaaaaagcgctggaacaagcgagaggagcgacaagcgcaaacggtcaaggcgagacaagcctatttggccaagagaagtaattttttcaccattttttacttaaaaatctttttttttgtattccagccgctccacagccgaatcccaatgccgaaatgccaccgcaggacgaagcagggccgtcaacatctgctgcatccgtcgaagaagcgatggaaccgccgccaaagactggatgaactgcagcgcagcgccaggcgcgacatcgtcgaccaaattgtggacgtcatcgatcgtgatcgctcacgttccgcgagccgcgcatctctgtaccggatccaccgagatatccggcacaaattcgcgcactacacgccaaagaagggcaaggagcggaaggaggggatggacgctgaggatgggcttttgctgctcgctcaacttggaatacagaaggcgtacaagcggatgaaggcgattttacggccattgtttgtgcaccattgctgccgtccatcaatgttgagcagatgctgttggctccgttccatgtcttccaaggcctcggaaaatgctctgatcaaggagtggaagcgggagaaatgccgaagtcgcccagaaattcttcagacggataggggcaaggagggaagcgttcagaaagcgagacatgacggggaacggcatccggaaaatcctcgtccacgccgatcaaatggaggcccttttcgagacggaatggggcaaaacaatttgccaaacgatggcacatttggggaaaatccaaatttttaccaaagtgattgtcttcattttttgtgtaaatattttttaatttaaggcccagctattgtccccaggtgatttggacggaatggagacggcagttgatcagttcaaggcatttctcgacgaacaaacaatggtgcgaacccttctttcaaaaaagacaaaggcccatttgctgcttcaccactttgttccatttgcgcgccaacaccgatttttggggcttttggatgagcagggtgggaccatatcattttttgggttcaattttaaatgttgtgatttttcaggagatgaggcattgcattccgtgtggcggcgacttgagcaactgtggaagacgatgccggactctgaacaaatgcgacagcagctggagcatcatttcgtctcgaattggctgctggacaccggcagactcgacgaattgaagctggtgagttgatggaaggggctttaaaaccttgtccaactaattaagcgggaggaggaacaacgggagcaagcggaggaagacaaaacgaatgaagaaagtgatcaagaagctgacgtcgatgtcgttgactgatcgaggattaatggtttttatttcattacaagcggtagataaaatttttaaaaatttgtaaacaatttttcaatcattttggtcacttttccttttatttattcattaaaatcatcgaaatacatcaatagcatgcactgggaatcgaacctgggactccccctttggtgaccttctcacagaccacttcgccacacatacaaatcttttttggtacaggagctcagtttccggacgccgtgtatattaaattttaaaaaataagccgattttttgcaacttcttattcaagtttatttaggtattcaaatctacagagtagtgtaagtaaattgggatggaaagttgtgaattccaatgttctgaattaaaaacgaaacggattcttcttatcacttctaatgttggatcgcttttcgcaatggtacatatttatatttgatcaaattaataagcatttaaacttttagaattcgtcggaaatgcgaaattactggttgggtcaaattttggctattgtcaatcagaagaagcccattttctttgttttgcatctccaaggcattttttaatatttgtacgaatgaattaaaaagaatttttagagagtggcggtaaaaactaccgacaacacagccgagaaatgcctgaactcgttgatgaattgcagaataaaatgacggctttagattttaatttttctcgctgttttttggacattgacttcgaattggtcgaggattttacagacggtttacttctcagtcttttcaagttttgttttttaggc

SEQ ID NO: 15719 - DNA, 1185 bp, Heterodera glycines
  unsure (1)..(1185): unsure at all n locations
tccgtttaaatgtcaattgctttagtaaattaaatattggaagaaaaatatttgcgtttttttattaatatttataaaatatttagtattttcagagttttataaaagaaaatgtaagcaaaaataaagaataataaattaattatgaagaccaatttcaaaaatatcaattacataaaattaacccgaactttttgtcagcattttttcagtaattattttggcatttttcttaaatattttttatgttatatatttcaactttttgtttgaattcgcactctaattcatcatcacattaatttgcaaaaagtgacacaaaattaagaaatggaaatgaattgcaaaaaaaaatattattattttttaaatttagcttttggtaaatcgtttgtctgaacatgccgataatgcgtctgcttctgttgctgctgacgatggtgttcagcaggacattggtccgttgctgatccgatgctctttggacattgtcgcgggtttgacaatcatttaaatgttttaaaaatgaaatctaaatttatttatgagcaaaccaacagcacatattgccttaaattgtgcatattatgaaaaatctcctaagatatacagacagataattaatataataaaataaatgataatgttcaatgtcgaaatgccgatttccgattttttgggctcggaattccgattgccgaaattttttgacagcgttggcacacatccattgtgctataaaaaatgctaaaatgttacagagattagcccaactcaaaacactaattacttttaaaaagtcccaaaatttattttgcttattggcattggatgccgttctgcagggggtttattcagatttatacgttttccagaggccataatgggcgttcgattggacgctgccaatgccaaatgccgcgaatatgtgcaggcggtcaaagagttcaatgacttggcacacatttactcgaccagcgcactgttcacgtttattccgatcagttggcatttgtttggccgtgccaaagagacgaaaaaatgtgtggccaagctgaagcagttcaccagaggggtaggagaacaggcgaaaatttgcaaaaaaatacacaaaatttggtatggcaaaatgcaattggaatgaccanagaaaatgataatgataaaattggataattttattaa

SEQ ID NO: 15720 - DNA, 1270 bp, Heterodera glycines
gatcagagaactgatcactttatggccaaaacagtttggagagaattaactgacaaatgagtaccaaattgatcggaactaaagaattgtgataaatcattacataaacggatcaaatcgattttgcaagggctaaccaagttcaaatcagataggtttaagaaaagtgacaagttttatgcagcttaattcccagttgattgaataacgaatgatcagtcaaagcagtgtgacaagaattatcagccgagatgtatcaaagtgatcggaaataaacaatagtgataaagtcattagacaaattgaacaaattgctttgccaatgtatgatcaaattcaatcctaagtaggcttaagaaaagtgttcaatttgatgcagctgctgattttccaggtgattgaagaacgaatcaaaatcagagcagcagcagaaaaaggccaaagtgaagaagccgcgggcaatgacagaaagggggaggcatttttggaccttttgttggagatggaacacgcgctggacagggaggagctgcgcgagcaggtggacacgttcatgttcgaaggtgggcccggcagggagggggagagaaggcaagtgcccggggcatcacctaccacattggggtagatccactcattcataaacccaactcatccatactaaacttatgtatatccaacttatcaatactatcatcccatataccacccaactcatccatgtacaataaatgccaaaacacagaccgcataatgcaagaaatgccacggcacggactgcatattaatgagatggatatggatgaattggatttggatttggatgagctggatatatcgatgattgagtttggatgaatttggatgagttgggcatgattcccacacatttgtcacattcataacggaatgccaattttttaagcaaaatcggttcatgatttaattaaaatttgtgaaaatttcgcaattaccgttcgcctagtcaatgaaatactttttatttgcccaattaatgaaattaattaataaatttttggccatgacacctccgcccacgggttgatctggacactgtggtgtttggccacccacgcaaagtgccaacaacagctgcacgaagagattgtccagcactttggagcggcgacagataaaaatgtgaaaatgccaattaaataatataattataatttttaaaacctaaagaagtcgagacccattcgagtagagactgagattctcgaaaccagtaatgctgctgctgtct

SEQ ID NO: 15721 - DNA, 4059 bp, Heterodera glycines
  unsure (1)..(4059): unsure at all n locations
aaaatggaaattgaagagatcagatccttaattctgcacacctagacttgtaaatgatgccagatttgctaactttaactgaaaacgaaaaaagttatcgcgtttcaaatttggcggcgccaaaacggtccgcgccaaactgaccacgtaaatgccattggacgcgtaaagccgactagaaccgaaattgcaatcaaaattaattggaacaatttaagtggccatcgttttagactcaaaaaatataaaactttttgttattaagttttgctttcattcgtcatttaaccattaaaaagcatagaaatcataggcatacaaaaagtaaacaaaacaaaatgtccaaattgtcttccctgagcaaaagtaacaagaaaaaagcactccaagtttatttctccgatggcattgccatttcaaccgccactcgctcagccagcaacgtcaaggtcagatggcataatctcagcaatgcctatgatgccccacgccattttctcggactcgtcagacacggacagtttgattctcttctccgatgggccagcgactaaaagtcattgaattgccattaaatgaagagcaaataatagaggaaaatacccgagccttctccggttttgcacgggaccgagccttctccgggtttgcgcagaacaagcgcacggccaatgatggagttgacaccaaacaaagaaaagtgatcacatgaaaactcaaaaatgtcctcgccgccaatggtcgaagaagtgtcaatttcaatgagaagtgaattctgaaaatggttttaacatgaaatgaagggcggggggtgggggtccgaggttcaagtacaactcaacgagcagctcttgtctgttttttgtaaggctaacggagcatgtgaagagatgtggaatgataccaagattattaaattcagatgacaaagaaaaatatatagtcaaaagagttgggctcgcgccgaaacggcggagccaaaacaaccctccccggcaattctcgcccaacaaaaccttctgttcgtcagctgcgaaaggagtaccgacggagacggagccattggagatatcaccgtaaactgaaaacatataaatgaacggaacacatggcgatgcacgaaccgtaaacgttgatttggtaaacgttttggcgggagagtccaaacaaagtgcctttaacactcaaagaaccaccagcatactaaaacattttcaaattaaagtcagctaacaattaacataaatgaattataaacctgcgtaaatgcgacgtggccgtgtattttcgctgngaggacctcatcggacaacttacaaaacgcctttttgaaagaaaattggagttcctaaattaactaacattaatcatgaaaatcaaaaaagcaggtgaaaaccaccgggaatcccccgctttttccgaatttttcacccctctaatttttgaaaattcacattaaacaacttacattggctaagcgcaagacagcgcccaattccgcaaaaaaatttttgcagtcgtcgtgggaagtgcctgacacacactgccacacttcagcagactcggacacaacaatttgttgataaaacccaacaagccgcatgaaaccctgaagaatcattaatttgaaattgtcttatgatgatgccaacagagatgaattccggcggcacgccgctgccaagagtgccacctccgctggccgtctttttgcttccatccatttccaaaagatttttcgtcgccagcaccaacagcaaacgagaatcgggatcgaatcccgcggcttggcctgacccagccgccacatttccaacaacgccggcatggcgatcgtcctaaacgttcttttgtaaatattccgcaaatcatccattcattcggctcagcataaacattcccatcccattttaataattgaagtttatttaccactggcagttggtccaataattttgcgaattcgttcaggaaaagggaacagttcgtgtcggtggatgcgccagccaaaacaaatttccaggccgtggaagcgcgtgcttttttcagcaacggcggtaagcttttaacatcctaaatttacttgaaattatgcatagttaaaaacgaggtaacattaatttaaaatcacatttaaggaaaagggaaaaccaacatatttacagcatttggaatttaaataaaacaggaggataaataaacaaaacaaaacaggaaaataagagacagagcgattacgagcagagaaatcctcagaacaaacgcaaataatcaaaatcaactcgataaaacaagtttcagaccaaacaacagttaaacagcaataacaacagagacacacgaaaagcgaaaaaccttacagaaagccaaactttccaccacaacgcaacccgaggtagcatgaaatttcttaaaatgaaagacgagaaacaaatgttcgaaaagttgtgtgctcgacggacacagaggaccatttcgtataaaagttcgggtgggatcggacgaggggccattttggtgttagtgggggcgattaattaggacaatgattaattttttgacattgtaagaggcgtggaggtcattgacgaggtggtaactgtaatcaaacaatttattctcatattcaaatttaacgcctgagggtactcggcccacccaactcatttattttgggaaaaatataaaattgaaactcacaatgagttcacccattgcctgcgtcaaggatggcgagagaaataaaaagcaaataggtatttaaacgctaaattaaaaaatgctaatgaaatgtcgaatgaactatgtacccttatttggtagctaacaaataaggaatcttttccgataattcaaatgcaaaaaccaacgaaaaaaagaattatttttaaagaattttgtgggaataggataatcatgagcagcagaaatggattctgttataaatgataatttcctgcgtttgactgggcgaaagatggggagggaggggcggataaatggattgagaaaatttgaatagaaagacagtggaaaaggagggggagcgaaaaacgaatggacaaacagagggcacaaagaacacaagtgagacaccaagtgaacggggaggggagagagagtgtggaaaaagaagagggcacaaagaaaaaaaacacaaatggggtaccaagtgaacggagaggggacagagacggatagagagagtgtggaaaaagaagagggcacaaggaatacaaataggacaccaagagagtgtggaaaaagaagagggcacaaagaaaaaaaacacaaatggggtaccaagttaacggagaggggacagagacggatagagagagtgtggaaaaagaagagggcacacggaatacaaataggacaccaagagagtgtggaaaaagaagagggcacaaggaatacaaataggacaccaagagagtgtggaaaaagaagagggaacaaagaaaaaaaacacaaatggggtaccaagtgaacggagaggggacagagacggatagagagagtgtggaaaaagaagagggcacaaggaatacaaataggacaccaagagagtgtggaaaaagaagagggcacaaagaaaaaaaacacaaatggggtaccaagttaacggagaggggacagagacgtatagagagagtgtggaaaaagaagagggcacaaggaatacaaataggacaccaagagagtgtggaaaaagaagagggcacaaagaaaaaaacacaaatggggtaccaagttaacggagaggggacagagacggatagatagagtgtggaaaaagaagagggcataaggaatacaaataggacaccaagagagtgtggaaaaagaagagggcacaaagaaaaaaacacaaatggggtaccaagtgaacggagaagggagagagacggatagagagagtgtggaaaaagaagagggcacacggaatacaaataggacaccaagagagtgtggaaaaagaagagggcacaaggaatacaaataggacaccaagagagagggaaaaagaagagggaacaaagaaaaaaaacacaa

SEQ ID NO: 15722 - DNA, 1379 bp, Heterodera glycines
ttctctgatgaaaattggaaataaatttgatggatctttttaaaaaggaacaataatttgtatgcaaaaaaatttaaattaacaatttcgatcatttaaaatattttaattttccgcttttccattggcatttttaattttgtaagatttaataaaacaatttttacaatataagggctaattatgtatttttcggggttgttggtcacaaattgacattcatttcaaccacaagccgttgagccaattcgaacaaaaagtctaattttaagaaattcacagtcgtgggttaaagccaatttaaatcctgttgaaaacgatccaatggagatcattactgcaatggttgttatattaaaaaaatgtacagcagggctcgtatagttgaactcggtttcagcgcattttccattttcttagtaaataagggcaaattttaaaaatctttctttgtacacattaaaatttattcagatccaataaaaaaagatatgtaattattcaaatgaaatgttatttttcgtcagaatgtgtttttcaaaacccgatgagcaatttcgccttaattaatttttgcaacggggaggggagagagtggcgatgctaatagaagcctccggatgaattttaaattaggtaatgagatttgttgacagaaaatttttttcataaaacggacatctttacattcataattcaaaatgccgacttccaaatgcattattacatacatttatatacaaatattatgaattcaattttagggcggggattatatgcatatgcatatttttcctgaactgtggaacgccttaaaacgtacgaaaaacttattttgtgtagcttgctttgacacttctatgacgaagttcacaatatgtatatcgatcgttggatttatatgcattttcatgtgcatagccaggcctgtaaccaaaaaaaaaaaaaaaattcgggagaccgaagagcactgtctattttttttgtccagtgctatgattgagtaaaatttaaaaaattacccatttttcggaaaaaaatttattctttcatttcggagggggggaggggcaattgcccctggtcacgggcagcctcagcctatacatagctcacacatttgtacacatccatattttgctggtcagttttctgatgtatttgttttgctgttattgattaattctctcattttgcattcgtccaaaagatgaacttttgttaatgaatccccaaaaatttaaaaacgcgaatattttggttctttggtgccgattgacgcgcttgaatgatttaaaagaaaatcttatgccgttttgttaacaaattttgcaccaaattaggcaaaaacaaattttcgaaatttaaatttgacgtaa

SEQ ID NO: 15723 - DNA, 1054 bp, Heterodera glycines
gaagaattgcaaatgttacgagcaaaaattgccgaattggaaggggcgacgtcaattgcgagtttcgatgttttggcaccgaatggaaatggtgaaataaataaatgatttcttttttagtggattttaatgagaattaattactaatagaagcgatcaatgaaagtgacacgtgctttggaaaatttggtggtgttgatcagcagctgaaggtgagttcccgaatgtacttattctgagatttgaccttgtataaaagtcgctgggaaaattttcaaaaattttttcatgaagttttattaaaaaaacagtttttttttcttgagaaatttctaattgtaagtttgaaaatttaaaaaaaaaattcgcgcgggtggcagcaagggggaaacgagctgcttccaaaaaattacagacgaaatttgttgttttcatttagaactttcgtggacaatttgtaaaattggaaatggaattgagagaaacgaaacaaatgaacgtggtgacaaacttggaaaatgtgagtttaaaaattagacagagacagttaaaaacaacaaagttcaaattttcagaaggctcttcaggcggagttgaagcatcagaaactgttgatgttaaccgaacaaaaagcgatggaagagaaaattgccaaaatggaaaaggaacagcagaaaatgggtgggagagaattgacaaattaaatttttcaattttttgtttaattttcatttaaataattgcctatttgttccagctgatcagttggcacaacgacaaaatgatcagcaaatgaagttggagcagttcaagcaaaaaaatgcaactgatttggaacagttgaacaaatcacaagaagggattctcgtgaaaattgatgaggtggaaacgaacgaacgaacgcacaataattattaatgggaaaaataattaaaaattttccaaaaattgtttggtgttttcatatagttggcccagcaagtgacgaactccgagctgtttaaacaggcttttcctgccaaatttgctggaatggaaaattttgttggcgttt

SEQ ID NO: 15724 - DNA, 1226 bp, Heterodera glycines
tttttgactttttgtttccaagatatgaaattagtagaaatggacgtcgattcgtgatcgtcgatcctgaaaaccttacgaaacatatttttattgtgaaaacaattttttttcaaaaaaggtgtgaataccatcggcaatgttacccctaattcattttaaggtgttttccaatcctccacagaattgttgggatgtcactgcttcgcacaatgaattggaaatttttgggcccgagtgtctgatggtccattacaaatcagaaggaaatagcggcggtaattattttttttaattaaaatttcccattatttttggatattgttttattcttttaattagagattggacaaagcgtattgaccggtaaataccggagaaaatccaaaaaacgcagataaaattaagcttgtagggaccgggattttgccgagactcgtggttcaggtccacggtttttttggacaaaataccgggagtcccggaaaacgtgaatctcgggaccaagtccctgtccattttctaagtaatggcaattttaaaatccgggctctaatagaaatttcgaccatgctaaacaactaatattggagaatttgtgtcacggaggaaaacaaatttaaaatgttttttcatttttttgatgtaaaaatgcgctgattaccaacctgacaatagctcaaaattcttatgaaaaaacatactgagttttttcttgaaaaatttctaagttagtaaattttttaaaaaattcacggggggaacgatgcgggaggggggggggggacaagctgctcccgagctacggacccgaattcgaacaaaaagtcgaaaatttcggttttgtgtacacattccaaaattttaaaaaatatgtacaaatgacgcacggagtttttgatggaacaaaaggaataatttgccataaaatggcaaaaaaaccctctgttttgtcttggaaaaattatttcttttgtcccgtcaaaaaagtgtgcatcctcacatattttttaacattttgggatgtgtacacaaaaccgaaaagtaccttaattttaaaataaaaatgccaaaagatcatgtgcttgatgaaaaacttacaaattctgacaatcagctcaaattctttaatcaatgcatttttacacaagtaaaattgaaaaaaaattaatttattttccgccagggaggccaattcagcaatattattattaccttgaacatta

SEQ ID NO: 15725 - DNA, 4016 bp, Heterodera glycines
  unsure (1)..(4016): unsure at all n locations
tccacttgggaagtagtcggccaatatgagcaacgaaaggacatttttcgcttaaatttgaaagtaaataattgcatctaattaattattgtaagcaaatttacgatttggcaaaattggaaatagaagagcattggtcgaaattgcctccaaaaagtccatgaactgctccatgtcgatgcccaattcgttcaaagtgacgacggctgctgcttcttcttcatttccacgctgagcattcgacggaccatcggcaattggcacataaaccaagcagcggacaccgtaatctgagtatccgtttaccaattttttttcaactgaaccaatactcttcctttaaattctcaaatgatcagtgcttattgactcttcacctttctgttaccaatgtgcacggtcaaatcgtcggctggcgaactcagcggagggcaagcaagggctggagaaatatttaaatgaaaaaatgatttttttttaatggattttcacttttcgtccatgttttcacgttttttgaaaatccgtaccaacactgagtgaaaatattacaaagtaagcaaatcactggcgaaaaataagttgttggctcaaaaataaggcattttctaaaggcgattataatgccagcagagaatttgcacattattgatcaaaataagtttattaacaaatcaattttatataatttatcattttgagtgtgattagatgcatctgaagtgtgatacaacaatcagtcaaaaaccatcaaatgaagtttttttgatttaactttgctcaaaagcaactaaattttaaaatagcgatatcttcaattgcgcaaaattttaaaaaatttcgctaagtttcaagaaagtaatgaaaaatattcaaaaaaaaactaggtgtgtttgttttgtttctcaggaaaataactttttcggttgttgttaatttgtaagctagttttcgagttagccaaaaatttggaaaactattttcaactattttggcgttttgcagaaaatttgttttaaaaaatgcaataaataggaaaaatacaccttaagaatcaacccaaaaattactgaaagaaaaagctaaataaatcaaaaatttctcaaaattttatcgacaaattttttatttgttattaaaaacaatgtttgattttaaaattgtgtatcttaatattgaaatggcttaattttgttactttttggatacaattttatgattttccttctttggcacctattttttgggtttttagaaactaaaaattaactattttggcaatttttaccaactgaaaaatagtatccacaattattaaatttgaaaatgaacctacagtatcggaaaaattgttttatgcgccgacctaaaattgtttttgtctcgaaatgtctaacgactgaaaattatttcatatgaaaatgtacgtgggggcacttcacaaaaaagtgcaaaattcaaaaatttaattttcatttgtttgagaaaatttttaaaaggtaatgggggcggggtcaaaatgttgaccaaagttgaaggaaagaaaaaattaaaaaaattaaataatatttattttaaaaaagactaataatttcttctgtgtcgtagtggttagtttattgtattctatacgttctttcaattttgtcacttttttcaataaaatatgttaacaagtaaagcgtttatttgtaaaacattatagtatttttcatgcttttttaaaagtaaaagcatttacacaaacattggcatcccaataattttgtcggaaatttaaaagagcctanaataattcatataaaattattttaaaatgaaattgtttaaataaaaatttaatgaaactatttaaaaaatatattttttttacttcttagctcacctttctctgcttttgttctttcttcaattcattgactttctccaataaaaacttttgatcattttgcatttttgagaattggtccgaagttgctaaaattaattttaaaatataatgggcataaattaatattcttaattcaaataaattccttctataaaaagaactttttaataattgataattttggtattcttcgcttaaaattcccccgcctttggtcgtgttttcgtgctgctgtttttgctgcttctccaattcactgactttttcaaatagagtcttctgatcattttctatttttgagagttgatccgaagtagcttaattaaatttttgaataaaataccaattaaaaccataaactcatttttcagcttttgaatttgttgtcattaattttatcgaattattcaataagaattccataaaattttttcaatttctttcattttttttcatttttctgttcaattttgatcactttttccttcaatgccttctgttcgaccatcatttcctgatgctttaacttttgttcaagtaccttctaaaaataattttaaaaatttcttaattttagtcgaatttttatggcaaaactcctcacaatttcgagttccaatttggccaatttcaattccatttccatttttgcaaacttttcacggaattcctgaattttattaattaataaaaattttggtacttatgtgtagggtgtgtaattattagagctcggataaaaaggcaccaaaaatcgcgaaaaaggcactataataggcaccaaaaatttgaaaaaaggcaaaaaaggcacgaaaatcccgaaaaaggcaaaaaaaaaaggcataataaaagtcaacatagaagcctcaaaccaagtggaaaatgcgttatttatgcttaatatatcgaaagaagtgcgcagaaaaaaaggcatatgcctcaaaatgcgagctctagtcataatttagactaattgaccaaattttttaataaaattattgataattttaaagattttttgaaaatttttgtgaaaacctttgagcttctgaagaaattctcgagaaaaacacagtaataatcattcacataattaattatccttttgaattttatatcattagaaagaggagacttcattgtataaaacaaaatttttttataatttatattaaaatttaaattttttgtgaattttttaattttacatgacgggaccaaatacatgggttgcaccacggatgaatttacgatttcttcccttagtttcatcgtatatatgatgtcggatatacgatggtcggttgttaattgaaacaaaatatacgacatcggacgttttttccatgatgttacgatgatcgtatatacgacatcgggacgatgaattgaaacagaaatatacgacatcgcatgttttttattgaaacagaattacacgatgcgatgtcgtatcggagatatgacatcatatcggagatacgacgggaattgaaataggccccggatattcgataaacgtgataattcaactttcgtttgattccaagaatgtatgtaggtaggcattgatcagtaacaaaaaatatatatataagacgaaaaatatttaaaaaatgaagagataaaatatataggtatttgttccaaatggactgtgttcaaatgcgaaggagtcggagcagtatcagcacagttccttcccttccttcacaagtatttcacaatggacactgtccgtttgtcgcccttttggcgtccgttgcgtttggcttcgtccgtcgtccgttcactcttctgcgcccattgccattgttctgtttctctcccttccacccccttttcctcgtttcgtttccaccgttccgcccgggtgcccctcgggcagtgccgtgtacatctccaggcatttgcggaattgcgcgtttttgtagcattggctggagcattgggcacgcaaattggggttcacgtgggagaacattccgtggcacagttcacacaattggtccgccattatgcgcattatcgggtcgcgttcagcctgccaaatttcccccatttttccctaatttttctcctttcaaatgccaaacatttcttcgtcgtccgattgtgcagtttt

SEQ ID NO: 15726 - DNA, 2472 bp, Heterodera glycines
ccttggcatttgccatggtattcattcccaaatcaagtattggcgctttatctatggcccccaatttgcccaccattttccgagttcgtccgcctgtcgaaggcccagcggtgacagaggcgagtcctcccgctccaactcgtttttgtcgttgctccagcttttgtcaatgatgtccagcttttccgcatggcgaaccaaataaagcgtttgccgcactaatgggcgtttatctaagaaaaagtgcctttggttaattggcttattaatccgatgttttttcgcccttttcaccgatcgtccaaaatttgctggcctctctttgatcattttctgtccattccaatttgactttggccaattcatttttgatcttcctaatggtgtctaaatgttcttggaaggaatagccgatttcattttcgaattcctgtggaaaaaagtattggtaaattactgtaattaaaattgaactcattttgtttaaaattggtctccaattggaaagtgatactctccaaatccgcttcagtcgcctccattttcttctcatatctgctcatgtcgaacacttttctctgcttctccaaaatgcgtattatcttagcatttttaaaatttgtttatttttatttaataattttaatttgatttatttttaacctttcccaattgtttctgttcagtgttattgagaaacatatcaagaaaatattggacaattgtgatgttttgggcacgaaatatcagacgaattgtgttcaaaagctattcaaaaaaaaaactgaatggaatgggtggataaagctaacccggaacttcttgtagtaattgtgaacatttgtctgaatgaaatgaattcaaaagccgatttaggcactcaatttggaaatccgtacacatttcttcaattcgcttagtttggcattccatgcgtttattttgctgcgaatttgccggaagaaacgatttggcagcgaaaagtgtttctgagcgtcgccgaagcattgcctctgctcgcccatccagtcgagcagcttctgctcatcccttttgatcactcctcgcgaatggtcatcggaacagtgcacaaatcgaagtccatccaacaccgacaattgccttttggtggacaaatttgtgctattttcagaatgccaaaaaacgactatcaatagcccatatatcccttggtctcggacagatgccattcattgttccagcctatcccttccccaaaagccgtcaaccttcaaattctaatctgtgctctcgggaaaatgctttggtataggtgcattaatgagagcacaagaagcagttaaataaacaaattttatgttaatcagtgccattggcagatggcaaatgatcatttgtgattatttgattagtgcactgcacttaccaggaaggcctttctgagtcggagtttaccccaatattagaggaggcaaaaacgacagaaaaacgacaaaaaaaggcagaaaaaggcgcagcaaattataaagcatagcaaaaaaaaagaaaggaaaatattaaaaagcaaaatgtgaaaatgactgaaaatagaaatatttaattagaaaagtcaaatgaattggggagggatttggtgggtggacagccaaagccacgcgaattggaaaagcatcattaacattgaagggattgattttatgtgcatgacaaaaatattggaaattcattttgtacaatttagaaaaataagaaaaaagctttttacgaattacataaatcaaagaagaaaaaaaggaaattatgcaaattggactcaaatcagttggtaacatttttttgttgagggcaccgaaaatggacaatgaaaaatttggcatcatgaagattggcgcccggaaaatgagtcagtggaaaataagtcattagaaaatgctaagtgataaaaaatattaagttcatgggggtttcgaggtcgctgatcatgaatccggcacacggaagattagacaaatgttttgttaaaaaaataagaattaaataaaaaataattggtgtatttttcgttttttgaaaccccgaatatggggtgtatttgacaaatttttttgccgtttttcaccaaaaaattaacattttttgccattttggtctccatttttcaaaaatatggtaaaatgggcgtccggcggtgccgataggagccgccgggaaaatttttgagaattttaatgcaattttgtgaggaaaattgcttaaaatttcaaaaaaaattactgaaagtttttactgcaattattgtaagtattacccatgctgtcataatcttcattttgctgctaaaaaaccctcatttgggtcattaagtctcattaaaaaatttcaaaaaagaagcaacagtgggcatattattgtgtcaaaatgataaattatgagaattttttttagacttaattggaaatttcaagaaagcgtcacatcttttctgactat

SEQ ID NO: 15727 - DNA, 2265 bp, Heterodera glycines
aaaaaacccctcatttgggtcattaagtctcattaaaaaattcaaaaaaaattactgaaagtttttactgcaattattgtaagtattacccatgctgtcataatcttcattttgctgctaaaaaaccctcatttgggtcattaagtctcattaaaaaatttcaaaaaaaattactgaaagtttttactgcaattattgtaagtattacccatgctgtcataatcttcattttgctgctaaaaaaccctcatttgggtcattaagtctcattaaaaaatttcaaaaaaaattactgaaagtttttactgcaattattgtaagtattacccatgctgtcataatcttcattttgctgctaaaaaaccctcatttgggtcattaagtctcattaaaaaatttcaaaaaaaattactgaaagtttttactgcaattattgtaagtattacccatgctgtcataatcttcattttgctgctaaaaaaccctcatttggggtcattaagtctcattaaaaaatttcaaaaaaaattactgaaagtttttactgcaattattgtaagtattacccatgctgtcataatcttcattttgctgctaaaaaaccctcatttgggtcattaagtctcattaaaaaatttcaaaaaaaattactgaaagtttttactgcaattattgtaagtattacccatgctgtcataatcttcattttgctgctaaaaaaccctcatttgggtcattaagtctcattaaaaaatttcaaaaaagaagcaacagtgggcatattattatgtcaaaatgataaattatgagaattttttttagacttaatttgaaatttcaagaaagcgtcacatcttttctgactatgaatgttacaatacattttattcaaaaagatgatcttgaaatttgcgagcaactttttgtgtttaatcataaaaaaaaataaaaaattaataattaattaaattccgtccattcatttttatttaaaagatatttatttactcgcaaccttttgttaattgattttcttatcatccatcattattcattcacagtgttttctcatccattctcattcctttcgcatattttgtcaaagcaaatccaaaccaaaacaaaaaattgcattccgacgaccaataaatgttgaattattattcaaataattaaaacgttttaaatattttaattatatatagaatttaaataaaacatttatatttgtatttttatttgttaaaatggcggacaaccaaaagcagcaacgattcaaagggaaagttgtcatcataactggtacaaataaatgttatttcaaattaattaatataataataaataaaaatttatgtgtgtaagaaaaatctcattatcactgaaattaattgccaaatgcaaaagcattgattgattctttgtgaagggtccagtgcgggcattggccaagcggcagccattgaatttgcgaaggatggcgccgttgtcgttattcacgggagagatggccaacgaataaatgtaaaaaataaaaatgaattaaaatattcaattaaacaaattttatataaattcttaattcttactcaatttggagatgaggaaaatgggaattgatatcaaacttcgaaccttttttaggagactgaacaaaaaattttggctttggaagtgccggcggatcgaattttgaaagtgcaggggccaattgaagaggaaaaaacggcacagaaattggtggaggaaacactgaacaaatttggacgaatcgatgtgctggtaaagtatttaaaagtagaggagaaaatggtcattctgtacaaattcaatcacaaataaaatttaaaaaattgaaattttcacctttttgttcgaattcggttccgggattcggaattagtcaaaaagaatgtttgtgataggcgaccccgaaaagtccctataattatgtttttacaactttttaaagcaaaaatttttgtgccaaaaaaggggggtggggtccattaggcagtattaccattgccataaaaaaatattggatttaatatacacaataatgccaatatttaattgtttcactgctgtttcggataaacaatgccggctgcacctctaagccgggcaatgatgagccaatggacatagtcaatttggaccacatttataacgtaaacaaaaacaggtccaacatttaatttaattcagaaatttcaaaaaaagagatttaaaaaattaatttgaatgacagcttttatgaaa

SEQ ID NO: 15728 - DNA, 1959 bp, Heterodera glycines
  unsure (1)..(1959): unsure at all n locations
atagaagccaacttttgcacgctgttgtgatgccgnntctgcagttggacaagcgtataaatgctaaaaagtcattaaaataaaattcgtttattgctttaactttattttcttttcgaagtttcagtggaatgccaacctgttcagtgccatgtccaactgtttttccaaacggcaaacccgcgaatccaattggctaagcatctgaaatgaattatgaaatgtgataaaagtgttttaaggtccattcaattcataattgtctatttcgtcctttgtcggctttttgcttgtaattacttctctaattgattttggtcctttgtaggctttttcttagccatcctttgtttcttctgatcattccccttttgacttgcctgctccaatttgttgctgctcccagccgatgtccgaaggtcggccacagtgttgcgcaactctttcagttcgttggccaccaattgctgctgatgatttccatcatcgccagcaccgaaattactggcttgtgttgttgtggccgttgttagcgatgtggccggcgacatttccttaaagagcgagcaatttatgagttcaccaattaactaattggtcaattaatatttcccaagttcttaaacttgtgcgttcaagccaaccttaaaaagctgtccgaccacctcctgcggttgctgttgctgaacattgtgtaagtgcgtttgttcagccattggcgttccgtttgctgaggaaatgcgcaacaatgggttggtgccgttgttgctgccatgtgtccagtttggcgctgttgctgccggcggtgtcgaagcggggaatttgtgtgcattgcttgccaaatgggcgatcaagtcgcgtgcttgaatttgtaaagcataaattaatattaggctaacaaaatggaaatacttaatacaaattgtgtaacaattttattcacatttcagcaaattccctcttaaattcagcccatttttaatggtttaatattttatacgttttctgaagtgttttccgcacagctgacattgggtggccaatttgctcgaagcagcggcagcagaaacagccgcagttgaagaagcatcattttgatgattctgttgttgttgttgttgctgctgctgatcagtcaatgaagaaacttgctgcaaaatgcgcattatctcatcattggtcgcctgcatttgcagcggattggacagatcggcggaagagtctgagaaattatcaaggtaaacaggcacaaaatatcatgtttaatatgcccttcttaggagaagcagtgcattcaattgtggtcacttttaaaagcggtgatcactgatcagaagcaaaaaaaaagtgggaaaggcatttactgaagaagtcatgaactaaagccgggaattgccggcctaaaccatttttccgaacaagtaattttaatgatgggtgaatgccacacttccctcacctttttgttgtcctatggcaccgcaaatgttcgtagcccgtgaactgctaagcagcgttttggccaaaactttgctgtccatttgtccaaaaagaagagctttgcacgccgccgcagccaaagcatttgtgccggctgaagattcaaccggcaaaatcgggctttgattgcccgaactttggcattccgcccctgaacaatcttccgcactggtgccatcggcgtcagactgagaatttgcatattttaaaaagcccaaaatttgttttaccacttcattaacgccagcgtcggaagtacgcctttccatcggttcggcgtctccgctgcaaatggcactttcgcagtgctccaaaaggcgttcgttggcggtggcgctgttcatctgctggtactgcttgacgacctgtcgttgctggctgttgttctccggcatgccgttagtgtcctcattcgattggaaatatgcaaaatttgtttggtcctcctcgcatttgtcc

SEQ ID NO: 15729 - DNA, 1668 bp, Heterodera glycines
  unsure (1)..(1668): unsure at all n locations
aaatttgtttcgtcctcctcgcanttcgtccatcgcttcctcagccttcagatccaatgagccgaatcgaggcncaatgacaagagaatgccggggccatcaaagttctgaatgtaaatgtttcaatcgcatgaaaagacaaaaaaaaaaaaaatgcatttaaaatattttctcaataaggtaaaaattattttagggtttacagtcaatttttacaaaccctaatactcgagccataaaatcgtcaataaagcctaatttgtaggaaaaattcttaaagacccaacactgccaactttgaggatttttgctgaaaggctaaaactacaaaaaaaaaccaaaatttttaaaaagataatacaaaataataatcatttcctatataacaaaaccattattgattaataactcaaaaagattagaatatccaaaaaaagaagttaaattataagaatctgtaaaacttcaaaaactaaattaacactaagatttatgccgtgatgtctttgcttccaaggacgaaacctttaaaatgtcaatactaaatctaatcaattttaattatgtttgggtgataaatcacttaaaatgatcgatcgattgcacttacccccgccgttttgctgatctgtgccgccactgtccgccgattggttgctgccaggtgcggtgtgcataaagtgttgctgttgtgcgccattattctgttgactgttcccgccattgttcaaaatgatcattgacttctccagaaattcaatggcctgaccaaaaaataaaaataaaatcgtcaaaatataaataaaagagattttaaaataattcgtttatgtaaaattaaaatgtgtgcaccgaccgcggggtctttcaccgattttttgccctttttgatgatgtaatcctcggtgccgatgtattccttctgctcaattttgtggtgtttaaggatgtgtttcgtcaaattccctgaaaaatttaaaaaataattattatataaaaataaataaataaaattggtttgaccctttaaatttacagttatcccgtttaaacattcctataatcctcccaaaatcacctttaagccgcgatgatttgccacaaaatttgcacacaaatggcttcaccgccgtgtgcaccgaccgatgctccgccaaattcgaacggaatcgaaaagccttgccgcagatttcgcagacaaaagctttgtgctgggggtgctgctgcgacacatcgccgggctgtggaacgagcgaaatttgttgctgctgttgcagcattaaatcacaacaaatgaaactgaaaaaatatatttaataattaattaaaatgttcaaatgatgaaagaaaatcaaaataatttcataccgtaaatattaaacagaattaaattatttcgtagtttttaactttttaaaaactgccgtttatatgtgtgaaataaatccaaaatggaacttataaatcgaacaaagaaggcaaaaatgtatttgtatgaatgtacacaaagaataacatttttggtganacattaaaaaatgcagaaaaataaaaatgtaaacatttgtaaacagctgcaggtcaacctttttttgaacccggttgngaaaataacaatgggcaaatacctatntttctggaaaacangttcacacataacacataatg

SEQ ID NO: 15730 - DNA, 4429 bp, Heterodera glycines
aaatcattcacgtaaagaaacattcacaaaaacattttcccctatttatttgtggcaaaaaatcagaaaaattacatattcattccgaaggtcatcgaattagcataaaaataaggacaaatcttcgaataaggacatatttgtgaaccctgtgttatgcgaccactaatagagataaactgagtcataaaagccgaatcctgcggaaatgccggcttcgttcacatgcgaaagttttgtgcggaagtggtacccctgctggacattgtgcagcactcggcctgctttcaaatcgccgatcaaaaagccgtaaatgccgagttcggggatcacttcctccaatctcgccgcctcatagggtctaagcacgtaattctaaagaaaggccagtttaaaattggttaagaattttgttgtaagaacccggttaacttgatctctctccattccgcgtaaaattaaaatgaattattgggacaattaaaatacggcaaatttttaaaggcgtaattgagcactgtcatcataaaagaaatgaattaatttgttaaatgatggatttgtttggtatcataaaaattcaataatttcaggcacaattagagaagtgttgagcaattctaatagttatccctattttataattttaccttcacaaccattgggcgcagtttctgcatcaaaatgtgcgcacctcgttcagtttgcgtgaattctttcagcttttccaccaatttatcgtcataataattatgtcctccgcattccctgttcggcttcagcacataattgcccggattttcaatggcatcctaaaaaacagttttttattcaaaaaatgattaaagggacgaaactcatttgaaatttgaccaacttttaatgaaaacgaaaaatggttaaattaaacgaaaaaaatattaattgtatgaatgccttcacatacaaaaataatttcgatgggtctaagacaggaaaagggagtgaattatttgttgacctgataacaatttcagaattattattaaaattaaatttgaataattcaaaatatattccaaatcgactcattaagcagatgttttttacttcaattagcttttccgtgtcgttgtcctcattctccaggccccaaattttggcaaaagtcgctctgatttgtgccaccgttgccgcgtcgctaggctccgggaagaaacgttcaatggcacccggcatggtgagcatctcagtttttaaaataatcgatttttaggtttttacattttttgaagcctaacatttttcctatttcaaatttattttcttcaattggtcaatttgttttttaagttcagctcaaaaatagcacctgctgcactttcttagagctgctaattgccacagccaaggaaggtgctttctgtgaataaacaaatttcataaacaaatttttattatgttttacaattgccgtggacagttcaatgatttgtcggaattccatgccgaggtcgtcaaatttgcacccaagggcagactgtcccgaataaacaatggcaacttttcgaccgtccagacgaagcgaaaagtcctccgggtccaattgcaatcttaattggaaaaaacaacgtaatcttttgctaatctataaatttataatagccattttcaccgttgtgccaaaaaaataataaaaataaaaaagaattaattttattttggtatagattaataaaattgtattgaacatttatacctggttctatttccgtatttaaaatttgctcagtttcttataaaaatttaaggcaaaattaatgtatgtttaaacgtttaaaagaattttttaacctatttttcacaattttgtgcgattttaaaaatgcttttctgccaccttttcgtgctgttctctctttccgaataatcggccaacgaataaatttcgacgtccattttgccgctcgatttcttttccagttcctccgcaatgtatcgcaagtcgtattggaatgggtcgttgctgtatatcagacaaaccattattgcttttgggtcatcgaatttgcgcctaaataaatttaaaaaatgaaattttgaaaagtgcaagaatcagaattgccgccgacaacagcagcaaggttttagattcaaaaaattgaaatgtgtttttaggaactaataattccgctctaattcgaaatttgggtgtttttaacaatttgaaaaaacaataagtaaagatcgaaaaatccatttaaaatatgttcataataatttcactagagcgttgcttacttttaacttttaaattccttcacttgtcagtaaaaccaaatggttagaattaaaattgttaattaattttggagagggaacaacggaaaagtgcctaatttagcattaagaaaaagttcgaaaaagttagtgaactgatgacgatattgtgtcaacggatccactcgtaaaaaagctacagacaaaagaccacaaggacaaaaggcgctcaattttttaataacgatttagaattcaaaaagcccattaatgaaggataagaaattgcacaaaaagcacattcttaccatgccatgtaaaatgtgtcgatcaaagcagcgtccggcttgttgtccgggatgttcgctgtcgttgcgtccattccggtggcctttttgagcattcgccggtgaaattcggtggtccgtcgcttgagcccagttgctccgatggcaccagtgttgacttcgacctaaaagccaaaataaaaaatgcatataaaaatatgagtcaattaattaatttaaattaatgtcgctgattttataaaataaataaatgaataacaataaaaaagattaacgaaagaaaatgttagaatttgctttttcacctgttttggctcatatttgacttcgtttgtttcattgttctccacaacatctaataaatagtcctgaagaaggaatgttatgtttcatttttaagaaataggttttgtatatttttaaagcatcttttattcgtcaaaattattatgaaccgtgaaaattgaaatttatttttgcaaatattagtaaaaataaaattgagtaaatatttttcgcaaaacattaaaacatttttaaaattacaacttactttattattccaatgcgaaagaataattgaagcactattttatcattttttatacttaaacatctctcattaaaaatatttggtatttaaattcagtttctaaaaatatttgccataaatagattattttattccatttttgtattatatttcttatatttttttctgcccaccgctctctgcagcatcacagtgatcgtctgccgaattccctcctcgtggactttcttcaaaatgtccaccaatttggcaatatgctcgtcccctttgatcacatctttgtaggcattcatcaaaaattcatagtcacgcgcaacgcgaaaataaagcaaattcatcgcctaattaaattcaagataaattaaattatattaattttgttttgctccgaatttaaatccaatttattaatgatcaatcatatcatttaatattaaaatttatttcatcaccttttgtgctttcagcgcttgttcaaaagcgtcgcgtgggaatggcgacggaaacaaagtcaatggaggaaatagggcagcatcgcctcttaaaaatcatttcaattagaatttaaaatgctaatttggattttcgtccacctgttgccctcatcctcctttcgccttaaaatcagtgcattgttgtggcaccattctatggcatactgtgccatccttttaagttcaaatgcgcctaaaaataatttaaaacaagtgataaactgttgattattaattaaaatatgtttaagttattcattattttaatttaatctaagcatattataaattaattcaattttgaaagttgtgcaaaccaatggccaaaagttggtctttggcttcattatcatcttcatttggctgagtggcatcggcaaaattgacacagcaaatcacaaacaacaccaccaataatgcgctaccaaatgcaaaattaaatttcgccattagaattttttaattaggaaggattttataaattggattttttgttgaaaaattataaatcttgtccagtttaaataggaaaattaggcggaaatgcacaacattgagatattttatcaagccggaagcaccgaattgtttggctttttattgggaaacggatattcaaaaaactcggagaaaataatattggaaataatatttttatataaatttgtcgcctcaattaataaacatccgaaaagaatgagcaaacaacccatgagaatatattgcatatttcacgtgagcatgcaattttttctcaaaaaataaatccaaataaacgaaagcccatttctataatttttattgagtatttgaaa

SEQ ID NO: 15731 - DNA, 1138 bp, Heterodera glycines
gggggaagggcagatgagtggggaagggcgagaagaaatgccgaggacagagggggacggacgcaggggagagaaacgagcgacttaatgccaggaacagggggcgaaggaggggaagaaatgccggagacggaataatgacagaaattattctggttaaagcgttggaaaacgacgcttcttctccatctcaaatggagcaaatttcggcacaaattttaggcatgaaatgcaatgggaggtgcaaagcttggaggtgaaattatggaaatgaacagaaggaagacggaagagaggggaaagggcgtaggggaagagagagtgttacgggtagagagagcatgagaggaagagaagcatttgaggaagagagagcattaagggggagagaaagacttagggggaacgaaagaggggggggggaagggtaatgggatttgcgcggatggatggctttaacagaaaaacccacaaaggaatattcccaaagtttgagtgtgaaaaaacaccccccccccctccctttgcccccccccgccatcaaacgctttttcgggctcaactaaaatcgaataaatctgaagaacaaagattgggttgtgcgagaaagtaccaaaataaggcggccaaatgccataagtggcacacttaaattgtgcagaattctttttttaagggaggaaaagaaaggaaaaaagggggagggggaagctcaatgagtgccaaatgggaaaatgaatgaattggctgctgctgtgccgctcccttttggtgacaagatgcttttcctcgtggtattttcgtggagagacaatgccaaattacataatagccgagaagggataagagaggcggaaggaatttgtcaacagaaggaggggaattaaattaactaatgactaatgacataatgggccagtggcatattttatttttgaggccgctgattgaattggtcgagggccaaaggagtatttttatctagcaaaatgaatcaattttcccatttgattttatttttaagttccatatttgccaaaaatttcgattgtctttgattggaaaagcagaagaagcgactcagatcatcgcagatttgaggaaaatgaggagagacccataatgacggccttgtttt

SEQ ID NO: 15732 - DNA, 1681 bp, Heterodera glycines
cccccccccgcccattcccatctctttgccgtctcatatttcacccccccccccccccgcgggggaaaaggttgattttttttctttgctcgcgtgaatgaacaaatgtatcccgagcaaagaaagagcattcattcaaaggaaggccaaaaagaacaaaccgcgcgaagggagggaaaaaggagaagcgaaaaaactaaattaaaggcaggtgaatacagaaggggtctaagaaagtaagccgattttcgaagagtgaaaaagacatgcagcctaaggcatcttcgaacggagtcttttgccaatctctcccccttctctctctttttttcacctttttctctctctccccgttttttcccttttctccctcccaccctgctctttcttttcctctatctgtctgttccaaattcccttatccgtctgtttttcataaagttttttcttcatttgtttcatttaaagtttgctaaagttaatttttggaaataattaaattaataacggggagagagaaagagagagtgtgggagagaggggaggggaagggagagagtaggtgagagtgagaggagaggggaaagaggaagggagagaaaggagaggaaggggcttgacacctaatatataactgattattttaaacgtgcttaaaaatttaaaaaatgatcgatttgattgtcgaaataatcacctgagaaagtgagttgtggtataatacaataattgaaatataaaaatcacagttgttgcacaaaaacattttggcactgcaacgaaggaaattggcatttcaaataaatgacagggaaaatgccgctgggatgggtcggatttcgctgcattgggtgcggtaaccgcctcggcttggaagaaattggagaaacggaggaggaggaagcgaattcagacgaaacgcaggtgaaattagcggaagaaatatgcagaagaagcggtggcagcagtgcctttcttcatttctttttcggcattggcaaattgccattcattcgacgagcaaaaaaaaaagaataaatacatatggcattttcttaaaatggcaattcattgccgacaaaaaatgttgtgagaagtgagaagactcaaatgaattggaaaagcctcaaaaatagagatcggcacggtcgataatgttgagttttaggtatgtaggctttgctaccccccataaaaatgtcataatcacgacaaaggaaagcacttttcggctctattccagggatgcgatctgttctgatttgaagggtccaaatctgataaaataaaaatgttctgatttgtcagaaatgttctgattttggggtagcgaccaaaatttgttctgatttcttaaacaaactcataattttaaaattttatggcctaatgtcactattttacaaaaaaaatataaaatttatggcaaaatttggtcattttttggacaaaaatctgttaacaaatcagaacgaaattacaaaaaattttccggcggcagcctatcggcaccgcgcgaccctcccgccctcgcctcatttcccaataaagttttttcggaaaaatgcgccgcaaaaaattctgtaaaatctgattttttgatcccgattccactgaaatttacgatttgttaatttcctcaccaaactttttaaagatgataatggaggcgaaaaatata

SEQ ID NO: 15733 - DNA, 2241 bp, Heterodera glycines
aatacgcccctaaaaataggaattttcaaaaggctattcacaaacttgggtaacttaattggaaaattttttgttatatatatatgtgtacaaatttctaattgaattgagattttgtcattataaaaaacattaattaatgttaaaattgaacacaaaaactgatggggtgaaaataaaattaaataacgaagacaacaaaattgatgtcactatcggtcactagaaatcactattttggcgcttcgtcactaaaatagtgaaaattcactattttggcgttttgacactattttttcactatttcaagattttggaaaattccttaacaaaaatgcaataaaaacaaaaaacacacccctaagaatcgacctaaaaattttaaaaaatacacccttaagaattgaaaaattttctcaaaaattcatccgctaaattttttttcttgcaataaaaacaaaaaacacacccctaagaatcgacctaaaaatttttaaaaatacacccctaagaatcgacgaaaaaaatttcaaaaagcactcctaagaaatgaaaaaaattttctcaaaaaggtattttcgtggcaagaattttaattttaaaaattatttttttatgtacctattttgtttttttgcccttaaaaatcccagccctactcatttgcaacgggaccaggtcgttttggcgccgacgatttgggatttggcgccgacgttttggcgccagggtcgttttggcgccgacgttttggcgccaagccaaaaatgaaaaaaaaggcaggaagaaattgtaaaaattataaaaaatgaaatttttcgttaaatataataattaacaaaatgaagaaatggaaacaatttatttggtagaacattggaggtgccaatgagaatgtgccgtctccgaaacattctttcatttgatcagcccaccggccgaagctggccttcatgcgttattttaggcttttgttttttcgtatcaatttgacgattcattacctaaatacaaaattaagagaacataagccaaagcgaaaaagagaatgaagaattaaatccggctctttgatagacttcgtcagaaaaattataacgatttcatcatttctacctcctccctacatggcgccaaaacgtcggcgcaaaaacgttttggttgttttaatctattttagaaacaaaaagagaattttgaaattttttattttcgattttttgttcgaatttcggctccgggttccgaattggtcgaaatggatgcctggttcgtgagcagcgaccctgaaaaccattggaagcatgttttcatgacttttgaaaacaaaaaaattttcttcaaaaaaggggggcaaccaaccatcggcagtattaaccttcgcgaaaaatacgtttttttttgttgttttacaaaattcttaaatttgggtgtttttcttttttttattatagcttggcgccaaaacgtcggcgccaaaacgaccctggcgccaaaacgtcggcgccaaaacgatacggacccaatagtagggattagagtgccacgggaccgggccgggaattcccggtcatccgaggtcccggtccccggtcccgggtttgaaaagctcaggtcccggtagggcaaccgggaaccgggaaaaacaagcactggtaagaatgggggtctgagtgcaaaaattagtgaagaaaattggagtcaaagggaaaaataaaaaataataattaatatattctttaaaagtaacactggccaagtgtgcaaatggcctaatggctagtctccttgactttcccttcttctttcccctggttcaatccctctacagaaattaaattattttgaattttctttttgtatactcgtgggtttcctatagagaaaatatgattactcatagttttttttaaattgatacatttttatcattttttaaatgaaaatcctaccaattgagcttaataatcgcaaaaaccaacctttttttgttgaaaatctgttaacaaattgcacccaaatttttaaaatttcccccggcggcgcctatcggcaccgccggaccccttctttcccaaaagttttttgaaaaagcgctccgaaaaaaagtgatgtgaaaatcaaatctgaatttctattaatattcgatgatttagtccaaaaatgattaattgtttgaaataattgaagaaaatttgtttgaaaattttcattaatttaatttattaaataaaaaaccaa

SEQ ID NO: 15734 - DNA, 937 bp, Heterodera glycines
taatttggggcgctgatcacgaatatgacatttatttttcaaaattccgaatcccgaacccgaattcgaacacaaattcgaaataataaattacacggaaatttttaaatcttttcgccataaaatcattaaggcatattatttcttttaaccacttttattaaatatttaaaaaaatttatttatcaaatacaaatacaatctttttgaaaatttatatgataaatctattttttagagcgcagatatttttttaaataaatttatcaaaattttcgtaaatttttccgttttttcaatccttcaaaatttcttccacaaaatgtttcttccattttgaaatattcgttttaccaattttcaaaattttttcaatttccgtgtcactcatttttggattttctttttttattttccaataaattttcattttttcaattttttgttcatccgttattcttttacagcgaattccaaattgtttcttccaattttcaattgttctatggctaactctgactttcttacaaatttcggcataatttttctcccattcatttggcgaatattttcttttttgcttatattcatttttcatttcaataaatttctgcacaattttaaatttttcttcatcactttttgatttatgacatttatttttttgaagaccaaattctttgatccattcataaattttacttcgatttgtgcccaattttttcgctatattcgcattgattttatgccattcttttgttgagtattttcttcctttttgctttattttctcttttattttataatattttccaattatttctctttttttgagttcatttcgtttttcgtcttggaaggcttgccatttttctcctaaatatttcggcaaaggacttgaaggcaatttttctttctgatccaatttgacaattaa

SEQ ID NO: 15735 - DNA, 3789 bp, Heterodera glycines
  unsure (1)..(3789): unsure at all n locations
gtcggcgccaaaacgatacggacccataattagcattcccaaaagatgattttttttatggttatgaggatacaagtgtaattgattcgctgaaattgctctaaagcagttacttatgcttgactattgacaaaacgcacacaaacatacctggacacaatgctgttgaacaccaagctttggtaggcgtggatgtacctgtaaaaggcaaaaattatagaaaaaaattgtaaaaaaaaaaataattttcggcgccgtacattgtccgcatgtcgcgatgcaatgccaaaatggccgccttgtgcccagccgggcatttggccaacgcggacaacagcgcacgctccacggtggcgccggcggacgcgttgctgcgctccaacattcgcaacgcggccgacgcgttcgcggacgagccggcgtagcagcgcaggcatgcgttgagtgagcctggacaaaaacaaaatgttgttgtttaatgaggcccccccaatcatagaaaaacaaaaacaagcaaaaaaatatatttttttaaattttcttgaatttttgtttttattttgcggcgacattatatcccggcgacgttttgtgcctactccggcgtggtacaagcacaggagaatgatttattgtttgaaatatgtttgtaattcgttgtaaattgttgttgggaaggtgtgatgccttcccggggggatggcacgaaattccattccaaacttccgatttttgaaaaaaattttgggccttggaatccgtttagaaatttttcgtggtctgggttccatccctcgcgcaccgtttgcctccgcccgcggggccaacagcgcagcggtggccgcctcccattgttcactgagcaacagacggccaatgtgtgccgtgtcgacgccgcaggtgccgaagcgctgcgtgccaaaatagttgaggaacccatcgcgcgtccattgcgcaatgcgagcaccgagttgggcggcatcgacggacgacgcatcgacatccctgtgggagaataataaaatttatacatnttttcgggggggggggggggggtaaagggatgaaatcagagtttaacacacacaaaaaaaaagtttaaggatataaataatcaacatggtcatggttagaaattttcaaaagaaaaaattgatgtaaaattattcaaatttattttttaattgaaaaaattggtttaaaaaaaattttttctaggggggaggagggcatcctgttaattttcctaactgctctggacggaaaagtctaaaaaaaatcccggcaaccgtaaaattttatcgtcccaaataccgactaaaattttgtgaccgcctcgatatgaattttttttcttttggcatcaaacccaacaattttctcaactcgcggcatactggtaccaactcaagacaaatttccgtaaaatttgttctccaaatgttgtcccgtaaaacaacgttgaaacggttgccacacgcgtcgcccaagcgcagcggtgcgctggcgtagcaaaagtcgcgcagccaaatgccgcgcaatgagcgtgcggcggactccaagcggcccggctcgacgcggaaggcactgacgcgttgggcggtgatcgcacgccggtccttggtgccgctcagtgccaacatggacggcttcaacctgtgccaagagggggtgggtggggggggggggtaaaaacgcgttttgtatcgaatttaatatagggacgaaacacacacacataaaacgaaggcgcaaaaaaatgcagaaatttcacaaattcaaatgaggaatttttgggggagtagccggccccggaagttttttttaaagtgattttctaattatataattttcgtaaaacaatgatttttttgaaaccctgaaaaactcaaagaaagttgtgaaaattttttttaagttgcaaaagaaacaaacaaaaaaattttttttttttggagtatgagggtatggatggatagtccgacccaacattttgcgcccgcgaaaggaaaactcacccgaacatgaatcaaattccaatttttcaaaaaaacagacctggcattccgtgcaatcagatggacggccgcctgcgagtccatgttccgtttgaccatggtaaagtgcacaaaatcgccgcgcccctttggccactgtgaccaccgttttgttgaactaaaaatcaaaagggcaacgaaccattgtcatcaaaaatcatccgaaaaatggcaatattgtttttggagaaattgaatttctgcagggctacaccataacaaagaattaaaggacccaaaaaaaaaaaaaattttttttttttttgaaaattgccaaaccttcgtccattggcgcccattcggcgaactgtcagttgtccgtccacacattccgtgtccaatgcggaggcgtcaaaattggcccggatgaattggtacaaatttttgcgctcctcttttgaccaatcctaaaaaagaaaaaaaattgttcttttcaaaaattaggtaattgggtgaaaaaaatttttttctggaactgcgacccaaattggggtaaaaagtcgaactcccttttttttttgtaagaattcgggtccgagactcgggagtcggaaccgagcgacccaaaaagacccagcaaaatgatgcgtcaaggtatatcaatttgaaatgaaaaaggtcgccaatgcgaaccctaattggaacaaaaagttaatcggaatttgctaattgtaaatttaaacgaatttctttgaattaagtgtgcattttaaaacattttgatttctcattcgaattcggcattcgagttggtctaatgaatgtcaaatttcgtgaccaacgacctcgaaaagccctacaaaattttgaaagttgaaaactccaacaatcgtccaaaaaacaaaaagaaaaccttcaaatcgatgtccattttcctctcttcgtctgtcccagcggccacccgttgcatctgatcaaattgctgatcagtgagccgtgtcggcttctcccctttgccatcgtccgacggaggcacagtcgtagtcgttgttgcatcttcttggcacttttcacattccgtgccgggggcacgttttgggccgctggcgccgccgcactgttcggcctcaacacgtggccatcggacggaatttcgatgacaatgaaatcgctgtacaaccgcttcagcacacaacgaatttcgccttcggcaaacgcggacgaattggacgcaattcagtgaggccaaacattttgaaactccgaatttaatgatggcgctaaaattgaataaattctttatgagttttatgaaaaaatgtaagggaaatagaaattgtagtgtttatgccaggagtgtcattcgtccttggatgccaaggacgtccctggattagggcgtcgacgattgaaaaattgaaaatttccaagatgtccttggaaaacaaaatttgaaaaataaacattcagtaaaagcgttgccaattgtctcaaaatggcaaaaagcggtgaaataagaaaacgaggagaaattaaaaaaaattggaaaaaattcattccggcgaaaaatacaaaccatttgaataaaacttaatcaatttttcattgagtatgataaaaattttcatgcgtccttggatttcacgattttttccatttttatgtccttgggaatcataataccagtcttggaaagcgagtttttccaaggacacagccctggcttatgcagttgtaaatcaagaaattttggaaaaccacaaaaaatttttaaaatttaaatgaaataaaa

SEQ ID NO: 15736 - DNA, 1199 bp, Heterodera glycines
ttggcattgccattcctccgtcattgccattcctccgcgttgccattcttctgtcattggcattgcaattcctccgtcgttggcattgcaattccccgtcgttggcattgccattcctccgtcactggcattgcccttcctccgcagtgccattcctccgtcgttggtattgccattccccgtcgttggcattgccattcctccgtcattggcattgccattcctccgtcattgccattcctccgcggtgccattcttctgtcattggcattgccatttctccgtcactggcattgcccttcctccgcagtgccattcctccgtcgttggtattgccattccccgtcgttggcattgccattcctccgtcattggcattgccattcctccgtcattgccattcctccgcggtgccattcttctgtcattggcattgcaattcctccgtcattggcattgcaattccccgtcgttggcattgccattcctccgtcactggcattgcccttcctccgcagtgccattcctccgtcgttggcattgccattccttcaagtcccgtgcttccaccacgagggcgtccctccgcattgaaagggcgtccctctcctccagcaatcccaccaactgtttgttggttctgctgaccttcctgtccaattcgtcctttatttgtcccaattcctccactcccaatttgctcaattgctttcgcgtctttcgttccatggcaatgcgatggcttagcaaaatattgtctttttgaatgtcctcaattcgaaaagtctgatgaaaaagcaaggataaattaaaagaaaaaggaaaaagaaaaggaagggactaaaggacggccaaatggaaaaagaatcgataggccgaaacgggcgaaatgggcaaaaagcggaccaacggaacaaaacgaaacggcactaatcgaaatgactaaattcaattaattttggattgatccgtcccttcccttttcttcccttcccttcatttttctctcagttttgacccaatttcactcatcgaaatttacttagattgcgtaaatcgcacaactcctcgaccccttcgcccttcgtccgtcattttgggtcagtccttccccccccccccccccctcctcttcgctgcgtcttttggttggcgaatgcgatttcgaaagacttcaatgggcatatacgcccgggggg

SEQ ID NO: 15737 - DNA, 1838 bp, Heterodera glycines
ttcctgcggtggtccgttggtttgccccagcggcgtctctgtcgccacgcgcgaccctttcaaatgcccgcagaaagcgtcgacggcgaagggccgccgatacactgataaattgggacgatcattgtacgcgttgactttggcagctaaacagaaggatccgagttactgcttgaagaacagcagaagcgatgtgaagtcagtgggaaagaccggcaatttaatgagaattttgggtggaaaagaaagtggggaaggaccaaacaccaaattaagaattacaaggacttaaactcttttaagacggctacttattgctaaagttattagagctcggtattttgaaaatagcttgggcctgaacccgtattccaaccaaagattaaaaaaatatatgtagattaccgtattggaaattgtttgttattttcttttcatgaaaacttcaggagtccttttttcggggtcgatagtaaaaattagccattctaaaagagcctcttgtccttgaataaatttaaagtaacatattaaagaagcaagaaaatggctttcctattttaatttttcttatatatgtttcggacccaaccataagcagtcatgtccgagtggttaaggagattgactagaaatcaattgggctttgcccgcgcaggttcgaatcctgctggctgcgaattttttttttttgtaataaatattttttcagagtgatcaaatattacgaagttgaatgtgatcaggccaaaaatacttgtgccggaatgatagccgtgtcggaggaagccaaagctttgtacgtcatttatcgtgactcgaccatcgatcgccagctattgcaggtcgaacatttcgcagttataaaatagtccgactttttagagaagtcccctgacgaatgtgccggcactttttggccaggtgaaagggacacttttgttgtcacattaacacaaaatcactttcagagtatttgattttccaattttgtattttaaatactttcaaattacacttcattttgacagatcgctgcgcaattcggcgcctgggaaaaattcgtaaatgggtcgggagtaatgacgtatttccatggagcatttcgtagccttttccttgaaggaggaatgaaatcgcaacttatgaagttgaaggagacgcatgagagacaccgaatttgggtgggaaatttttcgacgctttttctctctctcgctctttatccccttctctatgtccctctctcttctttctctctctcactctctctctctctcccccagtctctatgtctctctctctctctcttctttctctctctcactctctcccagtctctatgtccctctctcttctttctctctctcactctctctctctctctcctccagtctctatgtctctctcttttatttctctcactctctctctctttctctctctctctccttctctaccagtctctatgtctctctcttttctttctctctctctctttctctaccaatctctatgtctctctctcttctttctctctctcactctctctctctctctcctccagtctctatgtctctctcttttatttctctcactctctctctctttctctctctctctccttctctaccagtctctatgtctctctcttttctttctctctctctctttctctaccaatctctatgtctctctctcttctttctctctctcactctctctctctctctcctccagtctctatgtctctctcttttatttctctcactctctctctctttctctctctctctcctactctaccagtctctatgtctctctcttttctttctctc

SEQ ID NO: 15738 - DNA, 1399 bp, Heterodera glycines
  unsure (1)..(1399): unsure at all n locations
ttgacatttaaaaattattttctgatgaaattaaatttattttaatacaaatatatttaataaaattattaattaattattaattaattttgtaaattttttagtgatgcgtttttttgtcttcgtgtctgtcgcgcctaattaccctaattaccccccccctgcggcgattgttttgtgactgacaaataattgtaaaaattttatgatttatataaatttaaattttttaggctttaggctctaaaaagaaaaacctagaaaataggccctaataactcgaaaagtaccttaacaaccaccaaaaaacaacaacaacttgtttttcgtgtatttcagaccatagggagctcagcaaataaaaattgaagccctagtgatgaagtgtgaaaacatccaatgggacgtaattacgaaatggcatttgaaattatgatgaaattcatggcttttaattattttaatattatttattaatattttattattaagaaaatctattgatgatcagtttcacttattgatcgcatttttggcaatgcttctccacattcattaaaatgaaataaaaaattattttccgaagaaattagcttaattttaatacaaatatatatattaaaaacttattaattaattatttattatactttttttagtgatgctttttctcctttttatatttgtgttcttaatcataaacaattcaactgacaaaacattgtcagttaatctgtgtaaaaaatgtcgaccaacttttgctgaaatatttggcgaagaatggcaaaatgaaataataattggaggagatgaaaatgaaaatgagactgatcaaaatgcaaattttcatcaaaatgatcaaaatgaatcaactgatcagaacgatcaattggatgttcaacaaaaaatcgaaattattcacaaatttcacgcaattagagaaggaattaagaaacggggaaaatattcggcaaaattttgggttaaaaccgagcaaaaaatagcggaaaaattgggaattagtcgacagaaaatttacaaatggaaaaaagaatttggaatttattattataaaaagaaaaaacaggaatttattgaacgaattgatgaatttaaaagaatgtccaaaaatggaaaacagaagcaatttgcgaaagaattgggcattagtgaaaaaacattgagcaaatggaaaaaggaatttggcattgaaattggcaaaagtaaattttaatttaattttncattttattattaatattaaattttattatattcttaggtcgaattcgattcaccgatgaacaaaaaatgagcaaaatgaatgattattatgaaatgaaaaaagcaaatcctttctttaagtgaccaaagaaattgctggcaattttgaaaattg

SEQ ID NO: 15739 - DNA, 1280 bp, Heterodera glycines
  unsure (1)..(1280): unsure at all n locations
atcacgtatgaaagcgaccttacctttttcgagtgtgtacgagtagctgattttcgcgttgcccagatgacggaaagtgggcacgtgaaaagcacaaattaaaatggattcggcattgcaacaatntgagcaatcttatagaggactttgcaaatcgtgactcgtttaaatatttacgggcctgttcttatggctcgaatttttgaatttttttagctaggtgtacgcttttttaataattaattttcactgacgaaatcactcactgacgaaatcaccgggaacccattaaatgaatgtatttagagatgcaattataacatatatttaggccaattccttctctgctgttcaactttcgttcgattttgccaataaattgttcagtgtggcacttccacttcgcgaattttaagagttggccgcgagcgttgtcggggtcggctcgagctgaccatatcggtcggggcgggtaatggtctcgctcttttatttaaaaatacaaaatggaaaaagaccagatcagtcattacgaatgtttggcaaaatttgacggagatcattggcaaaccgtcgctttggcgcgactcaatcggacgcaagtccaatgcaaaattacgccgggcaatgcacaattgaaattgttggccaaagccatttcctgtcaaaaagcaaatggattaaaattgtctttcacagctccgttctacacaacctccctcctcattcgggttccgactttcagccgttcattgattgccttcgccagtgcactaaacgcgggcagagacatgggagggtcggatacataactgatcagccattgaaacgggaggagacccacctaggcgggggtggcgggaattttgatcactttagagtaaactctttttttgcatgagttgccttttgtacttccctcacttctttgtctctcttccgcttccctctttcagtctctcttttctctcttccccctcccctctttcagtctctcttccttctttctctctcttccctgtttgtctctcttccccttcccactcttgctttccctaccgagtagcagagcaaattcggatgcgcagtgcgcagcactgcgcatttttacgggcgcaataaaccgaacgattgacggctcaggaaaatcactacagaaaacagcggacagcaggtttacaaagcaatgaacattgtttgttttaatacgatctcggaagaattaatttctttgaaatttaattttagaaagattcatttttagcatcagctccgccacg

SEQ ID NO: 15740 - DNA, 1092 bp, Heterodera glycines
  unsure (1)..(1092): unsure at all n locations
attttaagaaggaaatntcggctctaaatggtccgggattcggaattggtaaatgccggattcgtggtctgcgacctcgaaaacctttagaaacatgttttcatgatttatgaaaagaaaaaaaacttgaaaagttaatggggacaaaccataatagagtcagaaattctgttatttccctgaattgaacataatagataatttgatatatggaaactgtcaatattattgttatttgttatacattgatcattccgttaatttaggttgacgagcatgcggttcgtattgccgacaacgtttttaagttcgttgattgggccacttttgtcactgcgcgccgtcatttgaagtctgacccgaacattcgtcatttgttttacagtttggatcctgcaactgctcaacagcttggcattgcgttggaaccgaaaataacgacgaccgttatcactttttggtcggatgtttctacccgttaccagtctattccttatgagttcttcgaattctaaaatgatctgttttgttattcatgaattttgttgcaaacaaagattatttatattttaattttgttgtggtcccttggaattccaaatccttgaatactctaatttgcttttcaacaatttaaacgatttgcgttttccacgaatcgccatgcctctgtttgttgtcatatacatcgagactaagaaagtcaatagaaatatttgaaaaaatctaattataaaaaggaagaaaatattcagagaccggttaaaatagttttggtacattcatattcaacttttttgttgtttggtttatttttttaaaccaacaataaaattaaataacaaatctggaaattttgtcagtgaattgtagagaaatttgataaagaaatgattaaatgataactcaggcacaaagacaataaattagaaaaatcaaaagctatggaatatttccaattagacagaagacacggagatgagctttacgggtgtttgttgttgcttcttttgagcatggcttttacaatttgcgccacgactttttcacaaatgcagcgcacaagcgtaatttctcaaatgcacgaagcga

SEQ ID NO: 15741 - DNA, 2716 bp, Heterodera glycines
accatttcttcgatgtcagagtttacttcgtccgacggatcaggaaaagggttgtagttttttttagttttagcaataagaaaaattcttttgctgtaaaataaatgaaaatcaaatttcgtttttagcgttagcagtaaggtcaatgagtcggaaagctacgacgcgaccacgcttggtaaattgatgaacctcgacgccaaagtggttgaatggctcgagaaagggccatatactgacgacgatccgctcttggttcttgacttccttggtccgtttatcaatcttcatggcgactacaaccaaaacaaggcctttttggtgcagaagttggtatgtcttaacagcaaattaacatgaaagcgggatcaaattcaaaataaaaatttcaatcagaaagtagaaaatttcatggaaaatttgagggttttatcacaaacaaaaacgtgtcgtgctacgtaattgaaagtaacataatagaacactacgtagtacatattatggttggtataaatcgatcatttcgttattaggttgccgctggaggggctataatcgccgcgaacgtggacaacgttatcaaatttgcgacctgggacatgttttacgaagcgcgtcgcattttgatggcggacctggaagtgcgtcactttttctacaatccaaatccggcaattgctcttcaaaacaacattaaccaatttccgatcgtctctacaaccgtggttacgttttggtcagatgactcgcttaaattgaagacgcagccgtatcagttcttcgagttttaaaggatgatccattgttcattcatcattttttgttgcaaataaagacttattacatacttattgcctttaaatcatttgagtaattagattttaatcatgtacctaaatttttcaaatagggttggtctgctgggtccaaattgatgcttttggacccagtcaatacagaatcgtgggtaatactgacttttactggtcccataaaaaaaagaataaaaaggctgcttttctacggttcttctttccatccgggggttatcggggccgctgatcacgaatatgacatccattcgaccaattctaaacccggacccgaattcgaacagaaaatcgaaagttcaaattttcgaaatttggatttatgtttcgaaaatggtttaaatgcacggaaacaaaccgaaagacatcattcctgtaataaaaagtcatgaaagcattttaagacgaaaaattcgtaattcgtaaaaatgtcaagtttcaattttttgttcgagttcgggtcagagtttgggagttggtcgaaatagatgacatattcgtgattagcgaccccgataactccacaaaacatattttatgcctataattctaaaaaatgaaaaaaatacttgaagaaaatcaaagacttgacaaaaaaatcaaagattagatgatgtcatatgacaattatgatatcatattcgtgatcagcggcctcgataaccctcgaatagaacgaataatcgtaaaaggccgtctttttatttcctttttttatgggaccagtaaaagtcattattaccggaaattttaaaaattttgagcggtttttttctgctcttatttaatcttaaaaaaaaattttttttttttggaaatttccaaacatttaaaaatagatttttcaatacttttcaagcctttagaaggtcaggaaaaagtaggacaaatcttaaaaatccatgtctaacaagtttaatgggttcaactttgggtaatggtggagatcatgagactatgaatatcacaacataactgcatctccttccttctcagtcgtttccgacattcgccacaaaattatattaagaactttgctgttcttttagcaatacatggacgaatatatgtgccgccagttttatggaaaaaaacccttttggcattcgaaaatatttttgtccatattggtcagttttatgttgtcaatgcttaaatattgtgcatttttcgtgcaataaacaagccgagctcatttttgagctaaataattgagttagaattggaaaaaatacttgatgaaaaatcatagacatggcgaaaaatcatagatttgatgtcgtcatatgacaaatctgatggcatattcttgctcagcaccctcgataacccccgggtgaagtgcaaaatcattaaaatcgggctttttttccctttttttatgggaccaatgatctccaccaactttgtacatagctttttctatagttaggaaatcctaataaagttgtttttacgtgtgtgtatgtgtgtatttaaatgttttattaaattaatttaagaaaagtttattttaaagcgatgtcaacgtcagaagtgaaaccggaagataaatcaatggatgaaactagcaagaatgaattgcgggctgaggacacttccattaaggacaaaggcattggaagcgttaaaggttttattacttcgttatcaattttctttcgtttttagaaactgaaacaaatggcgcaataactactgacaatgaacctaagattcacgcagaaaagaacgagactggtgatgctgcagttggccaaaaatcaaccgaggaacaattcgacaaaactgacgagaaagcagagcaacaaaatgtgcgtcacttacctaaaaacaactgcctctttaattaatctgctcgacttttcttaattcgtttcaaaatc

SEQ ID NO: 15742 - DNA, 3767 bp, Heterodera glycines
attaaacactcaattttaggcaaatggtcaggactttagctcattgttgaagcccgttgtgtacgagagcccagcttacatgtaaaaattaaaatttaaataaaaacaaatttttaaaattattttaggcccctcaaagactttggcatcgatttgaatagcattttcccgcctttgttcaattttaagcgtcgttgattcatttttttgtttctgtgatacaccaatatatttgtattcaaaatgaattttatttgttgtgaaataaatttcaattcatggaatttcgaaaggattgaaatggcacggcattttgggcgatgcgcgacaaattgatggggtgaccgggaattaaaatttagatttttaaagttttaaattgaaccatccctttgttttttgctaaagatttttaataattttttaagtgactaaaaaaattaaaaaaaaaattatttaagttttgccaaattggagagagtttttgagcaatttaattacatatttgaattgtttaaattcaaattttactcagtttgagcaaatatttgtcgaccaaacaaaaattaaaaagaaaataccgcttttatataataataaaagaacacaatcaaataaatagctaggacagaatatgtaggcacttgaggattcgagagtgaaaagcctattccgaaaaaaaaacaataacagaatatcaatggagaaaaatgaatgtgttggcatggcacacaattagagtacgacctgaatccaggcttggttttttccaggaaatccaggcccatgccgtttttcggcaacctgggtttttgtccgggaaatctaggttcaggtccaaaatgaaatccatgtccaggaccaagttcggcacaaaaaccctggattttctggataatattttagaatttaaatttcgagtcattcttttttatgtcaagttgtcaaaaaatgattaaatcgattttaaacatattattattgacaattaattacttttttcatatatttagttacttttttaaacaaatttcaaaaaatccaggtccaaaatggaatccagcaggtccaggcttttttcaaaatgtcgaactctaaacacaatacaacaaacggactccggcggaacggcgatgaatttgaaacattttttaaattcatttttattatttttttaatacaatttgaaaatgcaaggtgagcaattgtttttcaggtggacatatcaaatcactcatcagttcacaaacacaaataaaataattaaataaaacaaaataattgttggcaccatttgagctttaatagagaccggaaaaaagagaaaactggcaattgtgccattcaaaatgatcagaaacggcgcggagttgaaacgtcgaggggcgcaagggactcgttgtttttgacctcctccaacccctcctcttccttctgctgctgctcgtcatgttcatggccaaagaagcccaagttggacggcgcgccgccgtcgctgacaatggccgagtcgaacatcactccgccggcactactcgtcagcatttcggcactgtttgagcacctgttgtgtgggcaaaagcataacatttttggaaaccttgggacccgtatgcaggtcatgcccccaccgccccggcgtcgttttccgccctccgaaaattaaaataaaaaaattttcttataagtaaattgaagaaaaaaaaattgaaaaattttcagaattttttggaaaaatttagtaattaaccataacattttgaaaaaactttaaaaaattttcacttttcactcgtgttttcgtataaaattttttggaaattttctaaattttggaaattaaaaaacaaatgcatggacaaatataaatagtgtcgtgccggtgccacctttgctgcgtagaaaaagcggacgtcgatgccaacgaggagtggcaactgatcacactgtccaccattgccgaggaagacgacgtggcggccggcgtcagcagcaacgacgacttttgctgttggcacggcggcaatttttggcactgagcaaaaatgccatcctcctcccaaccgtcgtcggtggtgtcgtcggcggaatgttgttgttgtacagcgaaaatgccatcatcattgaccttgccctgcttggcatcgttgttttgcttagccggcattggcgccgaaaccgcttttgctgctttggcattgcgcttctcgtgcgtaaagcgagaatagaatgccggattattgttgcccccaaggtgctgcttgtcatcgttgtcaacggcgggcgtggacgagaagttcaagctggtcagctcccagaggccgtgcgatttgtgctggtgatgatgatgcgggtgagggagaagttgtttttgggtgatttcgtgaaattgcaatcagttgaggtcgtgaacagatggaggaggaggacatctcggagatgtccaaatcgcttctgaaaagcacaaaaaagtgcggaaaattttgatatgttttttgcagaaaaaatgccgtaaatccaaaatctcgtaggagtgccgaaaggggtgaaaaagggggggggcaataatacgggaggagggtgaactgctcccgcattgtgattgattgatcagccccactttgagcccgctattctgtacgccgccgagccgggtcctcgcgtgccaccagcgccctccatgtccaaccagcagcgccgtgccagccgaccgccgccactgttgctgaccatcgacgaggacacattggtgttgacgtcgagccggtccaactcgcgcaactgaaaccgaatcgaacaataatttgatcaaatttatttttgggaggaaaaacagcgaatcgttttctcttgctgctgatcaattagtttatcaattctagccattaggagatgatcggttatggaaatgctagcaaacgaaaatgcctactaataaatcagttttttatgaaaaatggacactgatcagtgttttttttgcatgtgtaaattgttgatcaaagcattgttttcagaatttccttgtcaatcaataaaaaaactcattgtaagtcaataaaaaatgaattggacagcaacagttttgtgactacggttttgttgttgctgtgatacattgtcaagggcactgtccaccagccgatgctccgtgccgtggcattcgtcgccgccggtcgtccaattcgtcgtttcctccccgtcgccgtgccgccaatccgtcggcgccattccgcggaacattcgctccaaatttttcattgccgacagctgtgagaggctgcccaaacttgtgcaccgctcacggaacagaaacagtccttggagagagagagagagaaagtcaaagaaagtgccgaaaaaagcgtcgtttccccccccccctccgaaaaattaaaaaaaaatcgctgataatgttttcgatatttttttcttgtaattttcttaataagaaatttcctattttttagaaatttttcggggggaaggcctggaggggtctcgacttttcagacatacccgagaatgtacaatttgtaagaaaagtaagttaagtgatttaagccctcgaaaagtatgcgaaaatgtttaggtattagctccccatttagaaaaaatcattttgatttttaaaattttctcttcctatttatttatttgttaatacaaaaaacacctcacaatcagcaatttttaatttgaacgatattttttatttaatggaaaatttttgtgttttttagatttaggaaaaattatttcaaaaa

SEQ ID NO: 15743 - DNA, 1307 bp, Heterodera glycines
ttcattttttcaagagagttcggcggcgcaaaaccccgattcggttcaccacaaaggactttcacgctttggtggacagcgcaattggcagaggtagcgaaattgttcaatccaatcaaatgatccatagttgggcattacaaaaagaatatagaagaaccaatacctccgatagcctccgaaaaaacgggttattcctcctgcctttcgctgttaatttttttaatttttcactaaaacccctctaagaaatagaaaaattcttgtgaaaaacaaaacactttttgtggggcaatttacctcgaattccggatttcttcattggggttgttgtacaggattactgtccaactttggttgattaatccggcggattttgtctaatattgcaaatcccccacttctttttctttcccatttaatgcgaattcaatgcttttcagttacataaccctaatttttagtgttgggcagcgccgcgccttcatacgcaatttgttcatttgatgggcacgcaatgcgcggcgcactgctcgccgatggtgccgacatgcacttgttgtgggccgccctgtccatctacggaatgcattttgatcaaccgatggcattccatttgttctccattcacaaatgtggtgatgatgatggtgatgaaacaaatgtgatgatgacaggacaggcagaacaaattgttattgattgatgagaagatggacagagatcaccaaccatttttccatttttgtattttattgacttttttgttttactcaaatttcttttcacgccttttttaatacagattccaaattttggcaatgaaatattttttgttggccatagcatttaaataattattttttaaatttatttattatttttttttgctttcctttttcattcatcaaaatcataagtgaccttacaattaatgagttggttcatcataatcattctgctaattttcttcatttttctgcttgttgtcttcttcagtttgccaaaatcattgccttttgacccttcgggcaaacactgtcttatcactggtccgttttgagttctattcaaattcattaatttttggatttctgtttattataaaaaaaattattcagagtggcaaattaagtacatttcatacatttccaagattaaaaagaagatacgatttttggcaagaaatttttgtaaacagaaaatgaataaaaatattttctttatgaaaggcaaaaatattttttatatttatgaatattaagtaaaacgcaaaatttggctaaaattgatgttttcatgcattt

SEQ ID NO: 15744 - DNA, 1293 bp, Heterodera glycines
  unsure (1)..(1293): unsure at all n locations
agtccatcgacgcgcgaattttcaaaaattttatccgtnntaatggaaataatgaattcaatcgctttttaaatgcctcatttttatcccaacgcaatattngctccaggtgtatgtgacgcgctctgttgttggcggtatgaaacgacgccgttttggccacatttcgtttgtgtgttcagcggctggccaattggcaatttggtgaatgaaatggccaggcccacccattttagtgttaaaaacctatccaaatttttgggggggggtatattctcgagatcttgcttgattcaaaaacaaatttccaaacgccaatatcttttttctaacccacccaaaatcttcagtttccgagtggtacccagattagtccagcttggttgagaaaaaccttcttaaataattttcgaaaaagccgtttttaatttttcggtaaaaataaatttttaaaaaattcatgtcacggagcggactcgaacctccgccctctttccctttactatcttacaaaaccactgacaatgagccacatgtgcaacacttttttgaactgggaggtcaaaacgctgtgttaaggggttattccgcctattcgccatcaaaatttgcactccgtggctttgccaacgcgttgcacatggaactgttaccatggaatgtcggcgtctcaattctatttccgcccaacacagccactgacgggttccgtgacgaattgcgtacaatgccaccacaggtagaaagcgtcgccgggaatacttttcccgtaatgccgggaaaagttgacccggcaaattccggcacttttccgaaaacaataaaaaaaaaaagatccgtgccatctctggcactgccgggctgttccaagccagcgatgtcgccgcacgccttgtccaagccattgaaaaaggccattttgcaaccacggttggcatggagggatggctgctgggcacactgagtgccggtgccagtcctgagccgaatggcatccaggcatttttgcaggtccgacctaatcaactatttatttgtttatttattactgtttgatagggaaaagcaaaaaaaaatcttagaaatttgttagcgatttttccaaaaaaaaaatcttagaaatttgttagcgatttttccaaaaaaaaatcgctgagatatttcaggtgatgttgggtggtcttcttcgtggggtgctccttatttatggaggcatttcaaccggttggtacgaaattgtctccatgaagctgtcgaaacagcagctgatccacaagattcatcgtgaaaaaa

SEQ ID NO: 15745 - DNA, 1194 bp, Heterodera glycines
tgtgatgtccttttctcccccacccaataattcaccccatccacacacttccgccgcggatcaaaaaaaaaatgggattcaggcggtgggtacttcatcatcttctcgagagtcccgtccagcagcagctgttctattgtcgttgccccatatgtcaaatgtcgccctgattcaggattttctgttctttccttctcttcatcttcctcatccctccttttcctcctcctccctcctgctgctccccctccttctcttcctcccttcttttcctccttctcttccctcctccctcccacctcctcctccctctcctttcctcgtccctccttttcctcctccttctcttttctcttgctcatcctcttctttcctcctccgcctcctcctttccgctcctcacttaataccgcacacattaattaatttgggttggtaagtagcacatttacgagacattcattagcagagtattttttggaatttttttttgtttgattgcctcttttttattcctttgtttgcttgtgctgattgagtgagtgagggtggtgggtagcttaaattgttcgattgcttcatctttctattccaagtgctcctctttccccatcccagcagcagcagcaagttcatccgtaccccagctcttcatataaaaatttttttggagaaaatggcaaattttcgaaaaaaattttttgccaatattaaaattctttcccgcggtagtcgattctcggctctgccggagtgcccattttaaaagtcatgtgaaaaaaaaaacattgatttattcctttgcgattttttttctagcgaggcccccccccttcccccattaaaaagcccttgaaaacaaaaagttcactggataattttgaaattttaatgaggtgattgattatgggatattttgggttcaattaatcagcagcagtttaaagctgtcgacaaatcacttaagagttcattcacaaaacacatttgtttactcctcctcttttggtgcctgccgctggacacaaatgtgtataaatggtggcaaatttggacacttggacacaaataacacaaacaaatttgtacttttaaataaaaatagaaaaaagtggtggtgtaaatatgtatatgtaaacattttcctaaaaacatacaaaaaataatgtaaaatttttggtttagaattttaaa

SEQ ID NO: 15746 - DNA, 3196 bp, Heterodera glycines
agacaattgtaaaggccgagcatcagcgagaaaacggcgcacagcgaacttttgatgattcgccaggccaacccttcgcgtttgtggtgctgtccgaagagcaaagaggtgccggacgactgccttttgccggccgatgaatttgtgccgttcatcatttgcactgttttatggaagcaaatattatttccagcaattcggaattattatttctaaaattagcaaataaaaacaattttattatatgtaaataaaaaaaattcgctttgctaaaattgtataattttcatttttaaaaaaaagcaaattagaaaattgaaattgtgcatggttgaaagttaaattaatgacatgaaaaccagattagaatagggtaagggcgtcgtcagttacatcaaattgaatttacagctccctaatttccgttttttcggtgaaaagggggaatgtcgaggtttctccatctccaggcattttttaatgtccgtggcgtgccatggaatttggacagaaaaacggaaacggctgagaaaaataaacttcaagcatgaacattttgccaaataaacaatccgctgagaacaaaaaacaagaaatcaccgcccaccgctgctaccaccgctgactcatttttgcaaaaatatttattggatcaatgtgattagaaaaaggccttgaaactgggcacagaataatggttaaatgggatttacagatacatagttaattgatatttctattagtttttaccaatctttgtacattttttcatgttttatggaggccgatcttttccaagacattttgtccgccttacaagtgagttaccaatttttgaacgcattttgctattttataaaacaaaagagtaatttgaaacccctccaaatttgtttcggtttcagcaacaaaaaaaaagaattcgtcttccattggccaatccgtgcccaatccaaaagattgtctggtcctcctttgactatttgcgggggcccgagttggaatttgtttgggaggccgactttttgccggcaccgacggcggaggaaggcgccgatggggagcaacaacaaaattatggccaaaaaagctattgttgcacaaatggcggcaccgatgggacgacaaatgccattttggaggacgccgaaacggtggcggacgtgtcatgtaccaacagcagcaccgactcgtccttttcaaaggtgtccccctttttattgcattttcgattttgagactcagaaaatcagattaaaacatttccaaaaaatatttttgtgtctgtaaatttgttctcgaatgatgctcccaaaatattagtttttatcacaaattccaatgaatttgtactttcaaatttaatttatttccgctattttaacccaatttttcaagaaatgtttaaaaaatattttgttaatgaattgtctttttcaagaacaccggcgcatcgggtacaagcaccgcacaatacgaagagattgacgaattttataatgtaaatgaataaatttttcttccgatgtttgccccctaaatttttttggcggtattttagacgctgaatatgaattatgctaacgcaagcaaaaagactggtccatggaaagttaaactttacctaattatcggtataatgtaagttcattagcgcatgaatgagaagaaggggactcaaattgaatgacatttttacaatgttactaaaatgtgccatgccttcgcctcacttttatacgaagtgtaagctaattagctgatcattgatcagagcactcgaatgtgtcaatcacagaatatatatgccaatctctttagtttcatctttgctcactaataataggccgtctttttgaatttttaatcaatgctcattcacttatctctgtttcttctgataataacttttcacggaacatatttaaatttgcgttagcataaaataaagatcagattcgttttgcggtgtctaaagttaccctaaaaattgtcaaaaattatttcatagggttcacaaaaccctaaaatgtaccaatttttggtataaattcctttcctatttttagaatgaacttttgcagctgtccggtgacacctttcataatgccggccaatttttggtttcttcatccacctccgaacattgcgctggcggaccttctgtaaattaaatatttgttttttgggcccattttcgtttttggtcctctggacgactgtatttccctatctttattttaatcagcaaactttactgcaatttccacttcaattcctgccccccccctcattttcagcaacaacgtttaaccgacgagttgagctccctgaatttatcctgtcaaactgacgacactttgcgtgccgtcccttccgccagcagaaggacggacaacgccacagcttacaacagccaaaatgccgacggagatggtgaagttgtggcagtaacaacagaaacagattttgctactatcaccaccaccaccaaccacaataatccgccgtcctcgtcgtcgtgtgccgatgcgatggtcacttcgtgcgtggactccggcattggcggcacagtttccattgagagcaatttgagcacgtacacaaagccggaacacagagaaggcatggaacttggggaggggggcaaggggacgaaaaaatgttttcttgttaaaaaattttttagaattttcctataaaaatatttaatttttattgaaaaattgcatttgaaatttaaaaaaaaatcagtggcgaacgaacccgacgaaattttaatggcaaaattttggggcgcactcatttttttgctaacacaaaattcaaaacacagatgaagtgctgttcaattcggatgaccagcgctgcagcatcaaaatgcgcagcagcagtgccagcagaggggacgtgttcgactatcacattccggaagcggaggaggtcatcgagttcagccaggtctatgccgacacgtcgtccggcgaattcagcgatgggaacagtcccaatcgcaaaaggttggtgcgcatttattgtgcaataagaaaaaactcaaaaattggctaaaaactttttttcaatcgggtacccacaaacccaaaattctaggatcgtcgatgtcgggtatccctatttcccagaggattaaactaaagatagatcataccaggttccactttcgcaggactaaaat

SEQ ID NO: 15747 - DNA, 1028 bp, Heterodera glycines
cgccgatactatgtttctggatttgtttctcggcgcgttggttgggaaaaaatttgaaaaattggctatctcttttctgctcaacagtaataggaattccaactgcattctcagaataattacgccgatactaattgttctggaatttgtttctcggcgcgtttgtttgggaaaaatttggaaaattggctatctctttttctgctcaacagtaataggaattccaaccgcattctcagaataattacgccgatactaattgttctggaatttgtttctcggcgcgtttgtttgggaaaaatttggaaaattggctatctctttttctgctcaacagtaataggaattccaaccgcattctcagaataattacgccgatactaattgttctggaatttgtttctctgcgcgtttgtttgggaaaaatttggaaaattggctatctctttttctgctcaacagtaataggaattccaaccgcattctcagaataattacgccgatactaattgttctggaatttgtttctcggcgcgtttgtttgggaaaaatttggaaaattggctatctctttttctgctcaacagtaataggaattccaaccgcattctcagaataattacgccgatactaattgttctggaatttgtttctcggcgcgtttgtttgggaaaaatttggaaaattggctatctctttttctgctcaacagtaataggaattccaaccgcattctcagaataattacgccgatactaattgttctggaatttgtttctcggcgcgtttgtttgggaaaaatttggaaaattggctatctctttttctgctcaacagtaataggaattccaaccgcattctcagaataattacgccgatactaattgttctggaatttgtttctcggcgcgtttgtttgggaaaaatttggaaaattggctatctctttttctgctcaacagtaataggaattccaaccgcattctcagaataattacgccgatactaattgttctggaattttttct

SEQ ID NO: 15748 - DNA, 1629 bp, Heterodera glycines
  unsure (1)..(1629): unsure at all n locations
ggggacctctagagctattaattaaaaactgagcaaatttttgttagttggcctctagccaaagaaaaatgcaaataaaaaaggacagagcaaacaatggataaatttttgcttaacggcgcttaatgaaatggccaaaaaacactttgagaatgaaaaaagagaagtgaaaaaacggataaaatatataataaattataaaatattttgactaaaataaataaatatggtcggtcagcaattaattaattaactaattaattaattgactaaaccccaaaagaaaaacaaaaactgtgaaaattaatgttgatgaaatgaagaatgggcataacgaaatttaaaaagggttctcagttcagccaatgtcagaaaggaaaagaaaacgagaaaagagagacaaaaaacataaaataaaatttggaatcctcgaaccaaaaaagaaataaaccgcctggaaaaactttacaaaaaatgttttcagaaaatgctgtctcccctacatctcacacagcgaaaggctaaaatttctaaaactttccaagcttgaaaccaggagaaaatatcttgatatcataacagcctttaaaattatcaaaaatactactcaccttaacccaaaaaacctttataatttttcaaataggaaaagatcaccttttcctattttggtaaccaaacgaaaaattaccaaaacagaacactcctttactaacagaaccacaaaacatctacaagaaatctgcaaaaattcagatatttcaatatcaaattcattgcccaccttcaagaaaaaagtaaaaagcattttacaagattaattttaagttggagatctgacattatcatgtttcccggactatcattctcttccgaaagtataagcggcctttgtcccttcttttggacttttattacttgaataaataaaaaacataaaataaaataaaagggatttatgagcacaaagagatcggaattgagaagagagaaagaaaatgaggaaacgaaatgcttaaacttggagaaaaacgaaataaaataaaaatcggggcatggaaaaagcgcagttaatggcagaaatgacagaaacggactccgtaagctgggcttgttaagtgtggcacggagtgcgaacccacctgagtctgaaggcgcgtcagtccgcggatccacagaatttgcccggagcgtttctcccgcgcctcgccgccctcgtcgcccgacagaatgttggcggtgtccggctccacctccccaccgccaatggtcaaactcttcggaaggcctttggttgggattgatgtgaccacctaaaggaaaagccgtgaaaagccaaacggaggggagggaataatcacttgggcccagaggagagagccgacgccgaaggccacgcaccaaagccattggtccaaagtcagcggttcggtggaaaaccaacgaccgccgaattcgacgattacaaattggacgatgagagtgaacacccaaatggtgcagtagatcggattggtgaacacgccctgcggaaaaacaccaaaaatggagagaaacacaaaaagcggaaacaaaacccccggnggtcgaagctgcgatccgtagcacagttaagttcaaaaaaaaata

SEQ ID NO: 15749 - DNA, 1452 bp, Heterodera glycines
gtcgtccgtgagaattatgtcggacgcctctttggcgacgtctgtcccggcgattccctaagtgattttcgggtttgacgccaattagtggggattaattggccaaccatggcaaatcccacgtccgccttcttcaaagcgggcccgtcattcgtgcttaagcatccctttgatcagaaccgacccctccaaactcacccgtccccggtcactgctacaacttcgcggttagcgctcagtttgctgtcgatgatgcctttgaccagaatgtatttgtccgtcggctgtgcccttgccaaaacacgcagtttcggccagatttggtccaacttctcctgacaaacttcgccgtgctcgtcccggatccgatcgttgaattccttcccctcaagcgctaagaaatcctccccgggcttcaaaatgccacaagaggttgcgatcgaccgggccgtgtttatgttgtccccggtgaccattcggacaacaatcccggaccgttgacctaaaaaaacggacatcagatttgccttaagcaatgctttcggtgtttcaaatgaatgcttacattttgcaattgcctccggcacctctgaaatggacgatgggtaattaagaagctaaacggacagacagaggccgacctggtctgaccgggtcctgaatgcccacaatagcgacgactgtcaagtcactaatgaccgcattttcgtcgtcccaatcgatttcgcctccaaatgccagctgatttccctccacttgtgctgttccgtccgctatatagtctttgtaggccaagcaaatcgttcttaggccgtcggatgccattggctcaatcacttctctcaccaaacggtccaagtctttgctgccaaattgtgacaaatgcccgtttcttccgagcatccatttgcatctgtaaaatgggagcacaacaatcagcgaattccgttggatccgtccgactttttcagaatgatttcggatgcccctttgctgaacacgcggtagccaaaggtggaagaatcgtattcgaacttcttcagctcgatgaccgttgacattgactttcggacggagttgaaagtgtacacctcaaacaaacaaaaagtcagaaaggcgcgaagcgaaaggacactttgaaaatgcgctcttcgggaaaagcctcgcggatggcctggtaactctggccaagccccagcacgaagcccagcagcccacactccgttttattgcccaattgctgcatttgctcgcccccctttttcgggggcagcacttgcgtggaataactcgagttgatggaaatgcaatggacgagcaaatcgcgcgttttctcatccaacggctcccatttaggcgtttctttatgatgcgtctcttaaatgtttaaattcaaaatcaaaatcaaagagcatcccgcaccgttcagatagctttgcaccaccgacattc

SEQ ID NO: 15750 - DNA, 1503 bp, Heterodera glycines
  unsure (1)..(1503): unsure at all n locations
cataagtctgacaaattatntttgttaatccaaatccctctagtgaatttgaacaaaaaatcaaaattcgaaaaattccctctttttgaaactcggcctggctagggacctataatttaagcagctgtaaatccgtcagtacaccagcagtgagcccccaaaaactgagccacggttaaatttggccacaataaaatttgaggagtatagttacaaaaaattaggctcaacggataaaattaaaaaattgacacaatttaaattcctttccttattttttaaaaaggcaaaggtcgatgaaatttaaaaataaaagcacaaaacacactttgaaaggccattcgccaaaaatttatgtgaaaaattatatatgtttatgacttttattccccccaaaatgggcttggccaagtgcaaacaaaggaggcacactgacgcagcgngaaaagcttcacatcccacgccgagagtgacctttaaaacaaattttgcaatacgatatttaaactttgctccgtcccctatttttggaaaatttcccaaaaatccttaaataaatgttctaatttctaaggcggttgccttggtttcttgggcccgtgcgcatcaaaatttttgttctcgagtttcggttcgagaaaccgctcgaacatttggggtcctgctggtctcatctcgagaataaaatctcagtctcgtttttcgagaaacctcaaaaatttcgggttttagcgcccataatttccaatatttcttgccctttttgaggagggattcgtagagcctgagaggtacatgacctagtcaaaacccggaccaggccaataaagccgggccgtccatctgccaaaacccagatcctgtcaataagactgggcaacggaccccaataaagccagggcctgggcacggccaactgttagaacccgaacctggccaataaatcctgggcaagggacccagccaataaagcctggggaccggccaactgtcaagcccccgacccggccaataaaacctgagcaagggacccggccaataaagccggggcaggccaactatcaaggcacgggtccgacaatttctaaatttattgatccattttttgcatctaaaaatggcagacttactatataaataacaaactaatttgaaccattacactttacacgcgccctcctcttctgtccgccacttctgtccgccaaccaccaacagacagaagacaaccttcgcccttcgtccttagcccccccccccctcacccccagcgggggtcggcctttttcaaccttttccatctcacatattcattcattcattcatcagttcagcctcctccgccgggggatgggagtgcgaaaaatgaatgaataaacgaatgaatcatcatcattatatataatatttgttgtatctgttgtgccccaccactgttttcctgtttcactgcagcaaaagtccatcatcactttggtgattggtggctgtgtgtgtactttg

SEQ ID NO: 15751 - DNA, 1907 bp, Heterodera glycines
attattattagggcctgtaattatatggaaatccatatttttttcctggactgagggtggcctgaaacgcacgaaaaacatgtttttagcttgtttgaagcttctaggatgactttccatatcaatattttccatatttcgcgatttatgtccatatttccatatttgtccatatttccatatttgtccatattttggcattttgtccatattttatgtccatattttggcatttttctaaaaaacctctattagaacggcccccatcagctaaattttccgttttgaccccaaaaaccagaaaattttccaaaaaaaaatcatttttagcaaaattttcttgaaacttgaaaaatttaaagaatttaaattttcttaaaaattgataaatttatatcaaaaatgagtaaaaaaacgaaaatttcgcttttaggtttgatttttcgccaaaaatgagtaaattttagctgtgtcttgtttttttcctctaaaataatttttaataccatatttagccatttttgaacgttttactttacatttagcgaatttgaagaaaaattgagaaattacaccctcaatttggaaaatgtatgtccatatttttgccattttatgtccatatttcgcgatttgttgtccatattttatggccatattttgcgattttatatatcctacatataattacaggccctaattattattgtttttttattaattttaaattaattctaatttttggaatttaaaaaaccaagcactcctgcacggcatcccgcaaattttaagtgcgagatttggtgggattaatacccgagtgatcccgccccgaaacaaataaattttgagttcatatcctgcagcaggatccgcaaatttgaaaaaattaaatgtcatttcgtcataaattcaatttatgctctttctttttgcttttgttggttggaaattcgaaaaaaattagttttttaggcttttcactgcgtacattttattatctttgcttacataaataattctaagcgtacatattttttgcagtaaaagatttttgtttttgccttttttgttccatttaaaatactcataaaattgcaatttttcaactgtcccattttaggagtgccttagaagtcaaaaaattcacttttatttttgtttttgtgccgtcatttcccattttgtgccaccgcgctccgttcgcttcgttttgtgccgtccaatgcaaaagggaggatgccaagtctgctgctgaacccgggcccgtcaacaatgaactttttctcctcctccctgccgttgccttcctttttcttccgtaaccgaaaaaagtgttacgatttgaacccggcggaagagagccaccaagtgggccaatttttgtattacaaaattttgggggacggaaattttgggtaaaaattttttggattaactgccaaaatttaatatattggctatggttttttggagaactttaaaaaaagcctaaattgtcaactatgtgccggttttcatctcaaaatccccagaaatatgttattagaatttaaaaaatttcgggaccttaaaaagatataatataattaccaaaaatttggggcaatccttggagtttactggtcccgttttttttttgttttttaaaatgtttaaaaaatattcttaaagttgtttcataggttttcagggtaggagaacacgattatgacacctatttcgagaaatttcgaacctcttacccggattcgaacaaaaattctaaaattcaattttcaaaaaattcaaaatatgaaaaaaaccagttcaaatacacggaatactatatcttgccttatgaatcgattttccgttttatttcatgcattattttgcatgtttggaattttttcgaaaattgaatt

SEQ ID NO: 15752 - DNA, 1213 bp, Heterodera glycines
acatggatttcaaacaaccggcacggcatttgcttctaagcgtaagttttgatgtaccaaatttctatttgatcattcaccattcgtttttaaggacgccgtggcactgtgcgcactgctggaacgtcgtcttccattgctggcacttcgacacatccgaaacaccaacatcgtggacatggatctcaaacaaccggcacggcatctgcttctaagcgtatgtttgatgtaccaaatttctatttgatcattcaccattcgtttttaaggacgccgtggcactgtgcgcactgctggaacgtcgtcttccattgctggcacttcgacacatccgaaacaccaatatcgtggacatggatctcaaacaaccggcacggcatctgcttctaagcgtatgtttgatgtaccaaatttctatttgatcattcaccattcgtttttaaagacgccgtggcactgtgcgcactgctggaacgtcgtcttccattgctggcacttcgacacatccgaaacaccaacatcgtggacatggatctcaaacaaccggcacggcatctgcttctaagcgtatgttttggtgtaccaaatttctatttgatcattcaccattcgtttttaaggacgccgtggcactgtgcgcactgctggaacttcgtcttccattgctggcacttcgacacatccgaaacaccaacatcgtggacatggatctcaaacaaccggcacggcatctgcttctaagcgtatgttttggtgtaccaaatttctatttgatcattcaccattcgtttttaaggacgccgtggcactgtgcgcactgctggaacgtcgtcttccattgctggcacttcgacacatccgaaacaccaacatcgtggacatggatctcaaacaactggcacggcatctgcttctaagcgtatgtttgatgtaccaaatttctatttgatcattcaccattcgtttttaaggacgccgtggcactgtgcgcactgctggaacgtcgtcttccattgctggcacttcgacacatccgaaacaccaactcgtggacatggatctcaaacaaccggcacggcatctgcttctaagcgtatgtttgatgcaccaaatttctatttgatcattcaccattcgtttttaaggacgccgtggcactgtgcgcactgctggaacgtcgtcttccattgctggcacttcgacacatccgaaa

SEQ ID NO: 15753 - DNA, 944 bp, Heterodera glycines
attcttgaccatttatgattgataaaaagcaaaataacaaatttgcaaaataattattaaacttataagtggaactcctgaaaagtatacaaattcatagtcgaatttttaaaagatattaaaacttatcagaataacttgcaatttacatgaaattccattcgctaaaattcaaaatattcgtccaagaataagttttttttttcaaaatccaaaatatataaatagagataacaaataaatgattgaaaacactaattattcccaacattagctagttatattttgaaaatttaaaaatacaataaatatgcataaaaataattataaacttttttaactcatgtaataaagtaatccagccaggcagctcagaaacaagtgctaattgcacaagaaatattgaaaattaatttttacaaaaaaacagtcaaaaacaaacatcacgatagcaatttgccataaataatacaatacattttattttctattcaacgagaactttttactaatatatattaaaacaaaaatctttttatgaattatatatatagcaaatagatttaattaaaaattacaaatattttaaaataaatagaaatattttgactaatcagtgattgaaaggaaacagcaattcaattaaaagaagaagcgattgacgacattaattaaaaggccaaaaattaccagcaaactaacataatatttaaaacttatttttgcagataaaaattattttaaacagtaaaaacaatttacactataatttaaaataagaaaaaatatttatttctcgaattaggtgttattgtttagaaaatgaataattaatttttaattatcactttttatgtcgatccctcacaataaacaacagcaaaatttagttatccacatgctttcattgttaattctatttattattaaactaaaatatttcc

SEQ ID NO: 15754 - DNA, 2677 bp, Heterodera glycines
  unsure (1)..(2677): unsure at all n locations
ttggaaaaaanattcttcgtaaaaagtgaaataggcacaaaatgccataaaaatgaccaaaataggcttagcatcacattttagtattttaaaaaattaattttgatatatcattttttgaaaaaaatcgattttttagggatacattttcaaaaaaaaatttttaaattttttacaaaaaatttctataaattctcaaaaatcctcaatatgtaaaaaaatgaaaaatatgtacgaaaaattgcgaaatatgtacgaaaaagtccaaaatatgtaaaaaatgtaaataaaagtcccaacttttgttcgcaaacacaaaaaaagaaagtgtttttcctactaattaggctatggagaatctaggaaaaaagtatgtatttacataaaattagcatccttatttatgatcagaataaaagatctgcatgttttttgaggtggaaatgagatcggaccggtcggttttttttcggtatcggtcggttttttcggtatttttcgattttcggtttcggtttttaaccgaaaaaaaccgaccgagaaatttttgagtttttcggtttttttcggtatcggtttttttcgggtttttaaccgaaatcgttcgaccgaaataattaaaaaaccgaaacaatcgaccgacttttttgacaagtcagttggccatttttttaacaaaattcattaaaaattcttaaaattttcctccggcggcgcctatcggcaccgccgaccacccaaaaagctatcttttcttaaaaaattagccaaaatctcaaattttggtatttttagacaaaatctgctaacaaatagcattaaaattacaaaaaaaattcccggtggctcttatcagcaccgccggccctaaagttatggcttgagctcgcaattaaggcaccaaaaagcgcaaaaaaggcatgaaaaaaggcatttaaatttttttattagtgatttttagggagcaaaacacgtaaaaactaaccaaaaaactaaattttgctgatttattgataatttaattttataatgtttttcaataaggaaatttttaaacctaaaattttttatcaagaaaaaaaaatgaattttggcgttcaattcataaaggtatattctctgaatttttttagatcatatcttaggggtgtatttttccaatttttttgaatttttcggggaaaaacgccaaaaaaggcaccaaatcgctaaaactaatctttgtggtttttttagaatcaaggagcaaacacatgttttttggctgccttttctatcattttccaaacctttagtacaccattcaatagagtttcaataggtctagaattttactcagaggagatttttcgctttttctttaatagaaatagtttattgcttttttgaaaaaataaacaaattcaaaaaaaccgaaaaatcgaaataaaccgaaaaatgttcttcggttttttcgatttcggtttttttcggttttttaaccgaaaccgttcgaccgaccctcttgtccggtctctactttttgggctctaaaaataaaaaatagaaaataggctctaatatctcgaaaagtatcttaacaacccaccaacaaaacttgtttttcgtgtgtttaatgtcactgggagatcagaaaaataggctaaatgctcaaaataatgaattattttcaaccaaaaaaattttaaaattactaatggaaataaaaagaaaattggtggagcagtaactttattaataaataaataacacaaatataatagaaaagaagaaaacatttttttgaaaaatttacataataacagtcgtataaatgttgatacgacaaaatattaattaatattaaaaaaaattccactaaaattacaattaacaaaaaacaataataaaaggattgaaatcttttaaagatatttaaaaatactgatacagttaaaaaataataaatattcgtcattatgaattatcaaaatgtaatattcatttggttgcttattttatgctatacattctaaggaatatgccgtatttctcgtttataagccccggggattctattgaactgaatttttttttcaattttgcaccttggaaatttatgcgaatataagcaagcgtaacaggcaatgcgcaggaaacaatttattatataataaaataaaaaaattggaaatctttaattttgtaaaataaatgaatatttaaacgaaaataaaaagatctaagaatgacgaaattatgaaaacaataattactaatccaaatcatttcattttaacatttttgcaaatccataaatgcgatactatcagaaaaagttcgacggttttattcaataaatgtgattagacaaataattttctaaaaataaattttttataaaataaatatctaaaaatttaattataaaatttaaaaaaagcggcagagaaagacaaaataaatatatttttgaaaattaataatgtcggtaataagccaataagcttaaaatgtttatatctaaatttatgaaagaaaaacacatgtaaaacaatattaaacgaaaattattttaaagtatattttttattgaatgtttttttacggtatccgaaaaagtcataaatttaagcagcgaaatcaacattaaatatcaaagaatccgaaaaactcacatataaaaaattaaaattat

SEQ ID NO: 15755 - DNA, 4547 bp, Heterodera glycines
  unsure (1)..(4547): unsure at all n locations
aagatgctgctgttcggcgacgcgttcagagagctgacaatgcgttggatcacccgcgtnccagcatgggtgccacggtgcgtgaagtaacggtacagacgctctttgatgctgcggtttgcacgctccgccatcncagcgtgccacagtggcgatgtttccatgcagtggtgacgcacctccgcctcgtcgcgcaagtagcgttggacagcggaggcggtgaactcgcggcccttgtccgtcaacagacgccacggcgtgtagccacagcgggcaaaggtgcgcttgagcgctgcgatcatgtcgtccgagcgcttgctcttgaccggctgcacatacacctgcctgctcagcgtgtctatgcacaccaacaggtaggcgtacccacggttttgcgcgcggagacgttggaaatcggccaggtcggcctgccagtcggtgtgtagaccggaggccagagtcggcagacggcagaagcgtcgtcgcacttgtcggtgcagggtgtagacacgttggcccgccaagtagcggctgatctccgcgcgcgtaagacgggcgtccgggtgccggcgcttcgcctcccgcagcaggggctcaacgctggtgaagcaagctggcgaccgttcgtccttgtaaatcgggtccaaaagactttccaccgtcagtgagcggacggcgttgcttccaatcaccataattgaggcttaaaacgtttggcagtagaatgctccgcagtgttgggcttcctcttgctcgtcgcacttttttgaacagatttatgtgcatgatgatgattaggctgtagtaagcggctcagggaaaagcggcccgcgccagttttcttttgtccgcgcagaggttggtggcgccgaggttgtccgcccactgttgacgctgaatcactgcccgccgccgccgctgccgccctttcatccggaaacagcaaacgccacatttgtaaatcgtcacgcgcattgttgacgaaggttttgtagcccggtggtgccttagcgacactggcggtgggggtggtagtggaggaccgcggctgctgctgctgatgacgacccacaaagtggtagcggagcagcgtgtcaaggttgctgccccggatggggcgataagcgccctgggcaaggtgcaaaatttgctgaccgtcttcaccgccgacgccaagcaagcctgggttctgttgcgcgtacgccatcgcggcatgcatacgcggctcagcttgcttaggcagaccgccaattttttgtggagcaacagtctgctgggggagcggttgttgttgctcgtcactgctgctgctgctgctactttttgttggccttgtcgaagaagaggaagacgcgctcggcgcttggttttgttgctgtaagccacgtcgcctggacagaggtgtggtccgttgggggcgagctggcgtcgtcgtcgctgttgcaggcgcagccttctgtagcacagtgtcacgcagtgcgtttgttgtccgttgcgatagctgtacgttgagcggtcgttccgcctcctcctccagcagtttctggtagcgcttgaactcctgttggtagtggatgaggcgttcgtcatcgttcatgtgcttgctcgacgccaccaccattttgcgtgccgtgcgctcaatgggagttgcgggcgtggcaacttgttcatgcacgtggtagaagacgtcgccaccgctgcactggggttgtccatcagacgtcgataaacatcctcggggatgagtagcatgcgtacagtgtgcttcaacgtcattgtttctgcgtgggcaagcgtgcgtgtgggtgcctttcagctactactgctggttgtctcgaaaacgcgttggacgagcacgggcaccagcacgctggcgagcaacccgaccagagtcggtatgccacgaccagtttgcgctgttgacggtgcgtgggcgttgagcagaaggcgacgggcggagcgtgtgctacgcaccctgctcagtgtgcggacgtcgctcgcacgctgtctgaggctggccagatgacggcgttggatgggcacacgcgcgcgtaagatgttcagtgcactctccacaaggcagagaagctgctcgctgctggctccggcgaccagcgcttggcagcgggtaggagagctgcgtgctgccttcagttgtcggaagaaatcaatgtggcgcctcacgtgttcgctcagcactggggggcgagatggggcgagcttgcggctgctgggtcgtcttttctcgccagacccttcggtcctcttcttcaatgtgttgttgttgttggctccgccttttcaatttttttcggtgtcgactgctgtttgctaattgtgctaagcgtttgcattaaaattcgcgcgcgctcgtggcatgtacaccacgcacatttcccccgggtatatatgcgttttcaggcgcaactgttgctccgtggttgggtgcatgtcgaccaacaggtagccaaacggttcggccgttgcgtcctcgtacgcttccaagaagtagcgtagcgccccgcccggaaacagttgtgcgccgaggttgcggatctgaagtgcgccgaccgggttccgcatcaacaccatgtagtgacagttgttgcgcgctatccgaagctcacgagtgaacagatgctgcgtgatgagcaccacgctgacgccccagttgtgggagccacgggtgaacaccgtgtccagaaagctgcagcgtagaccgccggacatcaggtcgtccaacaccaacaggtgccgtccgcccgtagcgcgtgcttcccgctccacatccctctcctcgggcgctccgtggcacattctgatagaatgttttccctccgtggtgttgctgtcacttgaagtggtggcggtgttctccatacgttgtagccggagcacattgtcgttcacttccccataacagtagagcacgccagtgatagggccttcactgaccatcaggtcaatgtgagaaagaaggcggtccacccactgcgatttcccgctaccggtgcatccggcgacgcacatggtgaacgggtgcttgaagaacattttcccttcttcggttttttgcgtccctctgtatttgcacacacacatatatatataaatatgtagataaaaaatttcttcctccattctactaaacccccacccccaaaatggattcattcggaactgtcgcctggattctgcgaccaacggctcagacgacaggcactgctgtgggctcaatggagttcgaagaggaggaaaacgggacaggaaagttggtccacagtgacacagctactgtcaccacacctaccaccgtcgagtttagactggaaaaaagccccctcctccaagaaggacggtgctgaagaggcagcgacggccacggcacactgctgttcatcgaatccgatgatgtggaggaggaggatgaggacattgaagacacccccgtcgccacagactccccctcggctgcgacggcaaccgttgtggatgactcctccgacactgttaaaggggtggagcagcagcgctccagtgaacacaccgacgtgacggacggagcgggcggtggcggtggaagcgaaggcgcaaaactgctcggcggaggagagaaagaggaggtaggtggaggccagctaattttctacctcccaccactgtttgtagcctgttcgaatgccgctgctcaactacctgtgcgcgttcaacgactgttcaatgaaggagctgcaactcctcttccacagtgtccacgcacgacagcgtatggtggcgcatctgcaacaacactgccgacttcataccgcgcatctgaaaccggcggagcgtaacattgcgctccactgtcacgacctcagcgtgaaaaacgcgaaccggacgttcgcctgcggtggctatctggagcttaccgtaagtcggtgagtgtgtagaaccagtcatggtgcggccttctgtccaggttcgacagtacttcttcgccaaacacgggctaaagctgaagcacccgtacatgccgtgcatgatcgagttcgggggcggcacgcacgcctcctactatccgtaagcggggggtacgcaaaaatgggggaaatgagcgtaaacgccttcagcctggagctcgtccatgtcgtgctggagcgtacgaagcgcgccaaacaggagacggtgaagcaagaagagccataccgtcgtgaatccggcgacgtggctccgacaaagtcgatggcaatgccggaacgacattggtgccgctgttgctgtcgatgcgctaacaactagctttttgagagacatggtcattgtagatttgcgtgcgtgatcacgtgacttattgtgctgttatagtttttgtgcactttttttgaaataaatttacaagcccatggatttgtagatgttgaatactatccgaaacagtacggtcacatttacattttgccaaaacaatcggccttcagagtcacgtttgcgaggacaacaacaaccgcagagcgtggctccgccgatcaccgtcacttttctgctgtttgtcaactgccagctga

SEQ ID NO: 15756 - DNA, 1994 bp, Heterodera glycines
attttactttagaggggttgaacaatagaaggcccccccttggtagaaggcccccttctaattaaaggccccttttttggaggggttgaacaatagaaggcccccctttggtagaaggcccccctctaatttaaggccactttttggaagggttgaaaaatagaaggcccgggccttcaaatacaggaaatacggtatattgattttcaaaaaagcatttgactcagtgccccatgaattacttttatacaaattggaaaaataggtataaggggcaaacttttgcggaccgggtcggttgggccccgccgattgggccccgccagttgggccccgccgattgggccccggtacgattgggccccgccgattgggccccatagagcacatggacaagggggggggtcagaataaaaaagttatattgtcaaatgttattgttttcgtgtttcattgcatatttgtaaatatatttggtttcatatttgttttctaatttttttatattttcccttttcttgattgcctaactaaaataccattaattcagcttattatttaatatattaatatcacgatggaaaataatatcttatcgaagatgaaccacaaaaaacttgaacatgaaggtcatctttatgttttcgccaaacttaacgcggatggttttatcaaattttggaggtgtgagaacaaaaacaataaggacatgaagtgccgagggcgtctgcacaccaatttgaatgacgtagtgttgaaacaagtcaatgagcatgtctgtggagcaaaccctgcgcgagtggaagcacagcgcgtcgttacaggttaggttatatcaaatgctcaagattttgcatgcatatttgacaattttaggaataaaacgtagagccattgaaaccgccgagccgccatctacacttcgctcaattgcactccaaaatgtaagaacccctgtgttgtctgaagtcccaacaaaaaatgcaacaaaacaattaatttctctgcgctcattgtattgccttttttagctaatcaaaagggcccgcaatgaaggaattactcccgcaatgccgcttaatctaaaccagttacaaatcccacaacaatatcaaatttatgcacggaacgaaaacgaaactgaaaactttttgctagccgattctggtacatttttgttgaatgaaaatggacccccgcaacggtaggcaatgcgttttgttcgattcaccattacttttttttgttaggattttgattttcgggcgcatgtctcataatagctgggccaatcaaatgacagaatgttacgctgacggaacattttcattaagcccaccactatttttacaagtttttgcagttcttgcccggtaggctttaattaaatttttgtagtaaatgttcagttttttataggcgcggcaagtgggtcttcccggttttttacgctcttttaacatcaaaaacttccgccatttaccaaagaatgttcagtatgatcaaagcagtttggccggccttttcacctcagtccatgtcgttggattttgaaattggtttgatgaatgctgtacgagaggaattccctaattgcaatttgcgatgttgtttttttcacctcgtcagaaatttcaaaaagaaaatggccgaacaaaatgttattcaggtcccattcttccccccaaaaaataaaacatatttttagcggtataatcacgactctaattttgttgaaatggcgcgctgcatcacatcattggcatttgttccgttgggtacactcactcaagcaattgtcgcgctcgaccaccacatccccgccgaattagaccccgtttttgattggtccaaacaacgaaaatttaaaacaacaaatttgaaaaaaactacttttaacacattcaaaacaacatgactttatattttctgcaggtttatgaccactacacgggtagagtgcgccgaacggaaccccgaccaaccctctttga

SEQ ID NO: 15757 - DNA, 1563 bp, Heterodera glycines
  unsure (1)..(1563): unsure at all n locations
tctagagtcaaaaaataaaaattggaatatttttttattaattaaaatttaattacatcaaaatgatcaagaaaatatgcaaaatattgtatcccagctgggaattgaacccaagcgaaaaataatgaaaggcagaaagtttagccaatagaccacattccttctcttttctcacccagaccctccctttcttaccagtgcttatttagtcccgcaggacggactggcaaaaccggggccggaatttcaatttttccaaaaacctggaccgggacttacaaaaaccgggaattcccgtccaagtcccgtgcaactctaaataaacacaaacatgacattttaaaatgatcattagaattaatatttatttaggtattgtagaataaattaatgacttctcaagtgattggccctgctttgttcgttttgcatggaaaaaccgaagctttaatttggttaccgagaaaggaacaacattttttcattaatgatgaaaatgttggcagctacaaattgggcgattgggttctcttcgactacaacagggaaaaaatcattgaacaacagaaagagactccgtatgaaacgaaagtgttgtattcgaaagttgtgaagcaaaagttcgtccaggtacagagcaatttcaatgaattttaattattttcaattaaattaacaattttagattaaagttccacttgtttttttctcggataaacattcctcagaagttatcgcctattctcctggctttggacgtgttggtgcctttgttccgaatttggcgatggatacaatgtgtttcgcttggattgctttgtatgttgatttttcagctcataattcgcaaattttatactatgtatgggtgccaaataattgaatcaaattacaaattaaaaccatttttaaattaagcgctggctttttcaaaaatgccgaattgcgctccctcatggctacctttgagttgacatggctcgtagcagaagttgatcgtcttatggccaaatcggaaatagtacaactaaaatattcattcatttttgcgttcggctccttcattttcatttagattgagtttcccggaaaattgggactcagcaactctttcaaccgctgttttggcattgttatcggtcgcgagtttcgggatggaaaacagaataatcttatagtcaaattcttcactgcatccaatgggctgtgtgagtattgtatgccaatcgcaaatgatcaacaaccgaattttcatatcggaagctgggcacgttttctgccaatgtgataattgtcagcttttatttctattttctaaattcagaagaaattactccaatcaattcactgcggtaaatgcgtcgactattaacacaccaaatggcatttctttgattgagacgcaaccgcaaattaaggttaattgttactgctctgatttaaataattgagtaaggtctttcttagttgtatntgtttcacgatctcttccaccttgacccagacccatacaaaaacataatccatgcagaatttctgggagaattgcattcaactgatgat

SEQ ID NO: 15758 - DNA, 2543 bp, Heterodera glycines
acatggaagttgggtcactttcgatttgtgagtatttgcactttaattttgaatgtcgtttttttacaggaaaactgagagtaatggagaaaaaaaggtcattcgttgcgacttggacaaatcaccgccaaattgggcagtgacgccaattagaaacaccgtccaggcagttgaacaacgtttgcacaaaattttatctgcattgttcaagatcgaactgactgcctttgtcccgaggaaatggcgtcccgagataattgcacccgaaagtcgtatggtaccgacaaattggtttgatgaaatgttggatttcggaatgctactgaccgaagacatggcggacaaaagtgttaaggttttggcggaaaggaacaaggttaagaacgctattgtgagactgacgttacttttactttttatttaagcattcctcaggcaaaacctggcacctggtgaaagtattgggagttttgtaagaagaagggtcgatcgagaaaacttgtttctaatatattattattgtttctatattcactcttacacactttcatttttaaaaaatatgttcttttcgctttataatatttgaaaaaaaaatttcatttcaatgaataaagaatgaaactttaacaactcaatctgatttgtcataacggtggggttgataatgtggaaattggttggccaatcccactgcaacagttgtggcttgtgtaacgatggtaaaaaccactaatggacaagttcctccgtggtcttcgattcgttcttcgacgcctcctcaaaatcgccaatcaaatctaaacaaagtgggggaagagtaagagaatgtaaactctgctaagtttatacccggcacatcgtcgtcctcagccgatggtttgaattgcgtggtctgtaattataaagacaatccaaaaaagtttgaacaaacaaaatgaaccacgttgttggcaagcttcttcagatgagtaagcgactccgccccgagttgattaagaatgcccggcaacatgtccgtgatttctgaagagggaaaggaataaaaaagggtcttttagttgtaaatttgaaatttggtttccttaaatgccgttaaaattaggtgacttacgcttgttctccgctgtcccagtgatcgagaaggtgcttaagttcaagaaatattattgctttgcgccgcaagagaacagtaggcactgtttgttttgcttgtgtttggcatattaaaaagagcggggaaacgaaatttaattgaattgatgtacccaaatttaactcaaaaaaggcaaacaaacagcgcaacttttgttttgtttactttgccggtaccgaagcctgaaccttcgggttgttaaagtgtatcactgtcccgtcgtctttgatcatattgacctcttcgatgccaggaatgttagtcaccgaaagctttttcagattcgtctgtaactttttgtcgtccattgcagtagttttgtgcacgactttcttcttccttcttgcagtaccctaaaaggggaaatgtcaatttcagtttataaaaaacctaaaaacaaaaaattaatcaacgaaaaattaggtaagttttacgatgaaattatacctttccacctgtgcgcacatgttctgcattttgttgcagtttctttattttttctgcattcattgccgaataaatgaataaaacaattaacgtattctaaatttgacagatatttaaaaaaaacagtattgatctttgatcaaaaatgattaaaggaacaaaaaattgaatattttcttctaattgaaatatcaatacaaaaaatgcactaaaaaaataatcgctcaatgtcttacgggcggttgactgtcggggccttgctcctactctgatttttgtctgtcgacccctactccgattttttgaaccataaaagctctcccctttgggtttcgacctatactctgggtttttgtcgaccgctattttatggaagtgccaggattttttagcacatttagcggggcgctgccgttcgggcgccagcgaagttcaaccgcactaactttttctttatgactaaatccaataaactttgtattagataatagcagggcgtggatctctccagatttgtcagaaatgtactgatttaggtagtgagtgactagagcccggagcaggaccggaccctgcgcaggattttgcaggatcccagtccgcaatcctgattttttggaaaatgcaggattgcaggaataatccggccggatccggtccggcaaaaaattttaaattccaatcctgcaacaggatccgcaaatttgatttttgtgcgggatcctgcaggatccgcatacattctttgaaaatgttaaaagacggaatgccaaaatttttgaataaatttataataaatcaatcaaaataaattcaattttcatctcaaatttcacctagaatttgcaaaaaaaatttcccagcggcgcctatcgacaccactggatagacattaatactgtagaattgagtcaaaaggtgtgaccatttggtcattttt

SEQ ID NO: 15759 - DNA, 2025 bp, Heterodera glycines
ttaaaatcaaaaaaatcatcattcttctctgtctttttttgcatacgggaggggagatatatcgtacaattaatcacaatgtttccttttcctgttcagattcctttacttgggctttacattttcgtggagcttctaaaatcattgagaaaataaatgtattttgaaaaaatttttttaatccatattttaacggtataattaaataaaaattttatatattaaaaataaaagtattaagtaaaaataatatctaattttttagaatatgtttcatgggttcgagctccagaaggttgttatttggcacttctgccgtggtcatcactcatttaaaaaaaaaagtcgaatgcatcgttattatcccataagaacaaataataaaaaatattactaacaataataaaaaattaccattttccacttttattttatttaccatttgttccacttgctccatagttggcttcagcaattcctcatatttatgtacataatggctgtttttgtgaacggttttaaggtgccgaattgctttggtcggtctgcgaccaccttcgcagcctttatttggctttttacacacgatacattcaatctctttgtcattgattttcctatagagaccaattttccaaattggattttccgatgcttcaaataaaataatattttaatgaataatttttttaatttaaaagaatttatgtaaattttttaataaaaaattacaagtttgttcccggtaggcccgaaccgttttaagcccccttgaaaaattttggtctagttcatggtttttctagtatcggtaatactcggtcccgcttttcataaattcaaaaccatccatgctaccctcggcaataaattttaaacaggttactgtctaaacgtaagcctcgtgaattaccggctatgtaccttctactataattatattttggaaactttctaaccaggaaggtcaagcagcctactttaatagacatcatttagtttatctaaaaccataacagcgctagcaaaataataattaaacctttaaaacgcttagttttttgtctgtgcacatttttatgatcagaaagatcatccggatgaagcacatattcatggttattcgctgacagaacttcatctgtcaatagacgagtgtgtgaaaaattcattgcatccattctgttcagaatatcttcatcagcatcatcttaactcggcatttttatcatcattatatttatggaattgttgagctatttatttgggtgggacagcgtaataaacaacaattatattccgttaaaaagattttccataaccaaaatatgaacaaaaaaatttaatccgtattttttaccgttttaaaaaaattattttatcgttttgcgtatctcccaaacaggttttggaatttcccgtcctgtcacactacgaaaacaaccttgcatagaatttgctgatttggttggactatcttgattgggatctggaaatggatgatgattcgcaatcttttgaaccaatttgtctggtgttgccactttgccaatctgttgattaattattggatcgagctcagatgtaaaagttgtagaacagtaagaaccattgtggtaatcatttgacagcgactgtgtgccatattcagccggtttcttattcttcattgtcgcattgtttaaagcaatattagttgtaatctgtggcataaattcactgccatagtgataatcattcgggaatggtggaagattatattttgtctgatcatgacccattggcactattacattatcatggttatttatagtttgtacgtcatcaaaattatggtaataaggtgcaaaatttgtatgatcagtctgagtcaaaaaattaccagtagttaaatcttggccataattgtaataatcaaacgctttggatgtgattattatccattgcattgacaatatgccaaagtgagcaaattaattgcaacaaaaataaaattttctttgaaaccatttttttgttatctaa

SEQ ID NO: 15760 - DNA, 2270 bp, Heterodera glycines
  unsure (1)..(2270): unsure at all n locations
ttagacaaaatttaaaattatctgaactcgaaaaaaccaatgcatagatacatagcaacacaattttaaataaaaattaaattgttttttggagcggaaattcgaactaaaagtgaaagagctctttaaacaatgacaataagacagttttacgaataaaattgtttttatataaaaatatttttgttgattatgcccaaatcattattgagctaataatttttgcaatcaaaaattctcgtcaaaaaataaataaattttggaggtgaatttttgagaaaaatttttaaccgattattctatttctaccgctaaattaaaagttcgttttttaattatttttgataaaactgtaatttggtgtaatattttttaattttttgcttaaacgaatgattagaagatttgtcatgataatcaataataggtttataatacggaacttttctgaaggtaaattcactttgtttatctcttcatttttcataatttaaaataattctgactcattatgtgcaaaaaatttctttcatcgaatcagttaggttttaagaaacaaaaaagagaaaaagcctaaaatattataaattcgtttgaacaatttgaaataatttaaaaatactttcgaaaataattttaaattaatttaaggaaatattttttttatctgtttgaaggcttagttttaatattctagaaaaaatttttaagacaatgaaaacgagtacatatcaaagaattaaaaaatcaaaaaaaaatcgcgcaataaagtttaagctacaatagaactggtaaacaaatgcaaaaaatcaaaaaggataaataggcaagaatatattttttaaaatataactatgttttaacaaaaacaaatattttgtttgctttgtaatggtgatatttatgatatcccagcgataaatttgctttggcaacaacattataactgaacattccagtaaaataaatagattagtccaataaactctaatttcttcctatatttgaaaaaattcaaataattttttattttccatgtttttgtaataaaaaaagctatttaatctgagatctaataattataataatataatttcatatggtaaaaaaatactttctaaagaataccaaaactaagaaacatgatcaggttataacttgaatatattataaagcagattcgatttaactgcacatgtatggccgaaatgaaaaacaatagaaaataaaaattattataataaattttagataaaaaaaaaatatgtcataaaatcaatttcaagttgaaatttttgtaacctgaaattctatgcaaaaaaaatcaattcaatgaaaatgaatactatttaaaattttgattttaggtatagaaactcataaactttttatttattaaatattgttgccatattactttcatctcatgatcacactattatcgacatttcaaacacaaaatattatatttttttttgtaaaataataatcaaaaaattaattaaaaaatataaacctaaattaaaaaaaaattaatacagtgaaagatgcgatttatgtagattattaaattttttgaactttatttaaaaataaaacactgagaaatttaaattaattattaactccaaaaacgaaattaaaattcatttgatacatatacaaaataacagatgcaaatgacttgatgttttttattcatattcatttatgttttcagcaatacgacaaatttgagtcattttttgtaaagtaattacataaagaatttaacaatgaatataaatatttgttacaaaagatatttccataaaaaattttaaagttagaatgctaacagtgaaaatttcaagccttaccaatttaaaaagattctggataataatgaaataaattcatacaaaaacataaaaagttaaagtgaagcaattaatttatcagcaagaaaataatgaatcaatttaaaacaaaattatttaaaaaataggaaaaatcaaattgtactctttgaatatgcttaatatatgaatttacatattaaaatatcataaaataacataatactatttgagacaaaaatatgaacgatttgttaatcataaatttctttttanagaaaatcaataaaccgataaataaattaaactttaaaagaatataaaaaaataattaatttgatgttatattttgaaaaaaagaatttaaaaatttaatatgtaattataanaacaaaatttcataaagttattaattcttttcattttttattt

SEQ ID NO: 15761 - DNA, 3319 bp, Heterodera glycines
atgacgggctccaagtgaatggattaagaaccggacccggcctgggagatagcccttaaaaaactgaacaaaaaattgttcttaaccgggccgggttccggatcaggcacttttggtgcccgaaagtggtgcgataggcttccggaaaatgaccaatcaatcactgagttttttgtggatcgcccacactgagattttttgtggatcgcccacactgagattttttgtggatcgcccacactgagatttttgtggatcgcccacactgagtttttttgtggatcgcccacactgagatttttgtggatcgcccacactgagtttttttgtggatcgcccacactgagtttttttatggatcgactcagcacgtttttaaataaataaaaatgattaaaatattaattataaaaaatgaatttaactcttaaattttaagttatatttatttctttgaagagatcatttaattttaatttctaaatttttaacaaaaaattattccaattaaacatattaatatttaaaattttgtgccttaatttcgattaatgtttcgaattcgaacagctcttcagatgtgccacattgttccgtcgatggtggcaattggaattggaccggtgttgacggggacggcgcttttgatgaagcggcgctgccaatgctttgttgttgccgacgattgaatgcttgagcaaaacagaacaatgcacgagcggtctaagcaaaattaagataacattgaaaattaattaattttattaaataaaaatatattttcaattattttttcattaaattggtgagaaataaaaactatgaatgtctttttcagttaaaataaatataatgttgtaaataatccaatatggatgagattaaacctttgtctatttttaaaaaaataaatatttagattaaaaaaaaaatttatctttaaattgaacaacaaaatttttataaataaaaaataactttctttttacttttttggaataaaaagaactcttattttcctaaataacaagtttttttgaattaattctatgattatgatttaaaaataaaaatatgaaaaagaatgtattaaattataaaataattaaatagtgattttctctttttaaaaattaaaaaacagttaaactatttttaaaacaaacaataaatctaaaaaataatgtaaaaaataatatttaatattaaacaatttttttttctaaaaaattagattaaacaatcaattcattcacctcctccggaaatacgcaacgaaaaacgtggcattgatgaagtgtagcatttttgcccgccaattgtgtaaatgaaagagcgaaacagctactaaattcgttttaaattaattattaataaataatatacctacatacataaaaaagaaaaataaaaaatatatataataaataatttcatttttaggacctttccgatgtctcgggtttgcctcgtgcacaaaaacgaatcctttggattggaaatgagcaaatttcggccgggcattctttgccggtttccaaaagtctgaaaaaaaatctgtttaaaaattatatttaattaaaaataatttatatattttttaatttatttttacagtcacctaacaatgcctgttgggccatgaggaatgactaaggtgaccgaaaccgcatcatgtgccttttcggcattcattgcagcaacaatgccaagcatttcacctgtgagttaaatggggtgaacagaggagggggggggggggcatatttttctaattgattattttggggattttttggcatctctgaatcagtgacggtttcagtacgggatatcggcttggagaggctaggagtacccgaatctgaccatttttttttcttttgctcttcagaacaccaaattttcctctctatttttaaacttttttggggagagggaggtcagtgcattttgtacctcatcgcccatttttgaatttttcacaaatctggaaatcaggtttccgacagtttacgggatcactgaacatgaagttaacatcacacatttcgaccaattccgaaccccgaaaatgaaatcaaaagttgaaaattcaaattttcaaatttcgcacttgcttcaaaaatggtggtttaaatgatcttttttttcaaggcttgatgacttcagtttgtttctttgtatttaagctgtttggaacaaaaatgtgaattttcgactttttgttcgagttcagaattggtcgaagtggattttgtttgatatttttctttgtttaaataaaatttcaatattttttttcactttcgctcgtcgggtcgcccatttttgaacagcccaaataggacagtctttcaatgattgattcagctgcttcacactttttgttgcaatttgttaagttcaacggacgagcagtggtgccatcatccgaaagttgctcatttcgcttgctaattgttggtcttggggctgaggcatttgctgaatttcgaaaattttaaaatttattatttttttaaagtattgaaaaaaataaaaagaaaaaacaatatttccttatttaaaagataaaatttttttatttatttcaataacaaatattttgattatataaacaattttataaaattaaattaaaagaataataaaattatatttttaattcattttaatcattttaaaattatttataaccagttttataaaaattaaaataataaaacaaatcaaaatattcaaaaattaaaaaaatattccataataaaatttaaaaaaaaaacatttttttaaaattttagataaattaaaattaaatattcaaaacttatttttatgaatgtaaaatttaattgcttacatgccgatgccgatcgattgcgagaattgctgctgatgctgttcaacatcgaattcagtgatcgacgcgagtgatcagcaaaaaatgtgctgctgatcgcactgcgaatgggcgacgaatctctgcgccgttggtgctgttctgctgctggtggtggtgtaattggcattggacatgaaaaattgttggatgcttaacaataaaatttaaaaataaaaaactgcttatatttatctaattttagcaaaataaattttaattttttaatattttaaaaggaataccatatttcccaaatagagcccccggggggcttaattttttcaccccccctcaaaagtggggcttattataagggggggggggggctaaattttaaggggggggggggtattttttaggaaaaaacctaaaattttaaaaaaaataaaaaaaattttttaataaaaaaaaaaa

SEQ ID NO: 15762 - DNA, 1760 bp, Heterodera glycines
ccccaatccgtcccctccccatttgccatccgtcctccttaaactccgatcgatcattcttttttatccatataaacaaaatgcatcatttttaagtcccccgccggtcgccccccaatttctgccgggaacgacagcagcagcagcccaaacaaaacggcctctgattttcgttaaatgatacagggaatacaaaaaaaaatcggatttacaatttacgtcaaaatcaaattcaaaaaacgtccaccgaaaaaaagaaaaaaaaggggggggggggggacagatgggagcactcaaaaacagaggaaataaaatatgttcgataaataaataaatgatgaataaaaaaatatttgatttcccctctcttcatcctcccgttttgatcatgttccatcatttttgttctaattctgatccgatggatgcttaattagctgattttttcattttttaaaattttttctcttcggaaagtcataaatttttttttctttgtcagtcactcttttccgtaacatatgcgcttgcttttatttccaaaatgcttcattaacttttaattactacataatttcttttctaaaatttttaaatttcattttaaactaattaaataaattaattttaaaatactattaattaaaataaatttactttttgttaattttgtactttcttcggattattctcttatcagacagactatttgtttgatctgctgattgatccccgatctctccttccttatcactcatcagcagatgaaaacacaactactcttgtgatcactgtaaaaacattatgccattctctcaaagcatttgccgacttttcttctttgcatttaaattattaataaatgcttttaaatgtgccaccaattcgcaaaaagtccattaatggcacggcaccaacagaaaaataaatgaataacccaagcggatggaattattcaagagcttttatttgtcttttttgctggctttttggttctgatcaaaaaaattctcaaatcaggaaattttgtttggtcacttctttttgattaccttttcctctttttttgcgttttaatcaaatttcgctaattgtccccgatcagatcacgcacagtcaattagtccattccgaatcgaatcatccaccattttgatcactccccaatcagatcagatcagcagcaattaaaacctatctgatccctttttcttttttgatcaatccaataatttacgcccccccccattaatccgatgctttgtccgttaagcatttctttgctttgttccaatctgatcgcaaatgattggtaaatcttcgtcagatcagccaacaaacatttccaaattctgctcacaatcagctcactcactgatcaaccagcagcaccaattctcaatgaatccttttgtgcattgacgcgcaattcgccgaattctccccccccccccccgcgggcgaattgctcaaagaataaagtgattggaggaggagggggaaagagcaattgcgcccctccccccgtttatttctccctcaaattcgctcatttctccgcccccaaaattttcaatgattgaaaaatacacagaaaattcaccacttacatacacatacacatgtaatacgaattacttactagctgtctgtctgttcccccttataattttattgtcatttatgccaattttttggtgccaacggcgccttccctagccatttttgaatgttttggcattaattaagcgacaaataaa

SEQ ID NO: 15763 - DNA, 965 bp, Heterodera glycines
  unsure (1)..(965): unsure at all n locations
aaaagtgtggcagtcacaaaaataaaaattgtcggcgtttgcctaaaattcatttgnccggcactaatggggggccaacgccaacggcacggcacacccagcggaggagggcaaatgtcagcagcaattttcactgatttgtccaaacattttgaagcttctttttgaaaaattcaattacattttaaaaattttatttaaaaataaatgcttaaatttgaattacgaaagcaattaaattttttgttgagtttaatttaaaattaacaaccaatggcctttttagctctcattaattacccccccccccccccgcattttttattgaataattgcatcatttgttaattgattgatgagcgacgcgcccgccagtgccaacaaacggcgttccgcgctggcggtcactgcgccggtcgcgtggcgctcgcacagtgcgccaccgcgcaaaaaatggtaccggagaggtgagagaggcaggcggaagcataaaattgcaatttaattttcaaaaaatagcgaacgaacttaataaatattagctgccgcgccattgctgaaccgccaccggtccaccacgcagcagcccggcgccgagctgtacgaccaaatggtggcgcgtcggttggtcagtgccatcgcagcatggcacgacctgcacgcgtcgttgctgcaactgtcgctgcgcacgacggacgacgacgagggcggcgaaacggcggcggacgacgatcaccgtctgctgagtgccaagcgcgtgagccgcgtctcctcccgcgcctcctccatctgttcaacggcaggtggtggcaaacttccttcttttttgaaaattaaatttttaaatttgctaattaaggccgaaaatcggcgagcatacggcgagtgagcggcagacggaaaggaggccaacggcaagcgtcggcgagacgcgccgcgcggaatcagttgcgcgtcaacgacag

SEQ ID NO: 15764 - DNA, 733 bp, Heterodera glycines
  unsure (1)..(733): unsure at all n locations
gcctgcannggtccctttagtttcaataaaaaaaattttntgaaaaaatctgctcattaaaatattcaaaaccaataaattaaatgctctaattaatccatgccactttcagaaatcttttctgcaaatggtcgaacaatttcaattagaagaagcaaggatgaagaaacacatggaagaggtgcggaaaaaaatttaatattcaaaaaattgcaaaaaaattttttgtcggaaattggcactgccaccccttttctccctcagaaaattttaatactttgtagatttttgcatactatgaaactgatttttgtggatttgggctaaataaaaatttaaaaaaatgcttgatgaattgtgggctggcgattccgctaggtgccaccggggaaaattaagattttttaaaaatgaaatcataccttttttagggggttggggtcgaccggatggatattttcgaaataaagaaacctgcgagttctgataaaatgataattattaattaaccacaaacagagcgaacagaagtgggccgagattttgctaacaaacggaagacaattggagaagggaattgcgaattctgaagaagagaattggagaaaacaaatggaaggggtgaggaaaaagaattttaataaagttttctaaatttaaataattacgtaatgattagcatacgttaaaaaagtgggggggggggggtcggtttggcgggagcaggtggggg

SEQ ID NO: 15765 - DNA, 1509 bp, Heterodera glycines
tttaatccggagaattatgccaaaaaaagaatttattattactattttatcatttttttgccatttttcgtattaaaaaaacaactgctagaagctgtgctgtttatagcctctttattattttaatggcaaaatttgcagagcgaacggcaatggacagttgggcgtatgaatgggaggcaattgtcggaaatggaaattgcaaatcaatgggacccgccaaatccctgtcccgcctctcttttgctcacatcgcctggggcattgtgtgtcgaacacaccgggcccaataacggtaaatgcctctaatgatgttcgagaatcggtttttcaacactcagtgccgagtaatcattcaaatttgatcaaagcaatttgcaggggatcggcattttcattttacccctcattttatgggtggggagctgcttgaaaatttataataattttgagaaagggggtcgggtgattttcaagttttcctcggcggcgactggcggcaccgccgaacccaaaaattctatttacctttaaaaattggctcaaaatctcaaaaattgccattttttggtgaaaatctgttaacaaatcacacccaaagatcaaaaaattttcccggaggcgcctatcggcaccaccggccgcccccctgttcccgaaattttttttggaattttggaaaaagcgcgccgaaaaaaactgttttgaaaagcaaaaaaaagggtcattggcggccgatcccccttcgcaaaaatttttcccgacccacccccctttttaatgtatggtgattttttaaatttttgtaaaggcatccgattgggggggggcggggttgacggtaaaattctcgaaggaccaaaaaaccaaatgtgtatcttttttgctttttttctgaaactttcttaaaaaatttaaaaattaggctgcgtgaaaaaatattacaaaatcgctgaaaaatttttcaaaaaaatctttttttttttttggaatttattatgaaaaaatttgaacttttttttcttattttaatagtttattcgaaactcttggcatttttgtaaatttatttgtttttttttcatttctcagagtgtttctctgtccttgccaaatggccaattccaaaaacgggcacattttacttcgaagttaaatgctcgagtcggcatatgaaaatggggtaagtgaaaagcatggccaaccccattttgctttcggcattgctcacattcttccatttttaagcgcggctattggtttgtccaccaaacaaatgccattggacgaatgggtgggacaatgccggggcacttactcctattcatcccacggcattttgtacgggcacaatgttgcgggaaaggatgaacaatgttttgctccatgcttttatgaaaatgtgccaccatttggttactacgatgtcgtgggctgcggcattgaattggcgacacgccaaattttttacacgaaaaacggacggcgattgggtgggcaaacaaaaaa

SEQ ID NO: 15766 - DNA, 1129 bp, Heterodera glycines
tgtttattttaatttgttgctattcgcgggctttctttggaaaagtgatccatatttttattttttctggaataattttgaaatttgaaataaaaaaaaatttggtggcgagattttgtctcggcgagatttcggccgggcgagattccggcggcgagatttcgtcccgtccccggacagggagggggggggggcaattttgtaaatcgtactggggtccgaggcaattttgtaaaatttttggccaaaatcgaaaaagcactggtaaagatgggaaaattttacgaaattggaaaaaaaaatcaaaattttgtgccaaaaactcaacaatgtttgctgggctataacttttgatcgagacatcgtagaactaaaagatatggcattttatttatttttataatcattgataaaaaaatcatagatttttgcagctttggcaccagattcttgattagtgtctaaaattatcctgaaaagatgtttttctttgtttggcttatgacatttttagaggggcgcggcataacggaaaagtaccaggaattttgaagcgatatgagaaatttttaaacaaattttttaaagaaatttataaactacaaatttttataaaatttaaaattcgtttttgtttagattttaattgcttaactattttttcccctttaaatccacttaatttttcccctttttagtcactcccattttgcttgtcgcccctttgtccgtcgatttgttcccatgtgtttcgctgtgttgctcaaaaatggaagcgaattttggccctaatgatttcatttacaaaaattcaaatgtcattccgaaaaggacgagtgatgaatgagaatggagggagaacaacgaagatgaatgatctttaccgaattttatacatttgcagattaagcaaattgaacagtccaatcaatcaattatcatgctcacgcgactgtgaaatttaataaatttcttcaaaaaatataaaattatttattcaaattcaaaaacttaattatccatcaaggaattaatctgatgtacacaatgggaactgtcattatgtttttcttttcttttttttgtaatttggacagcacagaaagtatttctgtatgagaatcaaaaa

SEQ ID NO: 15767 - DNA, 1625 bp, Heterodera glycines
atgtagtatgtggatggatgcttgccatcccacatagatttaggtatgtggatggatggttaccatccaccattagatgtcgtatgtggatggtatgtactgtaaattaaatcgtttaaggaccatcggctggagcaagtctcgcagggctcgacttggccaccaaacgaagcttttgcgagtgcagcttatcgtgacatctatggaggacagactgcagggtcacagactgcagctgggatcaggaaagtgtggcgccaaagattgctgcacagtttttatcccgggagacgtgcagcggcaaagagtgctcgccttggcctatacaaagccatcgatgaaaacgacaaacgcctcgacaaaaaccgacctcccaagtataacaagctgataacgtatcgcttggacaaagccttggtggaacatccgacggcgcaggcacttatggcacaacatcagactgcagcagttgcggcagtagggggtggcgaggaatctgaggaggaacagcagccatacttcgtggatccggtggaacaattcgaagcgcaggttggtttatctatccccataatctctatgggtatggcgcaaccagcaaccatccacatagcaggtggtatgtggatggcaaccatccacatagctgttggtatgtggatggcaaccatccacatagctgttaattaaggggatggttcccatattaggtttacttgggaatgtgattcgtttcgttaaaacaatgaccggtgttttaaagggtggtgtcattaccgctgcagacgtgcaggatttgaagcgtggttggacccagcttgagctggatgcgaaagttggagcattgaaggcgaaaaatgaccggatgtatcagtccatttgtgcgcgccttcaaggacaggccgccacaattcagcggctgcgggcgacaaaaggcttgaaacgatctcgtggagacaagagaaagacttcagttcgtggaaatggtaaggaaaatgcaaatagaaagtggtatgtggatgggatccagatactcattacagtggtctttacagaatatataccaacatttttcacgttggcgccttgctaaccctgttttaaagataagatgagcctggtgacaaaaccttccgcagtaagtactgaaataaacatcagatcgttgaccttataaaaagattctgatgtaccgatgtcaatcacggaataatttctctagctgaaaccgaaaccctttagaaagttccctttctggttgtaattatgggttagaattttaaaatttgacctattataatattctattatttatatttttgcaaaaaattcgaactaccaacatttttcggggcgaaattcgggcttccgaaaaaattttaatttcgaacccagacccgaatttgaacaggaagacgaaaattcgactttttttagttttactttttatgtttgaattgcatacaacataaaaaatgtacacattttaatgttgaaataatttgtgactaaatttagttggtgtaatcacgtttaaaaaaaaatttgtcaaatacacctccgggctttgaaatttatcaaaatggatgagatctaaaaccccaaaaaggagccttccacttttt

SEQ ID NO: 15768 - DNA, 1392 bp, Heterodera glycines
tgcatccccttaacaataactcctttaagggtccacgcatttggctaagaagaaaactttggcccaagtgttggcgccgcctaagaatgcaggcaaagacgtgcagtctggtaagtagttttaattttcttgcccgaagaagaagaagcgtggtaccattgatgatcgggaacattcccgttggtaggtcggtcggagcagaagatcggagagatgacgaaacccccgccaatctggcccctttttccttttcttcccagttttctcctttttatttaaatcatcattttcaatttcatttctcattatccaatttgtccaccatttcacatctgcattttctccatcattcttcgccccatttgcattttcacattcattcacattttcaaattccttttgttcggcccgattggggatccatttctctaaatgtttatttcgtcctcatccaggcccatctcggtgatgctgcgctcggaggactgcgcaagaacgccatcgggattcaaatgctcgggatccgtgggcacgatcctgactctgttgccatccgatcagtttatctcatttctgatgaggtcagcccagtacgagctcctcagggcagttcggctacgtttgagctcaataacaatggtctgtgtgccaaaaacggagaattggctccgttcctatacggtttcaacagttgcggttaaaagatgcccagcggcgggctcctgtcatgacaatgagatatttctcaggccgaaaacgccaccagggcgttctttgcgtgttcaaaaaaggctttcggcatcagcaagccgttcgccttcacccgcactaacagttcggccacgaactaatgtgctggggccagcaacagcgttaacaaaacgttgccttatggtgcacaacggctggcactgcgctgctgctgcagcaaaacattttccggaatattctcattccggaaatctttgtgaccacaaatgcccccattgtggagctcttctcttcctacacgaagacagcagcctatgctgccgaaaaggaagggttgtgttgccaaaattgaaccacaccctcaagagcttatggagcttatcgttggtgaaaaccaaccaaaacagggaaagagtttgtgcgacgcatgtcgcgttataataacttgctccaattttcaagtgtttccgctggaaacaagccgagccctgcttgtggtccgatggccgttatccttaaggcatccattgggtgtgcagctattttgctgccgtatggcaagacagcccattccaccttcagactggtcagagatgtgtcactggacaagcatccaagcattccgcttgagagcttcttaaagcgaaggattcgtgaggcacaactcatcatcattgatga

SEQ ID NO: 15769 - DNA, 1034 bp, Heterodera glycines
tccaaatcgtatttccatgcacattgtattgctgtatcattgtataatatatgtacatattcatattgtgttatattgtgtattatccattttgtttttcaacaaattaaaatagattcttagcatgtcttaaaaaacaacttctggactgaattattcaacttattattcacagtatgtttgcaagggtagtacagtatgcctatgagatacagattaaatttccgccaaaaagtcaaaaatgccaaaaatctctccatttttatttttactattcaaatgtttccatttttaattgcttttgtcagctcggcagcctttcttcattcaattgacccctcctcccaaacctcactaattaggaaattgtctacaacgttttcatctccgtttttgttttactgtcctctcatttattgacatcttccatccaattaagctttattagggtcatcatcttagaattgaacaaacaccaacgtcagatcgagcagagattgtaattgctatttctcacttttatttattttattctgtatttgatctccaacccaacgaattcatcagaaattgtcgtgccaattcgatggttgttggataattgtcgttgagaagcatttcgcggaacctttgtgtaaattggttcctaagatactttcgggaacacaaaatttgcaaagcgataagcttttcttagatgatcatttttaaaaaattgaatatgattcgaaggctttgcatattttgagctggcaattattataagctttcctatgtcgttgacacgaaagttgtgactcgaaatgtagttttggttgtatttttttggtgattgcttagcaattgctagacattttctcattttttcttacaataaaatctttaaattagtcatctaagacaaagttatgggattagctaatttctggcgcaaaaagtgcagccaaccgccattgggtgtcccctcgcgttcgcttttcatgtaaacatatggtgaactccattttttctacatgtcacacccttcttctcta

SEQ ID NO: 15770 - DNA, 1506 bp, Heterodera glycines
aatgatactaaaaatgtaattcggaaggttccagaaaatttttgggacactatagttgtaaaaaaattatggtcggtcttttttttatggtcgtctgaactgcaaaagagctaaattgactcactttcaaaactgagatttttttccttttttttgattggagtgaggaaatgggtggtgtaaacggagtgctccactcgcaccacagacgtccgtccgtcgtcggggagggggaagggcaaaaatgtaaatcaataaatccgattccttcccactaaaaaacggtgaccaccattaatgaatgctactaaaaaagaactgatatttatttctaaaatgaatcttgtcctttttattcattgcgttttaagcatttcccaactacttttcaaaaatgatggttaacaacaaaaaattaaaattgccgcccgaactgctcgcggaattggtcaaaactctgcgctttgaccttcgctgggcccgggtccgggtttcctcagtttttgactattttgcaacaaaaatacaacgtctgtggttcgaggagcagaaaaaagaaaaagaaaaagtcctttgcgttggagaacaccatggaattacttaatttcgattttaagagcactgccgaaattggaggcgttttgtccaattttacaaaggtggtcaataagtttgaacctgcccaacggaacgtactccgaggcaagtgaacttttcgaatttttgggttttttggtcgaactaggtcttaattagctcggtaaaaatattccgggaaaactaaaaagacagcccttgttttcaggatttttaaaccaataaaaattttgaaaaatctatgaaaaaatatctatttcataagattgttaaaattttaggaagcgagtgaaagaatgataaataaattatctttttaaaatttatcttttcccccaattagaagtggaaacgatctgttccgaactcattcggcccaaagacaaggaagccttccagaagggtaagtttcataagcaaataatatttggaaaaaaatttttccattggaattgactgagtcgatgattatttttgacatccatttctacctattctcgaactaaaaattgattgaactgttgttttgagttttgatttggaattcggaattggtccaaatgaagttagaattatgatcaggacctcgaaaatacaaaagaaaagtatcaaattttcatttaaaaaatacaaaacaaaaatcctccattggttaaggaccactttttaatgtttccaatttctgcaaatccttaagacaaatttcctttgtttaagtgcttgtagcattcacgttagcggttgattccattcaaaattgtcaccgtttggaaattggagcactaagaaggcggatttcggagcaagacgaacttatcgccggacaaagtgaacttatcacccaacaacaacaacgaatcgcccgtcaaagtgaacttatcgcccgtcaagatggacaaatcgcgcagc

SEQ ID NO: 15771 - DNA, 928 bp, Heterodera glycines
aaatttgtggaattttgagtgagatttgttaacagattttgtccaaaaaatgtccaatcatttgtaattttatgggtctaatgctgttttaaaaataaaggaaaattatttttgtgctagaaagttttctttttaattaaatttcaattaaagtaattttaaaaaatgtgaaaactatcctatcctaataggaaattgaacccaagggacaaacaatgaaagacagaaggcttaactaatagactacatatatatgtgtagttacttaatagaaaaatcaatttatttatttaattttttcacaaaaatttttgttttcccaccaatttcctattctcgtctcaataaaaattccctatataaaatgccaatcacggatcaaaatcacggaaaaattgaaaaaatcgtgtgagccatgatccgtgatcacggccagccttggagcataagcaactgctaaggaaataaattattgtgaatgtcataaatctcctaatcatttaaatttttattttttgatatttgaaaatatttcagaattgtataaaatttaatatctaaaaatctataccttaaaattgtttgctaatttatcttttttagtataaagcatttgcaagtattgacgttgatatagtatgtaataatactgataggcttttacacttgggtgttcatccttgactagattagtgatgaagatgagtagtaagcaaaccagcagaacggctttatgtgtttgacttcatcagatgtcattttcattgctttgttgatgccatttttggcttgttgataaaaaaaaaattttttaattttttcttttttatttccctacaggttttggggatcattgctagaagtagtacggtagggaccagctcctgtactgggcggtaattactgctttttatagtgccggcgaaac

SEQ ID NO: 15772 - DNA, 1570 bp, Heterodera glycines
tataccgtaaatccgctatttgaatgcccttgcattctattgttcaacgcctccaaaaagggcatttaattggagggggcattctaccagagaggggcactgtattgttcaacccctcaaatctcggaaatttttttgcgagtcaaaaaggggtgaaagcatttttctaaccggttttatagcgcagagcatgaatatgagtattgttttacgttttacaaatttttgaatttttaaaaaatttcgaaaatttttcatttggccctcgggaatttggactcgtatttgaaaattcataactcatttcaaagtggataaatttaagtacaataaagctttaaaaatagagaaaaataaggagaattttatgaatttattttaaatttctatcatcaaaatgaaaaattttttccagaaattctggaaaaattcgaattttcagacaaaaaatcagaactcggttcttaaaggatgtttttgaaaattaatatactcaaaaaacccgcaattttttgctctatagaactgtatttatttcatatttctactattttttttggaaaagattagaaaaataaaattgatttgggaatttgggaccaaagggggggggaccaaatggtttatgagtggaaaaaattttttcacccaaatttagctgaaaaatactttttagaggtattttagggtgttgataacgaatctgtaatcagatttcgctttcggcatcgacaaagccccagaatccctgcggatatactcgatccctcctggaggggggcattttattggagaggggcattctaccagagaggggcattgtattgttcaacccctccaaaaaagggcatttaattggagggggcattctaccagagaggggcattcaaatagcggatttacggtaggcaattttcgtaacaaagtgcactcaaattttctacattttttcaaaaaatttcctcttgggaatagtcccggcatttctcgcggtctcggtcccgggcgaaaaacttggtcccggtcccggcttttccggtcctggtaagtcccggtccccgttttggtcaaaagtcacggtcccgctcaactctagttaaaaatgatcaaatattatattttcagcagcctcccattatcaatctttaacatttttgtagaattataagcagcctggtttaagcttaagttttttcaatccctgatagcttaaacagttttgaggattttttacggaaattcttggaaatcctcaaaaaatcgaaaatttcgtcaatttttcgtacatattttcattttttacatattttgagaatttttgaaaatttatagaacttttattgtgaaaaataaaatttttttaagctattaaaatgttattctggcctatttaggtcatttttatggcatttttcacctattcatccttaaacaaagaatttttttccaaaaataaccatttaaaaattttatataaatatttggtacatattacatattttgggttttttgtacatatttcgtgattatgatacatatttatgtacatattttgtctttttctattaat

SEQ ID NO: 15773 - DNA, 225 bp, Heterodera glycines
tactatatgtagcttttctatagaatggcaatttttattagaaatttaaaggaattgagttgtcggtgagttcgacaagcgccaacggggggaattttttttgccaattttaacaaattaataaattgtcaagaaaattgttttttccctcaaaatttttttggggtggggcgtgcctcggtcccccccccccccccccctttactgaacacggtgaaaaatctt

SEQ ID NO: 15774 - DNA, 2366 bp, Heterodera glycines
  unsure (1)..(2366): unsure at all n locations
aaaaaaattngaaattgaggtaaaagtgctaaaaacctcgaaaaaattaatggtgaaaaaacttgaaatttttctggtttcttgaattttcttaatatttttttntgaattaggctagataattaaaattttagatgccttttttaaaaactttaacatnttgcggcaactttgtgtcctggcgccgtttcggctgtgaggttttgagctctcccacaaaatttactctaaaaaccatgctctatttgtctcaaaaaagaaaaacttaccgtcgccttcgtcctcctcaatttcatcgtccggcacaacaaaattggcttcttcttcttcgtcataggagccagcaccgatcaaatcctcctcatcactctaaaaatttagtacatttaatttttttgcatttttccgagaaaattacatttaaaagattggcaaaagtaaaagtcaccaatattttcttaattaaaaacaataaaaaatgaaattagtgctatttttgaatattcagcacactcttattgttagttgacattttttaaaatttgaatgtgcggcccccaaacagaagtaccctaaatttcgatagttgcgactatgtccaaaatggattcgtattttaaacactgcgataatttcaaattcgtgtttcaattagcgtgctttaggcagtgaaaagctattttaaagaacgttttaaaaaatgtcagcttttaaggtaacgtaaagtaaataagacccaaaactcgaccaaatttattgaaaattcctcgttagacaacaaaaaacaaacaaacaacaattaacctggtagtaattggtctggtagcggaccattcgctgaatgtttgtggtcgctttcatcggcgtcctttgctgggacgaagaggaggaagaagactttcgccgatcggaagaaccctcatcagtctaaacagcagggataaaggaagtcatgttaaatcttataaacaccgcttcttcctcctcagattcgctgctgctgctgtgaatgaccattggcccactcctcccaccaccgtttttaccattttcttcctcctcttcgtcttcaatgactgctcgaactcgtcgtttcattgttaagaaaaaaaggaatttaacacaaatctaaattcacatagtatgtataatggtgagcaaaataaggccgcgcatgcaaaaaaaaagtgctatatttatttatctaattgtttatcatcattagagaccggatttttaaaataccggcttagacaattggccgggaccgggccgcccgttcaaaaaaagccgttttaccgggcgtaccaggcccggtccaaaattttggccggcgggcgttttttcaaaatttgtggaattttgatttataaaataaaatgggcagtaagccataaaaagatctttttttttcaaaccattttttacggcgcatttattttgccccaaaaatgaccaaatttggaacattttaaaaataggcaaggaaaaggtgaaaaaggcaaaaaagggtacaataattacaaaattatatgcctcaaaagcctgtctctattaataaattacgaactcaattttttttgtcgttttacttacttaccatggcccctaacaagcaaattatcttagattaagattacatttaaaaaacagaaaggatagaagaaattttatgaatttttcccaagaagttcccaaattcggcgttacgaaattatcaactcaatactttgaagacatgtacatttgaaaaattcatacatcataactttttttatgctcatcaaaaaagataatatttataattcgatcggaaaattgaaaacggagtaaatacggaaaaacattcacgtggaaatgaataggacggatagaacgagcagaaaagcaaaagaaagatcacaagtctctacaacttttttccatggagaatgaaagttcgaaaataaaactacagtattccaagggaaaataagcaaattttgtgctatttcttctgcgcgtcctattcatcttccacgaaatcccttgctaggtcatttcgtcaaaagggcaacgcaaaaatacaaaaaaaaaaacataactaaccaaattagcaaatttaaaagtttaacaatttattaaggattaaaaatatttttggataaaagtgtaaaatatttgttaaattattttattttcgtttggctaaataatttagttaacacattttaaataggtaatttaaaattattttaaaacaaaagagacaccgactgatgatgaggcccccgccctcccgttctcttctgttaaattcccttttcgcgaaatgccctggcatgaatttttaaatgcgtgccaactttacagaaagtgattttatg

SEQ ID NO: 15775 - DNA, 622 bp, Heterodera glycines
  unsure (1)..(622): unsure at all n locations
aggtcccattttgtagtacagcaggtcaaacaatttgtcaaatagtcgactaattcacaacacaaatttcttccgttcgaccatttgtcccatggattcgtcgctcctctgtcgtccttttgtctccatttgctcccacatgtgccttttaaactcggcacattcactttcgatttctaccagaaattgcttcatttttccatctttaacggacttcaaatggtccaacattgattttgttgtattttccggaatgttttgctctagccattgaaagaattcgttcacatttattttgtcggcttttcgctctttgaactctttggaattggcacccaaaaaaccgatgcattccatcgctgctcttattaatctgactattttttctgtcttttccgaggatgattcaacggtattctgaaaatatggacaacaatttatgcaaataaatgaacaatgaatggaaaggggagtttataattaattaattatttaactaaatgattaattacctgatttattaatgaattattactaattaattaattaattacctgctgctgagtgttgtctgggggaatgtccaattcattcaactttttctgaatctccaaatgngtat

SEQ ID NO: 15776 - DNA, 1479 bp, Heterodera glycines
cgacagcgaaaattggtggcactggtgccggtcagcagggccaaacatcggcttctggcaccgctgcaacaacgccggcggcggcttcggttccaatttcaccggacacacagccgttgttctaccggacatcaaaaagtggcggctttttcaccccaatcgcgggttccaattcgccgcagcggttgaacgcgtttcgcaatgtgggccggtgagttggggaagggaaacaaataaattttctggtctctggcgttggcgataagcgccgccaggaaaattttaaatttgtttactttttacgaaatgttttttttttcaatgtccaagttggcttgaccaattcgtacctaaaatttttttaacaaaagaattttgaaaacaaattcaattccctctatagcgttctcccccaaccacagaaaattttaaaaaaaaaaatttcaaacaaattttgtaacaaaaaaaaactgagaaactgattcgagtaataatattttttttcaagaattattggattctgtcttcaaaacacggagatcatcccattgccgtaagttatttattatctcattttttacatttttttaaaatttaattccattctctacacagattgtgtcggcatgtgctcaaattcattctgaaccgtccgctcaattggttcgacttggccttctttgacccgtcactgttcgactcgttgcgtcacattgtgtacaatgagcagaccgacgcctaccatccatccgaattttatgagcaattggaattgacattttcggtcgatttgccggccgaggaggtgcgttttttggataaaatttgaaaaaaaaactaataaattcatggcttcccaggcctgccgccataggtggacaagggggggcgtcaatttcgtaaatcgtacgagggtccgaggcaatttcgtaaaattttcggccaaaaccgaaaaagcactggtaaagatggaaaattttacgaaattgaaaaaaaaatcaaaattttgtgccaaaaactcaaatttttacgattttgaattgcatttcgttaaattttccacaaaattctgttttgtcttttcctattcgttaaaagttttacgaaattgaatttcgctttcctatttcgcaaatttttaacgaaattatattttttagttaaaatatgttaataaaaattcacgaattcgtctaaaaatcgcaaaattcggtcgttttttacacaaaatctgttatcaaagtgcactgaaattcaaaaattttcatcgcaaccgccggacccccaccacccaccctccccccaagttcctcaaaagttttttggaaaaaacgtcgcaaaaaagtgctttggaaagaagaaaaaaaaccgaaaaaagtagtaaacaaaaaagaaaaaaaggtcgtagaaaaatttttgagcgtttttttttcaatttcgcaaaaattttggcctctaagggggggtgggggtgggggg

SEQ ID NO: 15777 - DNA, 2236 bp, Heterodera glycines
attgaacacaatcgtttcaaaaaaatttaatataaattcttattttgtcccgaatcccgcccaaaatcatcgggttgggattcgggacgagaaaaatattgggtttcgagtgacccgaaacaactctggtacgcataaacaaatttttggaaatattttttttaaatacgccacctgccctcggaaatgttcaaattcacagcgggcaatgttggatcgtcctccgatgacatgaacacaaatttattgcaccgttttgcccaagtcgccttcacgtgaatggcccgcttttggtggttctgtttgccggtcaaaatccaacagaaaatgcgaacgcgtcgagcaatttcgttggccaaagtgacaacactcattcctgggaaaagcaaaaaataataattaaaatggaaaattcaattgaaagttgtggattaaaaaaacacatgagaagaaagcccaaaataaggtaaccccacaaccaaaatgtcgaaatatttttaaattttcatcatccggagatttcgaagaaaccctattattaaaaaatttgtagtcgaattgagttttctataatattatagacatagaagattctagttcgccttctatacagcaataacaccattcttctataaggcatttgtaacaaatgtctagcgttagggcaccagacacatatgtacaaacaaacaaaaacaaacaaacaaacaaagttttaagctgaaaaattgggattttttaaattttggtggttcttgaaatatataatatttggctcattgttgttgcccaattgttgttttgttagccttttttaatcttagaacattaacatttccatgatgtatatgttaatttctctcatttttgcaggagctgtgcttcttttggaccggttctccaaatctgccatcttcggaggtatgtgtgtgtcaattaagtaatgaatttatttttcaactattttttttttcgaatttgcaacgaatctgtttaaatccctcctctccacattctttacaggagggtttccgaccgttgccaaccatcatgattcgcccggctgatgaccagcatttgccaacggccaacacgtaaaaaaaatttaaaaaaaaaattgtgatattttaactcttttttaatttaatttgctttttcaacaggtgtatttctcgtctgtacctgcccatctattcgtcaaagaagctgttgagggacaaactttcgcttgcgatcaaagcacgcaactttggctttgtctgatcatttaaagatggacggaagatgatgatcagacgattcaacatttgttttttgcttatttcttctcttactttttttcctctaaagttttttgattgacttatgttcaagtgtgtgtgttttattgacatcatttcgagttatccaaataaaagttttgttgctttgcatttttgtaaagggaggaaaaaaattaattaatataagtagggttgcaaccccgaccccgacgcttcataccccgaccccgacgcttcataccccgacaaccccgaaccccgacccttaaccccgatcggggtcggggttaaatatacacccctaagaatggcattttcgtgggagaaaatgcaaaaaagttagacgaaatttggatttttttaaccatttgccaaatttttattaaataaagaaaatttgctcaatttaaacatctggaatgtggtgtagaggttagtgcgtcccattgacattacgttctgtcgtgagttcgataccgtttgacgttttcttatttaattattttctttgtgacaaattgtttttttaaattaaatactcatagaaatcgaccaatcttggcatattttgacaaaatacatatcgaagaaaaacaaaaatttaccgaaattcataaatttttttggtgaaaaatcttagaaaatagagcttaattccaaaatttagcgctgcctatcggcatcacagggcccaaaaagtcataaaccttattaaaaaaattggctcaaaaccgcaaaaatttagcatattttggacaaaatctgttaacagatctaaccaaattttcaaaattttttccccggcggcgccctatcggcacccgccgagaccccatttctcctatacggtctttaagaaaagaagcgacgtcgaaaaaaagatgtttttggaaaaacaaaaaagtaataaaaaaatattaaaatttcaagaaaaaaagaaattaagttctata

SEQ ID NO: 15778 - DNA, 894 bp, Heterodera glycines
  unsure (1)..(894): unsure at all n locations
cctatagacttaatttatgggctaaattattttctctcaaaaattccttatagggtaggctctttaaagaatatggcaaggtcgtggatccagtgaaaattacctaggttcaaagaatggcacagaattttacaaaaagggcattgttaaactcccatctcggcggcaaaaggttgtagacagtcagggcaattactttgttaagtagctttttgatcggctttgttatgattgttatttttcattttttgtgtgtgttgtacgctttgaaaacaaaggtgaggaaagacaaaatgaaaaaaaacaaaaatcatgaaaattgatcaaaacaacggctcccgaagtcgatgaccgggggccatcagttgttcaaccgtttgatgctgttgttgcggcggttgttgctgaccgtccgaataatcgtcgatggcattttgttgttcgtcaacaacggcactcaaatttgaagtattgttggcaccgacgagcagacgaagggcatccatagcaactgtttttatgggcaatttggtatttttttaaatataaatttaaaaatctgtgaatttttatcaaaaaattatttccccacttgggccgcgtctgtcagaaagtcggcggccagcttgaaattgttggcaaaacagtactccaccgcaatgtacaacaacggctcgaagtggccttcgagaattcgggaggcctaaaaaaattcaaaaaaatattattaatgttaatccgtaaaaattggggggaaatttcaccataaacatttcgtgctaatcttcggggctggnccactttccctccctttttttcaccagtaatcccccaggaaattcgccatctcaatgctatcacacaatctcggacggatttgttgatggtcgccat

SEQ ID NO: 15779 - DNA, 2313 bp, Heterodera glycines
ccatacatgcacaaggggtggtatgggccgagggccatacgatgtacgatcgtaccgggggggggggggggggtacgaggccaatttttcttacgatggggtccatgaccaacaaaaattttaacgaccttttttttttttttgctcatcgctgatcttttttcgcttgcgcataaaattgcgcttaataagctcgcaatttaccaagaaatgaaaaaaataacaaaaatgaaacgcaaaactagtcgtccaaatcgtctgtcaaaaaaactgttcagggtcccatcagatttggcaggcgcagtcggaatcgccactttcttttttggcaacaaaaattttttagaagaacactccgccgtccacggcacatttaaccccgaagaacactcccccgccaaaggcacgtccgaaactgagtacttttccgttttggggccttaatttgaatttaaaaaaagcaacaaaggacgcgctcttaggcccaaaacggaaaattacccatttttgaagaacactcgccgcccaaggcatctgaaagcgccgagccgaccattccgaagcccatggcatttccaattgcttcgtcccccccggcaccgatggaacttgattaattttattaatttattaatataaaaaaaattaattacacaccggaaatgttaatgtatgggttgtgaaccccagcaaaatcaatccggtccgcaccaacacgaagtcgggaacggcgccaacgatagagaaaacaaatagacacaacattagtgaatgaaagaaataaaataatcaaataaagtgccgaatttggggatggtgaatcgacggggggaaaagcagcgacagcaacggccgaatcattattaaggcaatatgtattacaaaattttgtaacgttttgaaacatttttctaaatagaaaaagtaatgaaaaattaataaaggcaataaaattttattaaatacaatttgttctagacaaaatatttaggaactaaacggaaatcaatgttaatggaattatgtgaaagtagaagacaaaaatttttagaaattaaaagcctatttacagtacgatgggctgcgtctgagcttgaagcaataaaaacaatacttagattgtggcctgttttgcatgaattatttcaacacattagtctacaagttaaagaatttgacaaggaacaaagaattcgtgcatatagttattttctgtctttatcgcatctttctttttatgcgttagtttcttttttggctgatattttagaaattcttaacaaggctagtttgaattttcaaataagcagcgcatcactgattggacatggtagaaaaatcagaaacttgatagatcaactccaatcattaaaagaagagaatggtccctatatgcataagttttttaattcgataacttgcataatttccgacagaaattacccacagcatccatgtcatcaaaaaaatattatggataatgaagaaggatattcacatgttcaaagaatgtatttaactggttattcgggctctgattatgaggccgattttgtttttgctacagatggaaggaaatatgcaaatgcccaatttttaatgaaacagcaaataaatacgcggtcgtccgcagatgaaaatatagttgtaggaatatctcctccaatccctgagtttaatagaagaattcgaaggcaattaattgacaatgtcgtagaagaaataaaaaattattttccggtcgggaatataattgatgatattgatttactcgacccttctcgtttaccaactcaagcatcaaacataaataattacgcaaacagtattaaaaaattggctatatattttaactatgacgaaaatttgatttatctggaattttcaacaattctatctcaaatcttgaatgatagtcgtttaataaatttgaaaaacaaattatcaccacagagattttggaaattaattattgagcaattgggtgacaattttggaaatgaattcaaaaattttttacaccatatgcttatacttggcttggggtctgccgacgcagaaagagcattttctgttttattttatatacggggcaagaggtataaaaatgcgtggttttcttgatttaaaatctttgatattttgggcatttaggtcggcacgtcttatcgatgaaaatcttgatgcaaaacttagaattcgccttaatggacccccggttgaacaaatttcaatggattcatttaaacaacgatggttattagaagaggggcattatgccagtgacagcctaatgcgaacacatgataattc

SEQ ID NO: 15780 - DNA, 2149 bp, Heterodera glycines
aggcctttacttttacgagtaaagcgccacacggccaaaactcaaaataattttttccataggatagtaagaaactggaataaccttccagttttagcggtgcaaattaataaggcaaaggaattcaagggtttactaaaagcaatgagttctgagtaggaaattttctgtgccacatatacactatattttaatcacctgtgaatttttaacatttgatttatttttattcatttttattacggtattcattttgtattttttatttgatcatttttatttgtttgtttttggcaccatataagagcactaatgtgcctttggtttgctcgataaattaaattaaattaaattgatgaagaattgatagcaaaaaatttttttaccataaccattttttttgtttgtttaaataataaatttaaaaaatttaaataaataaaaattccatgaaaaaattattcaaaagcatatatcaaagacaacttttattgctgtttttaaagttaggtttttttccgcgaagctttgcacaatgattgacagcaatttacccccgagggatttattcaatgggctttgccccattttttgaatttggcactaaatatgccattttttggcattttatcactcccattattttcctgaaataataatcaaagaaattgtttttttttattaaaaactttttactcggataagaattggtttatttttacagaaactgaaaatttttattattttatcaccaatttaaattttaaaaatttaattttcgatttaaaaaattttatttaaattgactttttaatttttaaatttcttttggctttaattttttaaatttcttttgacttttaaattgaataaaaaatgctaaaataatttttgaatttacgaaattttaaattattctaaagccctacgattccatcaatcattttgattcactttttaatccctcaaggccggccaactcattagagcattattcattggcgttttgccttttgccattgtgcaataatgcctccggcgtcaatgcccttgtgggcgcgccaatggcaaaaatttttcgttgaacgtgccggaattgattctttacacttcggtttactccttcttatgcttctttcactgctaatgctttttgttagttaaatttaatggaataataaactaaataaattaaattttattttaaattattcttttttgattttaattatattaattgaatagtattttataatattaaacttaaaattttattaaaatacatttaaaatggataaaaatatttaaaaaaatgaaaaatcgatataattatttgaaaatattttaatttttatataagttaaataaaatattcattcataaagttgacaattatgtccgtctttattcggttctgctgttgtacgcattgtcctcctcggcatcgaaaatgttcaacaacggaaactttgacaaatcgaacaccatcaaatggcggctttttctctggcactaacgaagaacgggtcaaaaaacaaacaaaagaattaattacctaattcactatggattttttaactatctcagcggtgccttctccagccgaatggcatttgtgccggacaaacgcaacaaaaacaacaaaaaaatgccaaaacagaagaacagcggaaaatggagcaacgcgatgggcaagcagtaacaggaacgaatgttgttgatgatgatccagaacaatcggccgcccaatcatttcagcaacaaccaaaagcaacagaaaatgttacgatagttgatgaaacagttacggtggcaattttaaatattctgttagaaagttaaaataatttataggccttaaaattaattttctctgaaatttcggacaattccctgaatttcccagtcgctaaatttttccatcaaaattaccaatctttgtttaaaatgtgttaaaaattcagggaattctaaaaaatgctttgttttcttatcctggtaccctgccagatcagcatgatgtaatccaatttcaaatgaaatcccatttatttttccagccaccaacaaaatgccagtctagcttaacaccattgatggcacatcgtggccaattgttgccgccacatcgtacgacggctcatttgcc

SEQ ID NO: 15781 - DNA, 1491 bp, Heterodera glycines
caactgaacgagaccatcatggtaaaggaatattataaccaacgaaaacccaattttgtttcgtaaaggatcggctgacaacggtggaaagagtttaccacgcggtaactctccccgttgtggacaaaactggcgaaagtgacttggacaacatctccgccgacgccaaccacgagaacctgtgcaggatgacaccgcctggaattcctgttgcggaggctattggcgaatgaacgtttcgctgcatttggtggaaagagaaactgtaacaaaacacacaactaaacagatttctatttttctttaaaaatggatttaacaatgaatggccatgtctatttttgcgaggttttctctgtcgagtcggagtcgtcgagtttcgccttcttggccacgccttcgtcttcggttgtctccgcctttttctgctcctcctcctcccctccctgctccatcttctcttctgccttggctgcctccttcgcaatttgctcatcattcatcatcgccctccaaccccaaacatttaatgatgagggtcgtttcctctcccctccctactcttcccctccctgtttttctgttcttcctttccatctctttcctctttttccctcattttttatttttgcccgttctttaatatgacttttggcaattacctaaattaattaatagagttttgattctaaataatcttgagtagcattttttatttattcactatgattggtcaaattcttcggtggaaactcttcttgccttttcccctttcgttttagaacttcgtgccgactccaccgtggccccacagtttacgctttttattcgcttgtgctgaagcatttggagcggaaagtgtacgccgaactgcacgagttggacaaattggaggtgccaaattttggaattttgagggaaaaccgtccatttaaggtaaaaaatctgctgacattgcgaaatgtgtgcaacgaactgaggacgaccaccactactcgctttcacaaattgaacggatgactggcgtttctcgccgctcctgtacaagaattattaaagcacaaaatacacaggtcaattggagtgggtgggggaaagttagaacctctgccttcggactcttcttcttcctcttctctctctgtgccttcttcgtattgccctttgagggctggcaaaacccaattttgttcatctgggacgaaattgcttatgaaacacaccataaaatcaaattgcagaagaggatgtcgttataaggtgcacttttatcggatactcctcttttctttctccccccccccctccaatttttttcattgtccttgctcttatcagcaaggttccaaattatatgcacatgcttcaattttaattgagtgacaaaattctgtttaattccactcttctaattattgtgtggaggggccttggggaaaaaagagactaaagcgatgggaaattgctatttttcagtcaaacgcaaatgag

SEQ ID NO: 15782 - DNA, 1500 bp, Heterodera glycines
agcacccacaaaagcttgcaaaatttagcagcaagcgaatatctatccgttttgttcaggaccgctacctttcgaaagccataccgattctctacaaaatggcccgtctgaaataattggtgacaagcaggaatttttgagaaaatccagattttgacagcatgaaaattttaaaaagtaattatcactctttgcataataactttgagatttttatagagcaggtcccgagcgggtcaataggatagagcgaatcgagttctacagaaattgatatagcaaagaattcgggattttcggtgtattttttgatgaacagaatttgccagtggagcccccatttctgggcacacagccgccgccccaatctcatcccaagatcaaacagttcctttctgacgcatgttcctgttaggacagtaataggatgataaacggctaggctcggcatttaataaattcattgcaaatatcggtagctgctgctgcacgaacatccagacacgcatctgcgcctgagctgctactgcactaacaaccgcgacggtgcacacctcacacttctacccctcgtgtggcctaccagccgaccccatcaattgcgcagccatctaccgggacgcctagttttctttattataaaattatgtggggagctaaccactaaacgaaaaagcagcaaagaactacgcaacggatcgccacgagaccggtaccattcgaaagagctcggttttttctatctttctatccttgtggaaaaattagtcatatgcggaaaatttcgagaaaaacgcgttcgaacaaaaaaaacccggctttttacaactggccaaaaatgggttgtaaaatgtgtgttttcaccttatttctcgggaaccataagagctacgcttttgcggtaagcgaacaatttgtagagctcgtcgagctgaagggtgagaaaaaaattttgtagctctacgacaaattcgaacaaagttataccccggcaaaggtcgaaaaaagccgattttttttgtgttttcctcttccggtttacaatccgtttacaattgtaaatttatccggaatgtccggaatttcgaccgaccggatggattttgtgtttttgcatgtgttttcaaccggtttacgtgtgttttcgacgtgagttctttaaaccggttccggtttttcacgtattttcttcacgtttacgtgtattttcgacacgtttgcatgcgttttcaacatttcacgtgtgttttcgttacattaacgtgtgtttcaacatgttaccatgtgttttcgaataattttacaaatttttgctttgtgttttgctttgtgtttttgcataaaattcgagcgagcgaagcgagcgacacgacgtgcgcgagcgagcgagcggtgcgagcgtagcgagccgcgagcaagcgagtgcacggagctatttaacgacatagtagagctccacaggcctggtacggggcgcaccggggggaggggggggcgggg

SEQ ID NO: 15783 - DNA, 1547 bp, Heterodera glycines
gcacaccgcctacccgcaccccgcctcaccgcatccgcctccccgtaccccgcgtctccgcaccccgcctccccgaaccccgcctccccgcacccgccttctcgcatcccgcgtcaccgtaccccgcttccccgtaccccgcgtcaccacaccccgcttccccgtccctcgcttccccgtatccagctttcccatccctcgcctctccgtatcccacctccccgcctacccgcaccccgcctctccgcacccgcctccctgtcccccgcttcctactccccacttcaccatcccccacctccccgtacaccgcaccccgcttctccgtccccacctccacgtaccccgcaccatgctttcccccgcttcccgcttttctttatataacggaaaatacatgcattttctgttattaaactggaaaacaattgtcttttctttataaaccggataacaattgtcatttctttataaaccggaaaataaatgtattttctgttattaaaccagaaaaacaattgtcatttctgttgataaaccggaaaaaaaatgtattttctgttaataaaacggaaaacaattgtcatttctttataaaccggaaaataaatgtattttctgttattaaactggaaaacaattgtcatttctttataaaccggaaaaaaggtattttctgctaaaaaccggaaaacatttgcctttactttacaaatcggaaaacaattgtcttttctttataaaccggaaaacaattgtcatttctttataaaccggaaaataaatgtatttaatgttattaaaccggaaaacaattgtcatttctgttaataaaccggaaaaaaatgtattttctgttaaaaaaacggaaaacaattgtcttttcattgtaaaccggaaaaaaggtattttctgctaaaaaccggaaaacaattgtcatttctttataaaccggaaaataaatgtattttctgttattaaaccagaaaaacaattgtcatttctttataaaccggaaaaaaaatgtattttctgttaataaaccggaaaaaaattgtcatttctttacaaaccggaaaaaaatgtattttctgttattaaaccggaaataatttgtatttgtttagcacaaaccggaaaacaattgtattttagtaacaaaaccctaaacaatttgtattttctttaacacaagccggaaaacaattgtatttttgtaacaaagccagaaacaatttgtcttttcttagaaaatttaaatttaaatattaagccagtcataggcttttaactaaaaataattattttaaagaagctgtgagcaatttagccaaaattttggcattttattggtccatatttggtgtaatatttctgaattttatatccatattttttccccggcccctactgatcagccataaaaatttattttaactatttatctaattaccattttttatataattataacaaccatttcaaatgttttggaaaactaatgagaaaaaagaacgagcaccaagagatggatttgttcaaaaaaa

SEQ ID NO: 15784 - DNA, 4607 bp, Heterodera glycines
ataaaaacaacatcaacatacttataatcaatttactgtagagcagtgttgtttttattccatgttcgcacgcttgctcctgtcaaggttgtgccaaaaaaataatgacacagcttaccaaggagtgcccaatctgccgtaagaacatcactaagacggccgaattttacctgaagtaaaagcaacagatttatggggggaaaaacaaaaattttgggcccccggccgttgatgaaccaacttttaaacacggatttgaaaacagccccctccaaataaggacaggtcttgggaaatttagagtttgcaagaattgtgcgtaggaatattttttggctaacagtacgaataaaaaatttaaaaaatagttcatccctttcaatcattatacagaaaagaatcaaatatcggtgataaaatatggaattctttggggagaaaaaaaagcaatgcggaacaaaatatcgaacaattacagtgcctaaaatgcaaggaaaatatggtaagagaatgttaaaattaatgtccacttaacagtgttctaatttgctgtagcgccgtgttgtattttatccatgtaagcatgccagcgtctgtgtgcgttgtgccaaagtaatggcgaatcctggaaaagctgaagccaagaagtgcccaatttgtaaacagaaaattgaaaaaatactccccttttatctatcgtgactttataacactttagcggttcgatcagggaataaaaggcctttccataccatggaattctcgaaccgactaaactacggcttttccttttagaatttttcccattatcacttgtccactttctcccacactccgcttcataatggcaacacctttttcttttttatttacccgaaagtgtaactcagcttaaactaagaaacttggtattaaatgatagctctgcatgtcccctgtatcataggtaaatttttgctatatcaaaattatatatagtcgaagaaacttagagcttatataaacaaatttttattatatgaataaatttttaatattagtttttttaaattttttttttggttattttatggttttcaaaactattttttttatttttaatctttttttttatttaattttattttttataatttatttttccaaaaagaaggaagccccaattgatcagtaggatgaaaagttaaaatccgataatcagtgagctaatgatcagaggaagtagacattttgcccaacaaaagatcactaaggtcatagaaaaaaattctcgcaactaatcaataaatttatattttctttatccaaaagtctctctcgacctgaccagcagtacaaaggattcttgacacaatgatcggttcagagccagaaaaattacacccgggtgctcaacagaataaaaaaatacatttttgactgttcaaacttcatggcacagggcctaaattatcgggaaacccagtcaaatgcgtctgatcaattatgacaagttcattgttaaataagtgcgctgctattgatcagcccattgattggccctcatcactcacatgtgcgtcacactgttgatcagccaagttgagtgcaatgtgaatgtgtagcgaaacagtgaagcagtaaaaaaatgccacacttgccgattcacgccataacaaaagggaaaaggaatgaaaattaagtttttgggtgaaatctccggcctaattttatcgaaataatttccaaaaaaaacattcaagaactaaaagtcaattcttgactattttaaaattaaaaatacattatttttaaggacggttttacggtaatttattgtttaccattaatttgaaaaaaaatcgttaattacgatttaccgttatcaataaccctaatttccaaacacaaatcaaagttgctagatttgtcagggcttcgatctcaaaattttgaaaatcctcatttcagccataaaaaatcctaatttgccaccaaaatacctcaaaaaaatcctcatttggcatgaaaaatcctcattttttataagcataaaagcaaacaaaatcaatgaagagtcatatttttcgtttgaaacaatcacggcgcctatcagcgccgccggaccccaataattcctatttttttcttaaaaaattggctaaaatcgcaaaattggtaatttttggttttatcaaaaagtttaattaaaaatcgaactttttttttacttattaaaacttccaaaaaaaaactaaattcgatgtcaattgttttaataaattgacatctcttattttttgtgctttttaattgctttatttgtggcgtggttttccaaaaaactttttggaaacattgggaggaggggtccggcagtgccgataggcgctgccggaaaaaatttggaattttgagtgcggtttcaatgaaaatcatcatcatttttggcccacttaattagtccattaaattcttttcgtaagaaagaagattaatatttattttttatcataagaccacaaaaatccgcaaatcctcattttccaaaaaaatcctcattgaccctctaaaagaccacaaaatgaggaaaaatcttcagatatcgaagcactgagctaagccaatataggcgaatggaaaatgaaattttttcttttaaggaatgctataatttctatgaattcgaatgaaataaagttcgtcgtacaaattgtgtcgattagtcgtcgctctgtgaaagaaaatttaatgaattttatattttttatttatttcatattgaaacatgttttgctttaaaaagcaaataatttttttaaatttaccattaataaaagggcaacttcaatttagtaagttttttttagaaaattaaaatagtgaaaaataacgcaattttttatacgttaattaattgatagatcataccgagctcaaatgacccgtaattaatagggatgcaatttttaggcaaaagcctatttttttcctgagctccccgtggcttgaaacgcacgaaaaacatgttttttcggctgttgttaagctacttttcgagttattagtgcctattttctaggcttttatttttagcgcctaaaaagcctaaaaatttttgaaagagcctatttttgcctattttggcgttttgcccaaaatttgttaacaaaaatgcaataaaaacgaaaaatacacccctaagaatcaacgtaaaatttttttcaaaaaatatcccctaacaaccgacccgaaaattttcaaaaatacatccctaagaaatgaaaatttttttcaaaaaatatcccctaacaaccgacccgaaaattttcaaaaatacatccctaagaaatgaaaatttttttcaaaaattcatctccaaaatttatttatttattttattgacaagaatttgtgatttaaaaattatttatctcaatactgatttagccatttttttatttttttgaatacattttggcattttacaccactaaatttgatgattttagtgcctatttttcattttttagtgcctatttttcattttttagtgcctatttttgcagtttttagagcctaaaaattgcatccctagtaattaatccattggttcatggattaagtgatttccgaagtttttaattcaaaatatatttttattataataaaatatggcatctttttaagtaaggttgacaacaaaaaaaagaccgagaattatttgatttaatatttgatttagctgcgagaaaacaggtaaataaaaataaacaaaaataaatatgcgtgcatgcgggactgaacccgttagatttattccggtggcgcgccttaaccactgcgctattttacacgacaccaacgtcggttctttgagaacatttatctccatttttttctcttcattttatttggcagtcacttactgccacgaatatttgacggaatttataaaatgaatttttgttgtttttttcggtagagatagtaattttaattatattaaataatgggcaaaatatggtttaaaggtcctagaaaatttgtagaacaaataaaaaacaattattatttatgcattatttttttttgcaaaatttttttactattttcagtatttcggtcatttagaaggccaattaaatttgtttgtttaacttttaaaaatattgaacattaacattaattgaaaatctttacatatatcaaacgtggtgacatttctctattttataattttatttagattcttatttcgctgatttttgtcaattcccagcccacctaaaatatttttaatattttcagggcaaactcttgagggcggcggggggtaagaaccgaaaatgtttttggcacttcaccacgaaaatttttgtgtacaatttttcaaaaatttttggatttaaaaactgttttttaaattttggtatacgctctgtatctttagaagatatttgtaagccattttctaagcgtttagctatacataaaaatttaaagcttgaaaactgcaaaaaagtccaaatttttatatgtttttattttaacgcatctttagaaccattacaaatttggctatccgatagagcttgttaagagcgtccgaattataccaagtttgc

SEQ ID NO: 15785 - DNA, 2420 bp, Heterodera glycines
tgctggttttcctcctgtccatcagtcattgttccttttttatatggaaataaataattcaatgtgtgaagctaaaaattggattgcattaacaatcaaacaaatcaaacactaagcattttacgacaacgaagattcgaatggggtcaaaaaaacaaacaaagattcataggaaaatgacaagaaagaacaaaactaacaagtttcaaatttagaaaaaatgttttatggatttgtagtagagtccggcgggaaaacacattaaatatgtacaaaaatccacaaatatgtactaaaatatgtaaataaaattttaccccgtccggtctctactggtaagaatgggagtcagtgaaaaattacaaattttaggagattttttgtattttttttcatctgtgtacagattttcaaaaaaaaatttttgagataaacttattttaggggttttcagggtcgggaaaaccgattctggcatctgttttgacccaattcgaaccccgaacccggattcgaataaaaaagtcaaaatccatttttcaaaaaaaaatcacattttttatacacaaaattgagtcgtggcctttttttggttatacccggcagtgccgattggcgcagccgggaaaaaatttgaaatcctcaacccgcaatccgtaactcaaaaaaattgcgcccagccctgattgaagtctgatcaggcgactaaatcatgagaatgataaagcaaattgaaaatattttgtggtgtatgaaagacccaagtattgtggtaaataaataatataaacaacaaataattagctaaattccagtcgaaatttaaaattctataaacatctttctctaaaatttgtcctttgccccaaatctgtcaagaatttttcacttttattcccgtttttcgagaatttttttacgggaaactgtaaaaagaaaaagcagaattcccggacacaaacgagaatccctcccttttcttgttcccaaaaatctggtccgtgaagacgggattcccgggttttcccttgggaattcctttcccgccggggccctactcaaaacggtcaaatttacaaatttcatgacgtttattccgtttgcctttcccatggttttcgctttacctttgcttttggttttccattttcttaaatttcgtttttcgttcattttctttctcgaaagtaatttcttccaaaaataaaaaaagttctcatgaaacttttggttaaaagctttccttcatacgcaaataaattatgagaagcaaagaaacgatttcatgtgaaaaaacaatttccttggcaattaattaattatttcctttttctctgacaatttttcctcttatcgaatttaagtaaattcacattaaaatcttgaattaggccaattgcagacgaataaattaatctttcgtaatatccctaattatgttcgttaattcgtcctccatccccccaaatgtgtccacgcccaatctggctgattgtgccaatgccaaagattacgtgaccgattttggctattttttcgtccgctgggcccatctgatcaccgggtcggtgatccttctgttgcttctcaacatttcagtgtttattgccaagaaacctgatttgccattgcatggaaatttaaaagtgaaataatattaaaaaataataattaatttcccctaaattttcgattgactttttttagttacttttgctaaatgtgctttttctgtatgctattttctccccgcctccccacccaattgcctgccgaattgcaaagaagtaagccattgacaacaaaaacagcccacgcagcccaattgtgctgtcgaccgtccacaatgcgaaccgcaaaattggcaggcacttgggaaaccttcaaatcggcatgcaaaactgctgaaaaggaggagaggcatacggtaggctgacacaccaaaggacaaggcattacggtaatcggatgagagaaaagacagtagggcagccagcagataaaatggaaaagggcgatccttctgaaacagcgaaactttgttttcactttccattcgtttctttcccttttccccaagttctgtgccctttaaattccaaaatgccattctttcattgcttcgtccaattgggcgtcatcgagtcgaattacgcacgcattgttttccatgtcaagcggaagttttggcagcgaaaagcacgtggtaagccttcaatgttttgccacaatttctcaccgccctttgcctttcagcggtggccaattcagtcccgagaaatgttcccgccagcccaactgcgcgtcgcccacttccgtctccggcgttgcccagcagtgcgtctgtggccgtccggcaaagagtgcttctcccccgcttctgttggtgcagatggaaccgcgttaccccccattatatg

SEQ ID NO: 15786 - DNA, 2255 bp, Heterodera glycines
tccgtcgcttcgtttgccttttccgccgtcactttgtccgccatttctctgatcacttcgaccgcttattcgatgttagtttcgcgtgtctttgaactgcaaacgacgaaacggaggaaaaaagtgccgtgagtgaacgaagcgaccaaatgaatgcggcgatcgtcgttaatggccaaaaagagcgactcgttcagttcattgctggtctcaagagaagggacaatgggcaaagagatggaaaaaaaactgggccctacagtaaccacgacagagttatcactagacatacagtaaccacggcatgttttgccagacaatggcattgacacattaataaattgtcattaattagtcttagtgattccttttaacgagtgattataccttcatccgaaagcagaccaagcccaaatgctggggaacgaacagctcaaaacggtcgtctccgagcaaaagatcggcgaacaatttgccaaatttgttttgctaatggaaaatacagaaaatttgaaactttcccaaatggacgcaccattctcaaaaagtcctgaattcgctgaatgccaatcgcacgaaacacaaaccaaattttcagtgccctgaagcgacggccaagcgcaacttggagatgcttaattaattaaggaaagcgaaacgaatatttgggaaggacgggaaaatggagaaaaatcacccgaaaatcgtacgcatccctttgatgttcgtgcttaaggtaaaccggatcgacgttgaaaaatgcgattgcttcgtctccgtttttaaacctcaattgacaaatgccaaatttccttttttctttcttagcttaccacatcggagaacaatcaaaattgatcatcaatgctttgtgagcgttgaaattgaacgaatctgccaattcaacaccgtccgacaaatggcggaattcgtcgcaaatgaaaaaactgcctaaaatagccaatatccaataatataataaggcacgattaatctgatataaagacgatgaatagaaagtgatggactgattaattatcaatgattagctaattagataggttgattgattagctaagagcagatgattagattgattaagtaacaattatcagtgattagctgttgatcagttctgattaatttcactcagctgtctttggtctcgtttctcacctgcataagcggcgtcgacgtgcatccaaatgccctctctgttgcatatcggccccaactcgcggcacgattccaccgcgcaagtgttagtcgtgccgacggtgaccaccaaaatgaaaggggtcagtccgttggctttgtcctcctataaaatcggacaatttgaccctttccaatgtccgcttttgccacttttatcgccgcctccaacacttccgccctcagcacgaaattgccgcccttttctcggtttgtcggcaattttcgcatttttacgccgcttagcattatcccctgaccaaaaacattaagaaaatgtgatgcttttctgttactcactttgtcaacggatgaatgggactaaaataataaaaataaaaagagagaaagatttgaattttaagaaattgccgttggtatttttagaatgatggaaaatccatccaaaaccggaaaacccaagtgaataatccaaaaaaaaaaacgcgtgggtcctagagaccggacaacagggatcggagggatcccgagtcgggatcccgaccgaatcccaatcccaatcaatcccgaacatgttggaaaaacgatcgggacggatcccgagtcgggatcccggccgaatcccagatcccgatcaatcccgaagatttttttcgggatcccgcgggatttgctaaaactcaaatttatttatgttttgccaagttttgttcaaatgcttatctaatattcgtaattgaacaattcgattgagaaaaatagggatgggaattatatcagttttttagaaatttttcaaaattaaaatatcatgcccaaaaaagcagattttaggaccaaaaattagaacatttaacaacagatgtagctttaaatattgggttggtaatatttacctacctgaatagtttctttttacaatttaatcaattaatatcaatttttgtattttcgcctcctatgatcattttaaacagttgaagaaaattagcaaatcgtaaagtgcatcggaatcaaaaaatcagatttttaagaattttttttttgcagtgcatttttaaaaacttttagggaacaag

SEQ ID NO: 15787 - DNA, 3591 bp, Heterodera glycines
  unsure (1)..(3591): unsure at all n locations
ccccccccctctccgccctcccgcccactcaatccattcatttctctgtctctctgtctgtctttcatatttgtgatgactgtccacagtcaatcagcaacactgatccctcctccctgctcatttgctcaaaaattagtttaacccactgcaaattttgacgagacattggcactgacattgccaatagccaataaagagccagggaagtcatagcaattcgatgcattcaacgagttcacaatcaaagccatgcttctcttcccccagtttatccagcgaaaaagtcctttcatccaaacagatggacaacccttccaacgcattccatacgttcattcattcaccaatccttcccacctcccttcttttgtgtcccaacattttttcacttttccccattttgacaaatcgtttcccatccttttcatattgttcaattagaatgggcgctaaagcgaataataagcgcaatggccgagtgcaatacgaaccggccaaagattttcgtgggaaaagtgagtgggttagtggaaataaatccggcaaaaggcagaaaattaatcaattaaatttttttcaaatttagtgttggagctcgtctattggcgtgacccccaaaagagcggtatgaatcatttgaaaaacagtgtaaattcgaaattcgttttcaaatgccttaggcaattaaaattcgttttgactgactgcactttaaattgggcaattaatctttgtttatttgacaatttccctactgttcaggtgccgttttggcctctctctttctctgcgtttacgttttccaacacttttccgtcctttccgttctcataaatggcgccctttgccttttgcttgccaccgtcggcttccgcgtgtttaagctggccgaagcccacttcaaaaagttgcccgatgccagcgccaacccgtaccagcagtacttggacatggaggtggccgtgccaatggacaaactccaccaccatgtagacttggccgtggaatacgcactgttcctggccaagaaaatccgtcacatttatctgtccgatgctttgctcgactcaattaaggcgagtcaattgtgttgtcccctttccattttaaattttgcccttttcagttcggtttgattctccactcgctgtcctacgtggccagttggttctcgggcctcagtttgttcgtcctctttattctggccgttttcacagttcccaaaacgtacgaactgtacaaagaggtacattgatttctctaataatcactcattgttaaatatttgccgtttaagcccattgacggttacgtgaacttggccaaagagcagttggaactcttcagcaatttgtgagtttttccaattacaaaaacgtaattaaattgcattgttttaaagacttcaagagaagttgcccttcctcaaatcgcccgtggcagagaaaaagggagaataaatgaatgttcggaaggaaagggacaagcggaggagaagcagagaaaagaacccgccaattgcgcttaatctctgctttatgccactgacaaaactttgcattttcgcatcggccttttcctccctttgttgtcatcaatgcttgggatcaaaagacaaaatgagggattgattggaatggtgggctctaatgcagtttacgcgtccaatcgacttttacgcgtccaaccaatgaccatcctcagtttcttaagccataacttttttcttacttggtcaatccatacatccttggtatcaattgaaagcttaaagtctcgggaatttataaatacaagaaaagagtaaatatttgcattacgaaaaaaatttcaatgaaaaaaacctgaattcatcatttttcgcgtatattcaacagtaattttttgtctattgcttttatccaggcatttttctatacaaaaacttcagtgaactttaagctctcgattgataccaagaatgtaagttttgaccaagtaagaaagaagttatggcttaagaaaccgaggttggtcattgattggacgcgcaaaagtcgattggacgcgtaaactgcattaggagccaaattacttagactaggtaggcctgtttttggcttaagcctaggcttaggctttttttgcaaattttttactttctgttaacatcattaagtgtacttagggttgcttttgcacatttcgataattacgattcacaaggtatagttttgattgatggttcgaaaaaaactatttttgtgacgtctaaactgttgttgggacgcgcaaaatatcatgggacgcgtaaaatgtcacgggacgtgtaaaaccgactagaaaccccaaattaggtttaacatgattaatgttattacgggttcataaagctggcagtgacgacttaccatctgtttacggaaaagaagtcgattgttgagcactttgcgcgtgtgcaatgtgataacaccaccttcgaccattttcactttttttattagctttaaattaaagttgaaaaaatgtaaaacaaaaatatataaaataaatggtcagtgaaaaccaatgaaattcagtctttcatagggataggtcatttttatcaaaaaataaaagcacacattgtaaaaaaagatcacttcaggtgaaggaaagagaaagggagagatgaggtaaactcagacaagtcaaactttgaatgaattagaaaaaaatggaaaatatttcaaagcgaaaaacaaaactcaactcgcactaaaattcagcgaacatttcgaagtttaaataacccaaacaattaagtgtaacaaccaaatagagaaatgaaccaaattaagccaaatgaatacggtcacggattgacatgcacagcttcatggtctgccatataaggtgattagcagcaacgaatacctatcaaacaaaacggggctgctttgttcgtttttaaatgtgccattattattcttcgactgaaaatctgacctggttgggctcttggtgcttaaaataatccttcaatgtgctgctgaaccttttgctaacttgtacaaattccctcttacgtttctcaacaactaaacaattttaaaaataagaaagaaaaggagttaaattaatctgacgaggttggtagcagcgaggcacaagagcaatgatcgcgtttgtcgtgtccaacaattgcttaatggacgaagcaatctctttgatggtctccagaaatggccttctgaaaagacataaaaaattgctatttataaacaaattataaagccataatttcgaaaaggagcttgtaaatttgagaaattagggcagggtcccgacaaaattcagggcttgaattaagttaaaacctatcagtcatttcgtccggaattctggcaagcaccttgcacagtgaaacagctctgaattaaaatgaacaataaaggctttatattttacaaaaacctcattgacaaatattgaaattctgcaatgtgtgcaaattgtggcagttccagctcttctgtggccgcgtttgcatgcattcgaaggtacgattcctgcacattagttcctgncacgcccgactcgatcagcaaaagtttgagaaatcataaa

SEQ ID NO: 15788 - DNA, 783 bp, Heterodera glycines
cggtgtcatctatgttactagatcggggatcgatccccgggcggccgctcgagcaggacctgcagaagctagcttgatggggatcagattgtcgtttcccgccttcagtttaaactatcaagagagggaggagagggttggagaaggaaaggaaaaaaaaaaatgaaggaggagaaagggtgggggcaatgaaggaagggaaaaaagttgaaagaggggatgcatataattaaaaaaatatataattattattttaaaattattagactgtgagtttcttatgggacaaaaaatgatttaagatcttaaagtgaaatttatgtttgagtaaaaaatttataagatcttgagactcacaaaaaggtgtttaagattttaatttgaaatctctccatgcttagttataagacattttttttaaaagttggttgtctctttttataagttgtttttttaatttttaaatacattaattatttttttcttatatatttttatttaattattttttcttcaaatattaatgaaaagtaattaaatggatataaagataagaaatggatttaaaataataatataagtaattaatatatttaatgtgattaattaaattaattatttttttaatatacatgaattaattgaaaaaatcttataattagagaccaagaaagacatacttgtctttcttttcttctcacctctctttatattgtaagaattgtgaaaaaaaaatgaatctaaattatattactttaatgtaactctggtcccagacaaaca

SEQ ID NO: 15789 - DNA, 2192 bp, Heterodera glycines
  unsure (1)..(2192): unsure at all n locations
agtgaacaaagagcggagaggagaacaaagcaccgtcggaaaggcgttttatgacgacgaaatcggaggcacctgacaaatgggtacttttctgttttgagacccccctgaaattttcaaataaaaaatcatttatacccatgcaataaaaaattatttaaaccatttttatacttaaaaatatgaaattcaaaaagttgtactttcgactttttgttcgagttcaagttcggggttcgaaattgatcaaaatggaaccctcattctcttaattacgcaaatttaatccatttcttgacgccaatttaaattgatctttcatttattggcctaccgcgcagtttcaaatgcttcactgcttttgagagtgtgccattgacttggtgcttaatcccatttttgtaagtgaatacaaatgaatttgcgccggtgaaaaaaacagtcgatgaaataaaaattgaaaaagcgaacaccgaaatgggagttgagctgaagctggccatgacagaagaagaagcacgggacaattaatggtcaaagagggaaaacaaagcacaaacgatgctttagcgaattgatttgctaataattatattattattattattaattacgtaaaagccttatcaaaagtcaattttcatttggcaatttatgcattgattgaggcccctgtgagcagatgacagccgagtaaatagcaaataaagagacgtcaaaccaaagttgaaatgttttttctgctgtgtttgctttggtctgtcgttgttcgcatttccttttggctattttttgtcttttttgtgtgccattcccatcatttttcggattgcctctgtcggaattggcaccacaaaagtgcgatttcggaaggtggaaatgcgagtaagtgtctgcaggaagcgaaggtggacggcaacgggggaacccgaaatttggtcggccgcgtcgcgtagggaagcggaggcctgcggattttggggatgctgagcattggcattgacattggcatttgccactgcttacgttcagctccccctccgcactcacaaccctcgcgctcgccctcctggccgcttccgcttcggctgccaacgctcggagaaggcccttgggcagccgaatgtccttcagctccaccctctccactttgatgccccacgggtgagtcccttaagcgtgcttttagctgataaaagatattccattgaccagtgaatgccatgccaacacttgccttcgtccaaaatctcctaaacgattcattttgccctctgcagttgtgccaatgtccacctgaatcactttggaaatgctttccctctccagcattatttcggtcaatgtcctcgtgcccaaaatgttgcggagcgtcgtttgtgccaattgttttgtgctcagtgccgagtccacaatgcacgagatggccgcgattgggtcgctggtgcggaaataaactgccgcgtcgacggaaaccgtgacggaatcctttgtaagcatttcctgtcaattggtcactcatttgggagaagcagcgaaagctctggcctgcctgggaagggacgtcgtacgatttgacgcgcaggtcgatttgggtgtggtggtcaatgcatggcagcagaaagacaatgccgggcccttttggggggccgacgagcaaacggccaagccgaaaaacgacctaaaagtgccaaaatgggaaggaaagtgccaaagggcaaagggggaccatccgtttgtattcgtggacaattttaacgcagaaaagcagcgaaaagggaaaggtgagcaaaaagagcagaaaggccagggaaaggacggcgtaataattgaaattgaggacaaaggcgagcaaaggacgacgggggaaggacgaaggacggccaaattggggacgaaggcgcaaattgggcaatttgtagtcggaattggctaattgcattctgaaaaccaaacaatcgggggaaaagccacttgctaattatgagggggtgaagcagcaccttccccttcccctcctcnccttcctttctatgccgggctctgtnctttttggcatattcccctccccctctccgctctctccctgcctcctttctccgtcggtctctctcactttttccctctcccgcccccgtttctttttgtccattttaaattctcttttgtttttctttcttgcacacattcct

SEQ ID NO: 15790 - DNA, 1905 bp, Heterodera glycines
cttttcctttaatccttgccgagtagaccggggggacggggggggggggtgagccattcattcgtccctttggcccctttccgccgctttctctctgctttcaaattaactttgagatgacttaccgagtttatttatacaaaattgtgaaatgtgagtaggatgattatgccattcagcttattttatttgcttttccttttatttttccctttgtttttttcttttgcgcccccggcgataaatgtctcttttttattttttggtttatttctttttaataggctgaactattaaatttaatgggagcagttcacagcaacaaaaaagatgagagtaaactgtcactcgctgatcgacgttaccgcgtcagtgccgcctcaaaaggttgggaaacgaaagcaaaatccatgggaacggtaagagacaaaaaaaaagaaaaagaaaaaaagagaataattacggtaattagtaaaataaattccgttttaattgcagttgctaattcaatgcaaaggagaagcacaaggaaattgggaagtgttgcgctggaagttcaacaagaaaacgaaagtcagccatcggaagggaacagcagcaaaagggacgagggaggagaagaggagagggaggaggagcaggtcaaagttggggaacagtatcagcagcaacagcaggaggaaaacaacagcacggggacagggagagatgacacaaaacagatgagagagtgagtgggatggagaggaaaggatgacaaaaaacagatgagagagtgagtgggatggagaggaaaggatgacaaaaaacagatgagagagtgagtgggatggagaggaaaggatgacaaaaaacagatgagagagtgagtgggatggagaggaaaggatgacaaaaaacagatgagagagtgagtgggatggagaggaaaggatgacaaaaaacagatgagagagtgagtgggatggagaggaaaggatgacaaaaaacagatgagagagtgagtgggatggagaggaaaggatgacaaaaaacagatgagagagtgagtgggatggagaggaaaggatgacaaaaaacagatgagagagtgagtgggatggagaggaaagggggaaagggtaaaataaaggcaattgaaagaattagaacgacatttcccgtctgttgctctcatttgtcagacatttgcgcctgaaaccttttttttaatttccctgtagtaaatcaatttaagtgaaatttacccaacaattttttttattggtgtattacttaattagatagttaaatgatcttgctaaaggaccattcgattcaattttcttaagcaagaaacggctcgcttcactcttaaatttgtcttttaatcatttcttcctcggcttttgacctattcttatggaagtttcattattaattatatataatatagttgtgtttttacctcactttaagctaatcgttggttgaaatagaattttgaaataattttagaagggttcgagaaatcaaagaaacgaaaaaagagtgaccgaaagcaaattgagagagagaagagagtcaaagagataatggtaaaagcaattaagaagcccccccaatcggcaaaatgttatgtccgaagataacaaattaaataagtttatttgccgaagaaaataaaataataaataaatgcagagaataaattgggaggtcaaaatcggtgggcacaataacaactgaatgaggggaatgggagggggaagatggcgaagtggcgtggggtcatacacctaatcaataattacttccttctctaacacctcccctcttaaattcgaaacccgtggtttaagcctaaatttttcatctcgatggagagtaaaattgtgtgggtttcttgatacggctcgatcggcg

SEQ ID NO: 15791 - DNA, 1727 bp, Heterodera glycines
tgatagttggaatcatcaccaggcggttattgatactttttgtagaacaaacaatgcccaggtatcctcaaacttgaggtgtcaaaccgctttgttataaaaataattaaggaagcatttcatcttacattgcgaagaaaattccaaaatatgcatcctccattatcaaagtaactattgaattttaaaaaataagacacaaagtacacatttttagattaattttagttttgaaagaggaagaaagaattgctcaagacaaagttaggacttatgagttggacccaacaagcggtttgaatttgcaacctaggcgaaggacatactataataatgatgtggccatacgcactcttgtcactagatttgatgcacttgcaaaccccaaaccagaccaaattatgcatcacttaagagcccttcaatatcgcttagcatccaatggatttgacaatttaatccatgaataatgattttatattttatcgattaataaatttaaaatattaatcaatcaaaaaatttatttgctttgcttttttttgtttgtttgtgtgcgctttttaagttagtgtgtctacggttgggccgaaacacacgtaattagttgctttttaaccggaagagaccgtactgacgaggcccactcttccaaaaaattttcttaaaaaataattttttttattcagaaaccgtccgcaaaagtccgtccgcaaatgtccgtccgcaaatgtccgtccgcaaaagtccgtccgcaaatgtctggacgcgttttagcctcgtttgtcctttttttgaaaaaaaaaaacttggcagccctgtattacactcaaaattgcataatggaaaaattcttcgaatttctccccacaaacgagaattaaaaaattttatgggtacatttttgaatataggcaatttttcgtaacaaagtgcactcaaattttcaaattttttttcaaaaaatttaacttgtgaaaattcccggttggtcccagtcccggacgaaaatcgaggtcccggtcccgacttttctggtcccgttaagtcccggtcccagtttttgtcaaaattcccggtcccgtgcaactctaatattaccttttttgttaacttgctatagcctaatatgcacgaaaacgagtttttaacttggtttgaagcttttatcttgaactttttggtgcatttttttaccttttttgcgatttatttttttgaaaaacagtaaattttttgaaaattttgcaactttccctaccatattttattacaatttccaaaaaattttctggcggcgattatcggcaccgccggaccttcattttaccttaatttttgaaattttaattggaaaacttcccaaaattgcaataaaaacgaaaaatacacccctaagaatcgacctaaaaatttttcaaaaatacaccccctaagaatcgacctaaaaattttcaaaaatacacccctaagaattggaaaaatttcacaaaaattcttcccccaaatttttttttcttgttcatatttgctaagaaaatattttgtaactgcaattttccttaattttaaattattttcaaattaaaatagctatttaaaaaattacacccctaaatttggaactttttcgccactattttttccactattttggcattttttgtcactatttagttaattattttgggattttttatcactaaaaataccatcactatttatgt

SEQ ID NO: 15792 - DNA, 1578 bp, Heterodera glycines
gatcctccccccgccgcccacccccccgaaaacttagagggtaaaatagcatattttttttttgctcaagattttctgattttccttattggtacccctctccaagagacctccatgacacaaatttatcaaaaaaatatttttgctatttttcaaaaaaaaaccgaaaatgttggtgcaagtctgttaaaaaaaagcattgcctaaattctcaatttttccctcactcccgaatttttttttcggaaaaatcgccgtaaaaaatgattgaattgtaagtaaaaaaaaaacaaaaaaaaagtcgtcgtcgcccatagcggcggtaccacctccaagccgaaatccagggaccaccatccccgggtccccacaaattttaaaaatcagttacttttctagtagcgactaaatttctaaggaattcaaatttttttttatattttttccataaatcctttccaatttgtctctccaaatgcaaatttaagcctgaccctttgggaaagttggctattttgttgcgcaaaaaaatccgaacctgagtcgacagtctctttcaaaaaaatgcgtccgactgttcgatagacggtccgatctttgggcaccgtttccaattgtgacttcacaatttcggcaattcgaatgttctgaatttgtttttttaacgggttattagtcggagaatttgtcggcaattttcaattaataagtcaaaatccgaggaaatgattttcccaacaatttaagggcgaatagttaaagctagtcagtcacctcccaattttttgagttttttactttataaaaagtcgttaacacgagtccctggatatgttcgaaatatctctgaccacaatctgacacccatttcgaacaatccctgattcaaaattcaaacaaagtcgatgattttcgcgtttttgttcgaattcaggtcagtggttcggaagtggcaaaaacggattctggatgggaatcagcgagcccaaaaatccccaaaaataggtaataggtataaaaaatttcaaaattaagggagggggtaggaatttttccacctaccaaattttttgaacccttaaaatgatttttttttgattttttattttgttgattttcacttgtttcattgccatctttgtgagttccgcatttttttgcttgtcacggctctccaaaatttgtgcctgcaactcttggaaagcctttcggagttgcgcgtcaaagtcctcagcagccagtgttgccatttatttatgcgtaatctaataaaggaagatctaaaaaaatgtgcaataaatttcaagaaattattacatttttttggcacttttacgggataaaaactagagaccgagccgggccgtgccgtgcctagtttttaccgggcccgtaaaaccgaatcggcgattttaaaaaaacccggaatggtaatagtttagatggtaccccccccccttttttaaaaatttttttcaactttcaaaaaatcataaaaacatgtttctaggggttttcggggtcgctgatcacgaatccgacatccatttcgaccgattccgaacccctgacccggat

SEQ ID NO: 15793 - DNA, 1277 bp, Heterodera glycines
atataacactaagaaaaatgttagaattcagtattttggccgaaaattgagttagccattgattgggttattgatgactcatcaatttggtcactctgctgatcaattacatattcgcagcgacacttcggactctaacgagcagcgcgagtccttcgactcgcgcctactgccgcggcggtcctccaaccgtccgtccgcggacaaaaatgacattttgcgtccgtcgccgatggatgggcgcgcggcagtgatcagaagccgaggcaagtgattggaggacatggacacgcgacggttgcacaaacgatgactgctcagcggaagaaaaggggacggaatgaaaatggaaacaaaggcatttttggcatcgcaatttttgaatgccaaaagtgctccctccccgttttttcccacctccccccgccgttctccgctttcattcggctgtcatcgaattcataacgcaactgttccacaatgtccaacagaatgcgcgaggagctcatcacctcaaaattggagaaatttattaaagtttcaaatgcaattgaatgttttcacatcatcaaaatgtgccggtgacagttcgggcaacgcaaggccaaggacaagctaaaaatttgaatacttatgttaattattaattaattcaatatttactgccctttaattgcttttaataattttccaaaaacaacccaaactcattaattcattaccgggttcagcaaatgatgcgcaataaccaacgggtcgcgcagacggctgacatcgcaggtcaaaatgcgttggacgaggcctgaattttggattaaaaaaaagtcaaaattggtaaaaaaaaatttgccaagaatttgtttgccaattaaaaagtggcggaaattgaaatttaaatttgaaaaaataaaataggattttaaaaatgtcacgtgattttgagtggactatggccgggtgcagcgtcgaacacaccgatgtcaccgtcagcaaatagtgcaatgtttgcgcatcgcaacggtcgctgaggtgcgcgaccgcaaccaacaggtcaatttggcgctaaaccggcacaaatgagtgggggaatttttcggtaattgactattaattagataattggcaaatgcttttccaccggaatgtgctcctggaaaaacggggcctgactctgcagcacaggaataagccgtttgttgacgaacccatgcgggacgaacgcggcaatttgcgggatggagcggacggcactttgctggaaaagcgaattttcaaaa

SEQ ID NO: 15794 - DNA, 1005 bp, Heterodera glycines
agaaaaaaagaaataaagaaatttaaaaaaattacaacaaaaaaattgaaattcagttttttcgagtatattccagaataattttttatctgttacctttagtccagaatttagttataatcttctataggcttaaagctttcaattatactaagaatatagtccttggtcaagtaagaaaaatttatatcctatgaaaatgggaatggtcgtcgatttgatgcgaaaattgttgacaatagttgtggcaacatttgcgtgagaggcttcctttttaaatatgtaattggcactgtgttttggcactttcatcaaaaataaaatggtcgaatttccgaatttcgtgcgaatttaacaatggaatgataattcctagtttcaactattaatgacaaaataaaggaattaattgagtgcacttttataaaatgaaatggaaaataacaaaattaaaaaatgactaattgatgcactaataaattattaattaatattaattaactaattaattggttcgttaatggatcataaactgttaaaaaaattaactaattaatccgagttaattactttccatttagcgcgctctcaatctcggccggcagtggcggcactttgtctgcactgccggcacgtggctgcgagtgctgtcgcggtgtcaacgccatcagtgcggcgcgtgtgtcgcatgcgatggacgcgcgcgcggtcgcacgcggcgaattggatattttggcattcattttcagccaaattggccaacatcaaatggaccaaaaatggaaaattgaggaaaaaacctaaaaaaaaataaacaatttaaatttaaatttgaaatagaaattaaattttttgaaatagcataaagaaaaataatcaattaacgcatcagaagaataaatgaaaacttaaaaataaactaaaatttgccgccaaaacacttaaaagcatgccagcagcactgaaatagtattaccaaaccgactgaatattccaattttacac

SEQ ID NO: 15795 - DNA, 1739 bp, Heterodera glycines
gccaactcggggccgaaatgccgttgtcgctgcattcaccgtctgcgaccggtcgccacaatcgccgccagtcgtggcgacggcgtcgatcaccgatgtgccattgtcgacgctgtgcgacgacagacgaatcgccgatgccgctgaacagtcaaacagcagcgatcggcgagcggtcgccgatggctgctgttgttgccgctgccgcggagatccgtcgatcagtgccgggaaagcggtgcgcggggagtccaatggcacagccgtgccgacgtacgcctcgtacatggacacaccggcgctgctggggacgtttgctgcaatagcagggaaatgagtggagttgtggaaggagttgtttgtaccgtatgttaccgtatcgcattaaaattgcgctaccgtgtgatatcggtttctcgccctaacagcaatttttgtcctatcgtattctaccgtgtttcattagttacttattaaggaaaaagtaaccgtaacccaccaatttatacggtaactatcacgttgcaaatgagaaattgcaaaaatattaccaaatgaacaccgtacctgttaaatcaactcgcaaagctttacgctaccaatgaggttgttcaattcgttaccgtaccaccatgaccacccacagtttcggtcccaaattgctaccgtactgctctaccgtaaccatctcaacttaccgttcgtgttgtttggcattgttctaccattttcatgaccatcaatacaattattgttgttgttttggttgttgttattattgggtccaattttcccatttccaccgtaactgttgctgctgttgtccaaaccaccgtaatcgtaataatactgtttctgctgaccccgaccatcggacgatggcacattggcaattccttgaatagcaaatttaaaaaaaaacataaatttcgtataacaattaattgctgcaaccgaataaaaattttggtacttttccgttttggggccacagattcaaatcggtgcaaattcctttggcctgaggactgaaaaaatcgtcatatggacccattcaatgatcttttggcccaaatggttgcctttatgactctcaaatagctaaagggctgtatttgaatattcatcccgttctttatttatgttattttttaaaatttaaatgggtggccccacaacggaaaagtaccaaatatcttacgaaaacgcctatacaaattaatatctatatttgctacaaaaattggatctttctattatgctcataaaaatacttttataaatttactattatacaactagaaatgagctactaaccatctagaatctgtactttctagaagctcacactgtcgcgggtcattggctgaagagatgcctgagtagacccaccacgatgcgcgaactcgcccgtacatatgccaatgtcttcgaagtcaaacgatctgacgtttcagcacactccgggccatcctaagcctggttatctctgccagcaacattcttaaagcaatcgactcttgcatcaaaaccatgaccattgagcacgaacctttctgaacactatgttgtcgcttacagtttcggatgcggcactcataataaaaacgattcaatagaataaacgatagattgagaattgaaaaataatatttacagagctcatcctaccaaataattaatgttatggcaaatgtcgagactatttacttgggagtaatatattcctaactcaacaa

SEQ ID NO: 15796 - DNA, 2731 bp, Heterodera glycines
cgaccgtccgtgccccgtagcagcgcaagtgcgttttggtgatgctgcgagatggacgacggcgagcaattcgagaggacagaggcggcgggtggagaaggggagacctgttgatgtggaatttttttcgttttttttgcgctaccgtatccctcgaaattcgagacagtaatgcaattttttactattgcgtgaactactgtaaccataaaaaagtacgatgcgataccgtaccagcacactactgctgatatgaacagcttataaaaatattatgtacaaaaaatttgccgaaattttggatttttgaggattccaaaaatttacctagataaaaaatcctcaaaatatgtaaaaaatgaaatatgttagaaaaaagtccaaaatataaaagttaaagctaaattagattaataaaaattttcaaacaaatttctttaattatttcaaacaattaatattttttggactaattcccggttgccctaccgggactgggacctgagcttttcaaaatccgggaccgcgacctctgaggaccgggaattcccggtcccggcgcactctagtttcttatattgtttaagaatttcgattcttaaacccacttcctcagttttttaatttgtagtaaaatggtcaggttttatttacctaattagtattaatgggccagtcaattttgaaatattcgaactcggtccttttatttgtcttgtcgacattttttttttgatcgtcaacttatccaagagcgtgtccgacggtggccaatgtcccagccgaatgtacgtggacatgggctaccggacgaacccggcacggactgacaccaaagtgccgtcctcgccatattcattatcaagacaagaaaaggcggcagatacgcgaaccaagcgggatcagcagcagcttaagccgaatagagaaaggtgggacatattttatagaattgggaaatttttaatcaaatgccaaaaaaactgatcagcgggcgggggagggaatgatcattgctttcaattgatacgaggatgatcaactgacttttgatctgatcagcggtgaccacgataatcatttgaccattgttgatcaactggcactatcaaaatagtgaccaagatgttcaattggtaccaagatcggtcaattgaatctccgttaacttatcaatctaacacggtcaattggtctgatcatgttttaccaaattgatcagtgggaaggaagtatttgtcattttctgatcataattttgtattttttaattccaggataaccgaggaggaagtgcggatgttcggcatggatgtgactgatcagatggacagtggtgatccgacggagagtgatcagatggagagtgatcaggaggggaaagccgagaatttattgcccaagactggggttgaaaatcatcctaatttggcggtgaataattgcgccgttccgtcaattgcattcgatgaatgttcacttttgtaattactagcggggaaagcgccttcggcgcatcccccgctacgtagtacgatgtattattgagctatgaataataaaaccgaaaatggctcggccgcttcgcggcctgggactcaattcttcggcattccaatcacttggaatcactcaatccacctgcattccaatcaccaacaataaatctcgccgattcttctgcataccaatcgctgggactcagttctacgacctttcaatcaccgttactcaatccatcagcactcgaaacacctggactcaatctcaccaattctacataggcaaaacattttaacattctactggcctttttgtttcttgtcatttcttaaacaaccctcggcatttcaatcatcggaactctatctcaccaattctccggcattccagtcactgggaccaacccaccagcattccagtcactgggactcattctcctgcatttcaatcaacgggactcaaccctccagcatttcaatcactgggactcaattctccagcatttcgatcactgggactcaatcctccagcattccagtcactgggactcaattctcatgcatttcaatcactgggagtcaatcctccggcatttcaatcactgggagtcaaatctacggcattccgaacactgggactcaattctccagcatttcaatcactgggagtcaaccctcatttcaatcactgggagtcaattctccagcatttcaatcaccgggactcaatcctccagcattccagtcactgggactcaattctccagcatttcaatcactgggactcaattctccggcattccagtcgccgggactcaaccctccagcatttcaatcaccgggactcaacccaccagcattccagtcgccgggactcaaccctccagcatttcaatcactgggactcaatcctccagcattccagtcactgggactcaattctccggcatttcaatcaccggcactcaaccctccagcatttcaatcactgggactcaacccaccagcatttcaatcactgggactcaattctccagcatttcaatcaccgggactcaatcctccagcattccagtcactgggactcaattctccagcatttcaatcactgggactcaattctccggcatttcaatcaccgggactcaatcctccagcattccagtcactgggactcaattctccggcatttcaatcaccgggactcaacccaccagcatttcaatcac

SEQ ID NO: 15797 - DNA, 2073 bp, Heterodera glycines
ttttagacgctcaaatttttatgacgctatacctaattataacgaattgctttcaatttataacatggaatctctccaaaaaaggagattaaaaattgatttaagacttttccatgaaataactaatggttttgttcaaattaaacataatgaacatcaaacccatttttctaatagactgggtaatttaattaagcctagctttccattcgacatggataaggtacaaaaaatatgagacctaaattataataaaggaacgaaaagattggacaccaaatcacgctgtttttgttgtccatcaacagtgtaataaccaacgaacgggtcgaagaaccaatcgaagaaaacgctgctgtacacggcgggtttgatgaacacggcccagcctaggatgtacagggaacaagcgaaaaaccatgcgaaaatgagatggcggagaacaaaagatggcacagtttgacgaagccgaattcaagacaacggttagtgccaacgccaattttcgctttattactgccatgatgagatgttattatattaattacaaaatcagcggaagtttcagcaatccaaagagcttaaaagaagcgatgaaataacaatataccatttagcaataaaaagcaaatttatttatgcaaaagagaaaaaagtccacaaaaaggagtaatccacttactctgcggacatgtcatagattaagtcgtcctcgagtaatatggatcaacaattaaacaaaattaaggaatcacaacaaaattaaataaaagaatgaggtcaatcgatcaataaaaccaaatcacatataaaattataaatagctttaattaattaatcaaaagagacaattcacttttccggtcattttattcgttaaggagtttaattttagttttaaattgatttaaagaatttattttaatgatttctttatcaagttgattccacaattttgtagccctccccgcaaagggaataaattttttgcctaatttatattttgtgttaaacctataaaaggggacattaaagcgtttagaaggtttgaaaattttaaataaatctagatctgttcggccataaacaattttatgcgccatgaacagatcaaatagctttcgcctattctcaagtgttggtagttgtaggtattctaatcgcttcaggtatggaattggtggaaggttacacttgaaaagcactattttagtgaaatatttttgacatttctctattttttaatatttttttgaagagacggattccaaacctccggagcatattccaataaaggcctaatataagttttatataatgtaatccagattttagaagatttagatttaattattctaaacaaggaacgcatacgtaaataggcattccttgttatttggttaacatgatcggaaaattgtaatttattatcaatatttattccgaagtccctaattgtatccacagcatttattgtattcccatcaaatttgtatgtttcttttgggttttttgaacccaaatataatacaaaagttttttgaattgaaacctttatttgccatttatttgcccattcgaataaattatgcaatgctttatgcataatttccgtttcagtttttgctttataacaaatatagattttaacatcatcagcatataatttaatattcactcctgatggtatgacatcaggaaggtcgataatatatataaggaataataaaggacccaggacagagccctgggggacaaaattaagctaattaatgtcttttaaaagagaaatcgaattttaaatgaatgaaacaaaaccaaaaacaattcgtcggattgaatttatatatttttaatgattattaattaataacatcatcaaataacaaaatttaactaatgatcgaaatacattaatgaattttagcaggaaatgaagaaaacaaattgcgtaatattctcgttgattggtgtctgaccacttttcccaatggaaatattaaaatgtagaaagaacagaaaaacaaaaaaaagataaattatcacagtgtaaatgttatatatttattttat

SEQ ID NO: 15798 - DNA, 524 bp, Heterodera glycines
gatttaggaaaaatttgtaatttttcaaaacttgcccaattttaggtaaaattgcatgggccaatcgctgccaaaattcatttgaatttataatttcgtacaaaaatcattattttaacatcttgtacgtttcatctcttatctttcttccatttgctatttttgagctacccatttccttttttgcactgtcatcattttttcgtacaaatttaatttgtttttttgccaaaaaaaaatcatttttcaggaaatgttcatttattactgttgccgaacaactgaaaaatgtacatagcaacttcaaagtcttgcaatggaatatcgggcgagcccagtgagttatttttcatttccaaaatccaagacattaaattgtgatggccatggatttgacgctgtcccgacatattcatgggaaggaaatccttggggtacttatttcgtgtatctaggagaatttttcaattggtatggcggtcctgccactacggatgccaatccatgaccacagagacccaaaa

SEQ ID NO: 15799 - DNA, 2206 bp, Heterodera glycines
cccaaagtttttgcattgccgttgacgttgtcccattgccacaatttttgactggcagcgaatggtggtgatgtgaaaagcagcagaaggcacaaaaatattttggagaataattgggcaattcttcatttttttaaattttattgaaacgaagctttaagttttttttatgatttttgaataaaatttatatttaatttatgattttttcgtagcttttatatcgaaaaagttttgctattttttaaataaaatgaaaattaaggccaaagatttaatgtcaaacaatggaaaggtgttaagcaatttttcgtgtgcaggaatttttttaattaaattttcgttcgagacattgtttacgtttatattattgaataatatcggaaagctttttcattttttatttttcatttcttcgatgaaaaattccgttttttaaatataaattcaaaatttttttttgaaaagcaaaaacaaattattacattaattatttttatatgtaatttggagaaaaacaaaatttataaattcttttttaaatgtaaaagataagcttatacagtaatgtaatccaatttatgcaaaaataaaataaaaaatttgaatttgatcaataaatgcattcaaattaaaataaacactgataattaattgatttggtcgatccattattatttgccttttctagtcgtagactcactatttaaaaggcaattgtagagaatttttgctctttctgactggcctactgaaattttacagaaaatttttcacaaccccctagggattcttttcggaaatttccccgattttcaatgtgttttgtggtgtcccggtcactataaaggagtgatctgatcaagttgctgtaaaagacttttttgatcagcatcaaaagttagcttagcagaataaaaaacgttcttgtacatcgttttttcgtaaaactggtaactttgcggtatttgaagttgttcaagattcaatggcacagctggtggcgcatctactagatgtcttgctcggtttatcatctaagcgaaagatcttttaacaaattttatgattgaaaagatttaccaaatttgttgccttttttgacggcacttctgaaagtgcaggcgaactaatgctttgagtagaaaccgcacgaattacagagggagctttctcaacagaacgccttttgatggcagtcgtgactttttgcgcaacgacgtgacttggattccgttcacatgtgtgaggtgtcgccatgcggatgaattcatctcgaagtgaagtccaaatccgtcctttgcacttgtccacaccgctgtctttgaactcacatcgccaaaatttaatcgtcccgtcggtacttgtcttagcaaatttgtaaagatggccatcatgttgtagcgttgacctgtttcttttggcgtcaatttgatgttgcatacggtacataataaatcttaaaaagtttaaatttatgttcgaattaaaattaaaaatataaaaataagaataacactattaatttaaaaaagtcattttgcttgctaatttttgcgtgaaattttatttgaaaaattaattgttttatttggggccgaaacgtgctggggccgaactgaggtagaccggaaaggagtgataaatgagggggagggagagaaaaaagaaaagagagagacagagagaaaaagagaaagaaaaaggagagatgtatgagagggagggggggggggggagtggaaaaagagagagagagtgagagagattagagaaaaattagaaagagggagattagataaagagaagtattagaaaaattcgcgaatcaattttggaatcagcttatgtaattggaatcttaaatataataaaatatcattatactttactttctctggctctttttacttttaacaattaaacaaataatgtggtaattaatttaaaatattgaataaaatcataacgaagtgttggaaaagaatgaaagaacacgaaaattgtaagctgtgaaagtcacaaccaaaataacaacaaccaaacaaacaacaacaataacaattattaattaaacaatgagtataaaataaaaaaggttcaatatgaaattttaattaaaataaaatattattgatactgtatgatgtttagattctcattaaatttcttgcatggcataacaaacatgttgtgacaaaagata

SEQ ID NO: 15800 - DNA, 2300 bp, Heterodera glycines
  unsure (1)..(2300): unsure at all n locations
ttttcatagttgttgatgcatcatttccaaaacaacaacaacaacaacagtccagcgatgatggagaaaatgttagcaatgaaaagcagcacgatgaaggtgaaaaagtagcaaaaggtaaagccgcaaaattttaatatatatctatatacatattattaatttttttttgttttaattttctttgattacgtatctccttaaatagagcgcccgagggctttatttttcaaccctctgctgaaagggggatttttatttcaggggggggggggggctctaatttaggagtggcctgtatttttattttattttaagggggagtactaaatttttatttttttgcttcatttcgagaaagtttctctagttttttttttttggtctcagtattgttttctgctggagttttgaaaattgctactacgaaagcccaaccgatgaatttttaataatttttaaattagaccgtgacatcatgcaaaaggatggccagcctttgtatttgccgccattcaatcgaccaatgctaatgccaggcaaaattcacgaaattttttaaattttataatgccaaaaatatttggggaattcagatgggagagaaagtgacacaatgccatacattggggagacaaatgatttcaaatttgagcaaaaggatgttgaacaatcattggtgctgatggacgatgatggggccacagatgtggccaaatcgtcatttgatgtggaggataaaagtgcaatttaattttaaataatttaattaaaattaatatttaaaaggaaaaaaaaattgaaaatatggaatcattaacatcaataaaagcagtacaatggaaacatcttcagttgaaataattatgacttcacaaaatttaaaaattgggcaaaattaaagtaaatattaaaaatttttaattttctttcttaaattgggtttatttatgagaaattttttagattattctataaaaatgctaaaattaaataaattaagatttataaaaatcaatgttttaaaaatattttaataatccaaaattattttattgaaaaaaaaaatatttttttttgaagatacaaggccaaagagtccgaaaaagtttaaaaatttaataaatactttaaaaaacagtacaaaacatcatgctttttaaattttttaaagcatttttatgaatccaaaacaattttatttattttttcaaataaaaaatagttgttttagcagcacaaggccaaagagtacgatcaaatcgaagaagaattagtacatttacaactccatcgacgacaacatcattatcatcatttccaacaagtacaagtccacaactcagcagtacaactaatggcgaagagttttggatgacaacaaggagtacggtaatgacaccgtaccaacgcgtggccacaacaccgtatgacattgccaagttttaccgtatgccaaatggaaactcaagacagcgtgaaacaggtaaattttataggcacacaccccggtacaggactaacttaacctgaaaatatttcaacgcttatttgatttaaaagattttttcaaaattctgagttttccattatttgatttatttttttttgcaaattaattacataaatatttttaagaaagtgcttctgatttctgacaaaatttagctaataagccaaaaaaaaagagagaccaatattaatgaatttgagtttatcctctttttataagagttttatataaaattgaagttctattaattttaattaatcccaatttataaaagttattttttttaaataaaattgaagtgctaacattttgctcaaaacgtgccgccatccgcgactcggccaacatggtgatcgcatgtgccggcgaagacggcgacgtttggacaccgttgcgctgtccgcccggcaccgactgtttgccggccgccgattcgacattcagaatttgttgtccagtggcagtgggaaaaagataaaaaataatattttatttttattattattaatttatgcattttatataccattcaataaattaatttgtttttttttcgtcatttctttttttggaaatacgttttcttttaatgaaggcataattaatttatttttacttaataaatagagacggatttttagatgctaaaaatcctgacatatataataaaatatgtgctaaaaatgctgaaatatgtgctaaaacccaaaaaaaaatgccaaaaatatgtgctccnaaaaatggcgaattntatatatattttttaaattaatttaaattttaatcg

SEQ ID NO: 15801 - DNA, 1589 bp, Heterodera glycines
  unsure (1)..(1589): unsure at all n locations
cgccattcaatcgactaacgctaacgccagacaaactatttgaaaattcagatatttaagccgaattcatntataataaaaaagacagcgacgggtgggcaaatgactgctgattttggatgacctaaaatgaaatgggcaatggcatatcattcgccgccccgctcaaaaaatgcctttccaatcattcgctttccctcctcttttctctctctctctctctctaaaactgtgccaattcgccggttcctgaaatttcgaaaggaattatgcaaatttgtcgcgtctctccgttttattggcgcgcgtcactttcaagagtgggcagtgattgatgacagccattcggtgccggaggaacaaaacgaattgggcgaggggggcgggcgggaggtatcaaatgaaaaatttcaacaaaaaactacacataacttttgtgaaagtcaaccaaattaaacattcttgatatcattagatagccctaagagttctctatcagttcacctaaatttcaaaaaattcatcatgtttgaacaaagttatggccaaaagtacacaaggaaccaggttttcggacattttttggttattacttttttgaagcttagccaaattttttggaattttgcaggctaatagaaaaaacttagggctatagaaagatatcaagaattcctaattttcttggttctaagaaagtttttgtcagaatttttgatggtcaaaattattttatgtctaatgcaaaacttttcgttataaattgtttaagagaatgaatttgagttatttgcaataatttattaacaaaaacgaaaacaattgaaaataattggccaaaaatttgttgttttattacttttttatatattcaaaatcaaatataaatacaaaaaataaataaaaaatatgtaaaaattctgttctttctgggtattgcaattttcgcctttgaaaatatcgaaaattgaatgaaagagcaaagcaaaaagaaaaaaaaacacaaaatcaaggcattggcattttaggaaagaaaagtgggcgaaaaaatgctgaccatcagaaaggtttgagtgaaaatggccggcgaaagaaatgcgggggaaaacacggcaccgccgagcacttgcggcgacagtatatccggggacaatgcttaaggggacaaaggcgaattaggcaccgggtaacgcggggggagatgagaccgatcggattgagaatgattggagataacgcgtaagggttgagaacgttgggagagagcacctgaaagggggagggagggacagagttgaagagggaaggaggagagggatcaaagggcgtagccagccagacccattgcttcggggggggggggctcaagtcaaaaattcgattttaggggtgtatttttctttttttcagtcgatttagggtgtgtatatttcattttttgaaaacacgaattagggaatgtattttacaaaatttctcgccgtttttggccaaaaaattacaattttttgccaatttggtctccagggtccgaacatgccgataggcgccgccgggaaaaatttttgagtattttgttaacaaattgc

SEQ ID NO: 15802 - DNA, 1415 bp, Heterodera glycines
ctttttttgatggcctttttctttttttcagccttttactttctttttttgatggcctttttcttttttttgacggcctttttctttttttcagccttttactttctttttttgatggcctttttcttttttttgacggcctttttctttttttcagccttttactttctttttttgatggcctttttcttttttcagccttttactttctttttttgatggcctttttctttttttcagccttttactttcttttttttgacggcctttttcttttttttgatggcctttttcttttttttgatggcctttttctttttttcagccttttactttctttttttgatggcctttttctttttttttgatggcctttttcttttttttgatggcctttttctttttttgatggcctttttctttttttcagccttttactttctttttttgatggcctttttcttttttttgacggcctttttctttttttgatggcctttttctttttttcagccttttactttctttttttgatggcctttttcttttttttgacggcctttttctttttttcagccttttactttctttttttgatggcctttttctttttttcagccttttactttctttttttgatggcctttttctttttttcagccttttactttcttttttttgacggcctttttcttttttttgacggcctttttctttttttgatggccttttcttttttttagccctttactttctttttttttgatggcctttttctttttttgacggccttttactttctttttttaaaacttttaattttgatgcggtgccgattagggggtatattttcgtggtctcaacgtgtaattgggttgaggatgacaaatttcaaaataaaccgatgaacaaaaattaaatgaaaatcattttaaatatttattattcttctctttttcaagccaaagttgccatgcgacagtgtcaggtcgtgtttcgcgtgctccatcactttcaacgccttacattccaaaatagaacaaaaaggtgtagagcatgccgaccatcgaaaagaagctaaaaacacctatttagaataaattgttttttgatgtgttttaattttataaaacttttttactacacaaaccatcgatggggatggccatcattgaagggaggaaagggctcctttaactcaattttttctttgttgcacactggcaatggttctttgcaaataacacatgacgcaaatccatcatattttttacagattttctccaatttagatgaacaactttttgtttcggcgcatccatttcaagacaaatatatcattatttttgttctgaaggtggcatgaattgaaaaaatatatcaaattaataaatatttaaattgaaaaatgaaac

SEQ ID NO: 15803 - DNA, 2003 bp, Heterodera glycines
  unsure (1)..(2003): unsure at all n locations
gttttttgccatctcagtttagcanttagcattattacgaatgaaatntaaaganaattaagtattaaattttaacaaaacgctaattttcaattttagtcaaaataaatttattattcaaaaaatgttttgaaattataaacgaaaaataaagaaaatgtaaacttaattctaatagcttaagaaatgactggcttcgtcactctgctgtttttattataattttaaaaaaatttaagaaaaaatctatgttttataagaaaaattaataaaatattttttaacaaagaaaagcctcgaatgtaagaaaacttcagggtaaacaccataaattaatattcgattagttttcgttatattttatatttttaaaaaattattaattcaaaaacattcatttttaattcaattgaaattgattttaaaagtaatttcaaaagactaaaataattatggagttaaattctataaaaattattttttgaattatgttttatcattaaactactatattttttacttaataggtagggaaaagatctgaaatatttattttattattttattgttttcggaaaccaataaaacattttgttttttatataaataaatcaattaatgtaaaaatatatgaaacaagaagaaaatcgaatcacttaattatcgaataattaaaatcatttagtccaaaaaatgattaattgtttgaaataattaaagaaatttgtttgaaaattttcattaatttattaaattttgtattattttcacttgaaataaattaaaatttgaaatttttaaaaatcaaaattttaactttaataaaattgcagccctgcaaaataatttttaaattttttaataattatgttaattctaatgcacttcgtgcgtcaaaagaattttattaaaaaataataattgcttctattaaataattataatattatgcagaaaattgcttaattatttcaagttattgtcagttacttcgccaaactttatcaaaaaaataatatttgcatttcaatttcaactattcctgaaacgctttttggggttgctgatcatcaaccaagaaaaaaacataataatttttttttgaattattatatttttgaagttcaagacggcgaaagaatatatatatcttaatttattcttttaaataaaaaatttaatacaaattaaaattaaaaatttattatttattttattaagcatttaccaaaatcaaagcccgttataatattaaacaaaataagtctgcaagcacgagagactttcaatgtaagaatggatttatataataatttataatttgtaaaaagaataaaattaccaatatttaataatttgttaaagtgtaaatcagactattaaactcatttttataaaaaaaataataatatatttttatcaataaatttattaataccattgcataaaaaaaaattgcaaaaattcattaaaatttcatttttataaaattatatatatattcttatgccaaaatataataaaaattctataaataaacaaaacactaatattcaacttaggagttctgcacaagaatgaaaatattatattgaaaaccaataaatatttattatcaattcaattattttgaaaataagttttagggatataagaaagaaaaattaaaaaagtaatttaattattattaatcgataaaatttatcaaatttaatatttttaactagagtgccatgggaccgggaatttttgcaaaaaccgggacttgccggaacctgataagccgggaccgggacctcgattttttttcgggaccggaaccgggaccaaccgggaatttttaaaattcaaaaaaattcaaattttaatttttttcaactgaaaataatacaaaattaaattttaattttgtttttttattaaataaaatccacaagttaaagctaaattaaattaattaaaattttcaaacaaatttctttaattattttaaacaattaatc

SEQ ID NO: 15804 - DNA, 1719 bp, Heterodera glycines
aaaacgaaagcacgggggggggggaatggccaaaactttacattcgctttttcgccatttcagtttaattttttaatttttttgtttggcaaaatgttccccccccccccccgaaatgtttaacaattaatgcgttgactttttgcagtctccgcaataattcatgttttttgggaacattcttcgtcaatttgaattctctccgctgataaacccattgctaaggagtaattattgcgcagcatttatttgtttaaatttgtcgccgtcggatcatttaaaagttgttaattggcgaacattttttaattgactataaatttaaattctcatttctttttaataaatacttaaattggagacatttttcaaacaagcttccataaagattaggataattatcaattaaaattttcaaataaaaaaaatacaattaatttgaaagtgcgataattattattttgtttttttatttgttttttaaatattttgtgaacaatgtcttcgctgatcaaccttttcaactcatttgaaatgtatcatgaaaataacacgaggaatatgcactcttcctacaaacacaagtgagtggaggactgaccagaagtgatcggctcaatcaaaggcaatatttaatcgaatggcctttgattggtccctttgcctttgtccctaattacccaattaattattcgcgcggtgtttaggtttcaatttccctatgaacggattgaggacccggcgggtttgactgcgtactttcagaagtattgacatcaaaccatcacaattggcattttgtactatgttattgtgagcaatttatttattttttaaaacactaataatataattattgaaaaggtaaaatccattgaatggacaatgcgtgacagaaagccgtttgatcttcggaattgtctgtttgtttggaacacggcattggcacttttcagcatttgtggattcatccgagtgggagaggtcaaacagattttagagaattaaaaccaagccgttgttaaggagtcgctcatcaatttaatatacgagggattcactttcacaatttgccacacggtcaatgcacgcggcccgggcccattttgggggtttctgtttttcctttcgaaatttgccgaattcggagacactcttttcattgttttgcgcaagaaaaggtcagtgtcccaagcatacatttttccgttttcaactttcaatgcttttttgaattgaaggttaatcttcctccactattatcaccacgcggccgttctgatttattcggctcatgtcggtgagttaagggacatttgacgccttttagttgcaaatctctccctatttaaatgtgtcgcgctttttgccagccaattccccttccctccctcctgccatgtgccaatttccccttccctccctcctgccattgtgccaattccccttccctccctcctgccattgagcaaattcctctcccctcccacttgctatatgtgttttattacaaccgaaactcatgccatctactagcaaaaagctcaataagcgtcattttttaaattttttgatccaaaaatgttgtcgtgaggcggatttgaacctccaccatttttcccttttgttgagttatggacatgcaaaagcaaactctaaatagaacaaataaataaatataatccctacttaagctgcgcaccagctaaaacaataaaa

SEQ ID NO: 15805 - DNA, 1732 bp, Heterodera glycines
tctatagaatagtccgctcttccgtttggcttgcatttgtcgtcctccgccccctttcccctcccctctccgtgccatcgtcggtcccttcttccgatttgttggtcaatccgctgtgtgaaatgccaattttcaatgccttttaaaatgccattttacgtctgaactcggatcattgccaaatgaaatgccaacacgggaccaagcaacacaatgcgaagcttttgtctgtagatcagctgttgttgtttgttgtaatatgaagtctcaatgcaaaatgccaaaatagacagagacgaaccgatggagaaaaggaaaaatatgccgaacattgcgatgagatcttcaaaaaaggtccaaattgggtgaattcccttcggtacttggcattttctattggttttcgcctcttcaatagcaaagggtcggatgcgaatggcatttctttggatatttcgccatttcaaaatgtctttgactccgctcacccaatggcttcatctccgggttctctccgcgtcctctccgttttgcgaattgcttgtcatacagacgagtggccttgtccttcctgaagccgggtgtctttttttaattctcttattatttgactaattattttttaattagtctctttcacccgatgcattccgcgggccgttcgccatcctcaaatcggtacccgtacagcatatactttcggtaagtgcgtcgaataaagtcgcggttcatcactattgctctgttctgcataaatgcggaaatagctgtttaattaactttggtagtttgggcttactaatgctggcaaaatggccgcatttttggcgaatataaaatgtgccggcattgatggcaatccgtcgcttataagcgcaaaattgcatcgactgcgcacgctcacctgagagcaaaaagacgaccaaagttaaaggacaccgactaattaagtgaatcggctaattaatggaccagttaattgagtggtcaaccgttaattggtcaattagcccaaaacccctcaaaatggtcagttgttctcctttcccaatgttaatgagtggtccttgccatggtcatgctgttctcctgaatcggcgaaatgtacccgcccttctccacaaatttgaccacctccattatgttcttcgtttccacaatgttttccccaatcgccgctctcagtgacatttcgtacgaactgttggccatgagaatttcttcgaaatacctacaacggtcagtcagccaattcattgtttatcaattacctttttactcttgctaattttcctcatttttccctttgtcattcactaattgcggtttcaacccaaaaacacaccacacaaaacgtcaccaccccaaaagtttaccaatccaaaacgaacgtcaccaattccaaatgtaacaaacagcccagcagaacgtcgttttggtgggatgagttttaaaatatattttttttaatattcgtgaagacatgtttcctatggttttcggggtcaatgaacacgaatcggcacccccttttttgcgaattctgtccatatttctggctaattaattttaatcttaaaaatggtatttcttacaattagttagatttattgttttttttaattttgtgacgtttttgattgatgaaattttgagtttgtggcattttggctggtgaccttttggaatggtgacgtttgagttggtggcattttggctggtgaccttttgg

SEQ ID NO: 15806 - DNA, 265 bp, Heterodera glycines
ttatcagcattggtcattagcctatcaattatcacctttttctctctttgccattctccgccgaatgtgactaatctttttttgtaaataaatgcttgtaaattagctgtcggttttggtatgttaagaggggagaaggaaaagaagaagatttacatgaaattgcgagcggtgcgatgagtgcgccgccccggggcaaattggggacgaatgaatgcgcttttggcttttgctttgtgctaattgccttccccggggggggggg

SEQ ID NO: 15807 - DNA, 3262 bp, Heterodera glycines
actaattacttaattactactcatttaccatctccttcgttctgatcactttccctaattggtgtttacaaaattcacatttaccctacctacttttattgcgctcatttaaggccatccacgtgggccatcccggctttgatttggccgcgtcactccatttgaagcccaccgatttggtgcttttcgccgctttttcttccggcgaagggcccgaaaggaatgtgagcagaagagactcggcaatttgtgcgtattcgctacgacaaatcgaagccaaattcttcgagaacattcgcttgtgttacaacggaaacacgcgaactgtgagaacaatttccattttggaacaatcattacttggcattttaaacagaatttgccttggtttaattcggacaaaatgtgcaccgccacgcgttaccccgactcggagataatgtgcggaaaggtgcgatttgttggattagggggaggggatcgaggggtcattagttgtttaatggtccctcaattaactcgttaattgcctctatttgccgtttctttcattgttttttctcatctttgttattatcccacaaaaattgttcataggatgtaaacagttacatcggaggcgaaattcccatctccgcgcgcgctttgctcgtcgaccgcaccgcccaaatcaccgctttggccgtcacttccgtccaaaccgcaacagtcgcattcgttggcacttctgacggcgttttgcacaaagtcaaagagagggaaagggaaatggcaaaacaaaaggaaatgtccaaatgttaagacactgattgagggcgaagagggaaagtcgcgcattttcaactccgtccaactgagtccggacggacagccgctgctcggcgacatcgaattggacgagaagaacggactgctctatgcgatgagtgcggaagctgtttataaggtgggcaaattaatggactaacaacgagaaaactccatatgaccataattagctctaattgcccaattaaggaatggacatagggtatttaatgggtgccgtttctcttcaggtgaatgtgcgtctttgtgcccagtctcccgattgccattcttgccttcgtgccggtgaccccttttgcggttggtgccttaagccttccgcttgtaccactcaggtcaaccaacgcattcaatattattgccaatccgtctgtttttgtttttcaggaggtgtgcgacgcggatgcgctgaacccccgcgcggattggctcaattacaaatcgggccgatgtccgttgtgagttttggcactttttcgattggcatttctttgattggtattttcaactgattttgccaatgatttatccgctctcttttcagcatccgttccattgaaccgcgtgaacaacaaattaccatctctcgtcctctccacgttcgcattgaaaacgctccgcccgctttggccggccaaaatggcgggacaacggcgggcagcagcgaattgtactgctcgttcatgttccccaatcaacaattggtcaatgtcagcgccttgtcacgcgacaccgatcagtgagtgccattcatttgaatttaccataaaaaatgccatcccatacaaaccgcacccctctctctccccctctccaaagggtcgtttgtgcgtcacccactcgcccttcgttgctccctttggtcgccgcggggcaatcgtcgccgcaggcgttggcggacatcgcacggcacggactgctcgcgcgactgtccgttgtgcaggcggcggacgcggcggtgctcgcctcgaccaacttcacctttttcgactgtcaacagctgagctcagtgcgttcgtcccactttgcttcctcccaatgcttttcctcccccttttttagtgttccgcttgcgcttccgcgcgtttcccctgcgattggtgcgctttgtccgcgcgatgtgtgccaaatgcggaggacgtgtgccaaggagagacgctggtcaactcgatcagcgtaggctttacttcgcaaagccttcattattcgcttcccatttagcgagttggcccttcttctcgccgtggccctgagttttgcccccatttcactgtccccggcggtgatcagtacctttcgtccggaaagcgtcgctccgtgtcagtgaaagcgcacaatctccacgaccaaatgagcgcgttcaaatgccgttattcactggaatcgtcggctggcgtagtgcatgagaaattggcacaacggcaggaggacaaaataatgtgaggggggggggggcgagaggggaggggagggtgaagaggaaaggggaggaaaagggcattcgctgcattaaaagaaagagagagaaacatggaccaacagagaccatttcgttcagttgtgaagacatgcttttcgaattttcgggtcccggtgatggcaatggcactgttgtcgcccgtttcgacatcctttgggcttcatcgtccgaccaaaatgccaaccaattccatccgttggacaatgcgcagggaatgcgaatggtccgtagttatttttttccaattacaaactcacttttcactcactcattcattgctcagatcatctacaaatgcgcacaattggcatcaaattgtggcatttgtttggggttggatgagcgccgcttcgactgcggatggtgcgacgaggagacgcaatgtgtgccgaaggacaattgcgacaaagggggtaagttttggagggggggggggtggtgagttttgatgatgtaacagcgttggcggcggagatagggcgatttgataataaattggacgaggtaattggcgaattcgttttgtgccaccgaatacgcatttttgagaatgggctccatgagaacatgcaatatttggatggaaatttcccttaagctttacgaatgataacgggccaaaaaaagaacaattcacttttccaagctgttgttggcattcgcagtgccatggacgagttggacgacattttcaaggacgaattggatcacacgacagccgtacttattctgcaaaaaagacacgcaatcagtcaactaaacagtcaacgaaggaatatcctggtgaatgattctatcgacgtgacgggatttaacttccctcccaattctttggattgtctatacctcctcatccactaccctcccctcaatcgaaattcgaaaacggcgctccagcgggtgggacagttgggcaaggcgaggataaaaaggccgtacccctcgggcgcaaaa

SEQ ID NO: 15808 - DNA, 1719 bp, Heterodera glycines
aaccgtagcatatcatcgcaatcttatattatcaatatgtattctgtgtttttgaagtgtgtataaattatttacgaactgtgataaaattaaaatatatttattaatgtagagattttcataaggttcttaacaaaaataacaaatatgggaaattgcaaaagtattgaacagaatggaaaaagttttttataaataacccattaaaattaaaattatcctgataaaattaaattttacatgttttgctaatttataaatttttgatttttaaaaattatttatctcaatttttgaataaattttgtcattttacacccctaaattttaagatttttagagcctattttccatgtttagtgccttttttgctgtttttatagcctaaaatatgccttcgcgggggtaccttctacccctgctgaagtcgccagcgagaagcacatttaccaccaaacaactcgttgatgcttttagttcccgtattttaatctcggcgctattggtgcttcgtcaattacaaaaacaatctttattatttctgctgctgctttattattattattattattagggatacggtttttaggatttaacctatttttccctgagctcccattgacctgaaaagcacgaaaaacatttttttgttgattgttaagctacttttcgagttactcgtgcctattttatagttatttattttagagcctaaaaagccttaaaaaattttgaaaaaactattttggcgttttgcccaaaattattaacaaaaattcaataaaaacgaaaatcacccttaagaatcgaactgaaattttttttcaaatacacccccaaagaatggacaaaaaaatttctgaaaatctaccccccccctaataaatgaaaaattttctcaacattcatctccaaaatttttgacaagaatttttgattttagatcccctaaatttgaaaactttggcaactattttcccttttagcacctattttttcatttttttaacctaaaaactaaatattttggcagtttttaacaccctaaaaatcatatccctagttctaatcaaggatttattaactttcttttcgtgtttttattaatgagcttccagcagcacaaaagttccatccgcatatttttgtgcgccatttattatttttttctcgagttgttggtctcgatcggacggacgaaaggagcatggcttatcaaatatttgttttcaaaatttgtgcgactgcagttaaaattaatttttaaataaaatatgcgaaatataaaaatgcgtatctgggtcaaattttcccggtcggggtcgttttcgcgccgtcgttttcgcgctgacgttttcgcgccaggttcgttttcgcgctgtcgttttcgcgcgggggtcgttttcgcgcgggggtcgttttcgcgcggttgcatatatgtaaaataaatatgtgtattcgtgtttttttttttactaaataatgcctaatcttatgtaggcccaaacaagcctagcttaggcctaagcctaggtctaaagcttatgcctagcctatgtacgaaataaaataaaacgatttttcgaatttcaaccacggggggaggcacggtgtttttgagtagataattttcactcagaatttttcaaaaaatagtttttttttagaaaatttatggcgttgataaccaatctctactcacatttgcattacgacatc

SEQ ID NO: 15809 - DNA, 1623 bp, Heterodera glycines
tttgcataattccaaaaaatttgatcaattaagaacaaagttatggccaaaagtacacatgtggcctggttttttgaattcttttagtcataatttttttgagcatcaacgaaattttttgaaacttagcaggctaatagagaacacttagcgaatgataccaataatgttagatttggttgacaaagaaaaaagttatagtccaaaaactgggctggcgccgaaacgagggagggtgtcctttatgatgttacaaaatccatttaaaagtcccggacagcctttgctttttttcggccgcgtttcaacaaatatcccaaaaatttttaagtaaaatttgagaatttctcgcacttttggaatggatcccatcggctccaaataacccaattgtgccagacaatggaacggccttcgctcctggaaccaatttgtgtaaattgagtatgcaattgacaaaatgtaggtgagcgccacacagattttcatgttccttaaattaatgagaataattttcttaaaataattcaacaaatcattatttattctatttaaaaatttaatttaaaatttattttaaaaaaggaattttaattgaaattagtaatgcttaagtttttatttgaattcccaaaattaacggacggacttttcgcagcaaattgtgttgtaaaggcgtgggaacagaaaagcaatgcatcggttgaacgccaattcaatgtaaaaagtgtcaatgcaaaaattgacaaaacgaaaaagaaaggcatccaaagagaatttgacgatgagacgagtgccgatcagatattccagggaaagccaaacgtactcgaacagccagatcagatcgaacacattcttaaagaaaaatgaacacaaattaatgtaataatttaaaatttcgatttatttaaaaaagagaagcggcatttatttatttaattattaatattattttaaaatctttttgactcttccctagagatttgcaggaaatttttgcggttttgattcaatttcttaagagagataaagagttttgaggccggcggtgtcgataggcatcgccgggaaaatgttttttttttggaaatttagaacaactttcgataatattttaaaatacgaaaattgtcctttgatttttttttttttttgataaaattggtcttttttagatagaatatcccggtcgttattcagttgtgacgtcccaaattccaatattcgtcatgcaaatattgtcatttaactttcattttctctttcaaattgatttctataacgcagtaattaaattattttttaaattttaaattcttttgttcacgttcaaaaaatctcttttttttttggaataccaaaactctaaggttaaggcttttggctgtaaaaattctgaaacagcaaatttcatttcccaacactcaaatgttaaaaattatgttcactcacaatgtgaagcagaagcagaaaagcggagcgctgctcggacaggcgccaatttgccggcagcacaaccaattgggacagaatgccaatcgcgtaaatgacgaacaaagcgatggccgtcagtgacagtgtcagactacggtggttggggtcgtcacaaaatgcaccaaa

SEQ ID NO: 15810 - DNA, 1994 bp, Heterodera glycines
ctcgaaccagaggagcccgaacttgagccggaagagctgccggaacttgaaccggaagagccagaactcgagcccgaagagctgccggaacttgagccgctacagcttacgcctgaattcgtttagttccagcaaatggcaacgaatttgggaaaaaccggtggattttttcttgtagtacgaagcaaccatatttccggaggatgtccaacgggacgaaacaccgacctttcaagacaatttatcattaatgtcccgaaattccgcctctttctcacattggcagcagttgtaccggggctcagtgctgagcaggcctcacttttgtcggagattgcccagttggcgtatgaaatcttcaagctgtccagcagagtccaccagctggacatcgagtcagtgttcaagttgccgttgcccgacgcttcgcatgtgccgtactcagtgacgaacacaggcaaacctttagggaagcagtttagatggagaagaagcttcccttgaggagcccggcacgtcccagacaaatattagcacttgccgttgttcacggctgttttgagcttggcaccaagatcattcgtgaagtgactggacgcgtaaaagtggagagtgtaccttaaaagggatgtcgttgttaaggggattgacaattgttttttgtcgttttgatggtcgttcattttgccccccccccccatattggcacactttcagtgtaaaactgatcgaaaacgtacatcagattttggtagtctttgattgggttctgtgatgccacatccacgtcttgggaccatgttggagtgccgagaatgatcacatttttcttgtcaatagctcggatggcagcaatgaccttcagcagatgggttccttttggtcaccaaaaatgttctcttatgactcgcctttttgtggtatggcaccagcacatcggtccacgaaacgctcagcggctcgttgaaatcctcgtacaaaatgtgagggtaggagccgtacgcttgagcaattcgggtgaagaatttgaccttgagaatgttcaaatttgccatttgcctcagtctcggcactaatcaccgcttcgtccggatgtggattgtgggcatgccaatcgacgatcacgtaaatgccattggaaatggccgcttcgatcactgccaccatcagattgtaagccgtgttcgcgtcactcagatagccgccctcgtccacgcccatggccccccggatgacattggcattccaattgcatttgagtgcctatttaacattaacactttgcacattttgatcaaatatgtttggcttcttaatccattttgaaaagtgagtgcttttatggtaccttcactgtgtcagcgttccaaaactgcgggtaccattggtgccagaacagtgagttgccgatcagctgtacgggttgtccgttggcgccgaccaaattggtgccggaaacggacaattggccgaatggcggggcaacagcagtgagagagctaacgagagcagtgcaaagcgcaaaaagcagaaagagtcgagcgagcagatgagttgcttggagtcggcacatttgaacgatgaaagcgaattgaatggcgaacagtcatttgcccgatatttatatgccaatctccacctctaagccgaccgaactcatccgccggttcttggctcactgtgactttgcgtatgaatacgcatatgcccgattttttggaaatgacaaaatcgtgaatagtttagaatctgatactactccccttgcattctttgactcataaaagaacaatttccataaaagcacgattatctcatattttggccatacctgcatcataactaatcattatttctaggctaacaatcgaaatgcaatcgtttctccttctcgtaaatattttgctttgttcaattgtgttgctacatttattgtcaaatgaacatggattggtcaatgccatgccggtaaatatttttataaatttgatggg

SEQ ID NO: 15811 - DNA, 1087 bp, Heterodera glycines
aaattcggcacttatccctttttctgcaacggaagttgcatgggcggcgcagcagaacaatcggttgcaatttacacgaaaaatggaaattataaaaaaaaaataatgcttttttagccgtcgcaatacgccagggctttgttcgacacaacatacgcatattttagagcattgaatcgcacaatggaaaagcgcaaatcgaatgggagggatttgttgcgcaacggcacggaattgaacgcagaaactgccgggacgacctttcagggtgaagtggagaggaagaaaaggaggggggggggtagaagcgaatttgggagaggaaccaatggataaagcctggcaaaatgatggagcattaaggcgagaccggacgcatcacttttgacgcccacggcaaccgccagccgaccttttttgtgacgatgctaaacgcactgaatgtgcccactgttatggtgaaagtgaacattaccaacggagtattggtgcgaatggattaagcggcggcggattcttatttttgaaattcaacagaaaatggaacggctgtacggcagtgaggcgtcgctgtgggtcaattggggcggctttcggccgatgaccacgccgttgtgcggctacaacggcacaatgtgtggccaaaatgtgacggtgtacattctgatcggcgttacgcttatgttgctgttgctggtcgccgctttgcttggcatcggatacgcaattcggtaaacagaggaaaagcatcggactgtgccgatcaaaaattgatttaaaagcaaagccaatggtcgataattggaccaaaaggaatgttaacgccaaaatcactcattaattataaattttaagcttttaatgcattaattggaccgaatttctccgaattggcacaacttaagcccattaatccgccgattttgccatttgcagggagaaaatgcgcgagaagcagcgcctgacacgcgagtgtttgatcccatttgcagagctgcgcaacctgaaagagctgcgcagttcggaggaactgaagtcggagacggagaagagcatgcggagcatgcgtagcagtcagtcgggtgag

SEQ ID NO: 15812 - DNA, 1555 bp, Heterodera glycines
  unsure (1)..(1555): unsure at all n locations
ctgcannggtcccatttttagaaaatccctaaattattcggttttttctcgaatgttttgctttgattgaatttgaattaaaactgaaaaggcaatggattctttcgtcttaggttccacagcaaattccatgggactcatcggaaaacaacgaaaagcaaagcaaaggatgagcgattagagatcggacaaaatgaggcaaaagcaatggatggaagctgcgacaatgcgaagtcggaggatgacaatgcggtggaacagcgagacgaagacgcgcatttatagcgaaagaggggggggggggggggacgaccagtttaagttgcaggatgagaggggggggggtatcagtgctggcgcaaccccaggcgatggtcggccactcattagcttccccccccctcgcccggcttctcataattcctgttctgctgttctttctgttctgttgtgtctgttgttcgtttgcctttggtcgtcccaccgacaaaactttttaattggcctaacaatttcttcttgacgacattccctcccccccctttttttggcttttcatcacgctaatttcctcttcctgctcctctttctgtttttattaatgactttctctcgagggtttgtcagatagcgaaaaaaacggataattgcgacgaaaaaaaaacatttgcagacccacaaagtgtcgtcactcttcagtcagtcattcgttgatttatttattgtattttatttttaccgatttttgtctttttttataatttcaaaattcgaataacaaaacattggttcttcttcttcttctcatttttctcctgaaagcactgtctttgaacacggaataagccaaagtttgctagtttttccgttgtattatttttagacattgtcaaatcattctctgattatttccgtcaaatcattcgacgataacattgacatttatcaatcagtccgttttataatcgaatacacttttattttctatttttaccaattataaattatcacaaaaagaagcaaattgagcaaattggattagagaaagatgggcggtggtggcaattctttattcgttcttcttcctcttcttctgtttcttccttctcctctcgttcttctcttccttttcctcttttcctttttgtttttccttttccttctatcccctccctcgttcctcttctcttttccaattccgtcgctgcttccttcgcctggctgcaagcagagattattttgccgtttgtccactaagagtgcccttgtttaaagcctgtttgaaaaaacattaatggcggatcaaatcacaataaccataaataaatgggtttaggagagcgtttaatagcacacaaatacgaagaagttcaagatggacactgatggtgatttgcagttgtttggagaagaaagttgccaaggcaagaactaaaaaagagaggggaaagagggcattaaaaccggtggaaagaaatggaaggaggaagagagggggagggcgagcgaggggagagagtggaagaggggagagaggggaggggaagagaggggg

SEQ ID NO: 15813 - DNA, 1590 bp, Heterodera glycines
tcggccatggaattggcttgttttttatgcataaattatccccacgccggaggcaatagcaatcgtcaagaagaaattcgcggccaattatcgtttccgaaccccgaacccaaattcgaacaaaaagtcgaaaattcgaaattccaattttcgactttttcgttcaagttcgggattccgaattggtcgaaatggatcgccatattcgtgatcagcgacctcaaaaactcccggatattcatcattatgtgtaaaaaaacaaaaaaaaaattaggccaaaaaaaaaagtgcaaaaaaatttcaaaaaggaccactttccatatagcgcccatttttccgtggttatgaattagtcaaaatggatgtcatattcgagctcagtcatatctaaaaagcctcgagaaatattttcatcttatttgaaaaacaaaaatatttgatgaaaagaaattttgcaaaatttgagttaataattcttaattagcgcatttcggccgatgggagccttgtttcataacttattgtttaattattagggatgcaacttttagtgatttaactatttcgtcactaaaatagtgaaaattcactattttggcgttttgtcactattttttaactatttcgacatttttcagaaattttattagcaaaaatgcaataaagtcaaaaaatacacccctaagaatcgatctaaaaaaatttcaaaaaaataaacccctaagaatcggccaaaaatttttttttaaatacaccactaagaattggaaaattttttcaaaaattcgcccccaaaattttttttcttgacaaaatttttgatttaaaaaatgtcaatatttgctaagagaattttataaaggaaatgtagctcatttgcaactgcaaccagtgaataaaaattatttttgcttaatttttggctgaaaattaggtcactatttgtcactatttcggactttttgccactatttggtcactattttggcatttttactcactattttagttaacgagatttttcgtcactaaaagttgcatccctattaattattatcataccttcaaagtttaatcgtcgctaattggcaagaggattcagtgggtcaaggatttagtcttatgccgcccaattgacaccgaatggaaagtgatgaaaaaacagtgacggagggagggaaaaaacgggggaaggaggggaaaacgtacagtaatgacggaagagagtgcaagttaactggcagagaaaaggaaaaacaaactgttgtatggaagccaacagatcagataagcagcgatgacgtggaccgtcgtgcgaaagattcgcgagcgcatttccaatcgccaggcgggcacagcttaaaaatgaaaaaagaatgaaaagtgcaaaagaacggcacgaacgattcgaatggggcgaagaattggagttgggacagaaattgcactgcgcgaagccatgctgggggaaggaggcgtcagtggcagcggaccctccgacggaagtcgcttcaatggcacaaaaagaggccgaagtgccggcgggggacagagaaagtgccgaagtgggccaactctggctgagttaag

SEQ ID NO: 15814 - DNA, 1137 bp, Heterodera glycines
  unsure (1)..(1137): unsure at all n locations
cgttcgcctataaaactttcctgaaattgggcgaagttttaaaaatgatggcgccaacccccacccaaaccgttgactcttttcggtcgagaaactcaagaacgcgaagtttgtgccaaatggtagtgcactgagaccaatccttcaggtcaatggtcgtccacacgaaccattggggaagagagacgagagcagcacccaaataacaccaaatgatcagacgctggaggaaaagcaaaacaaagtgatcagctgattgaacacccccggccaattcactctgacaaaaagcatttgctgcgagggacggcttattcgaccggtgcgctccattcgcatcagtccgtaaacagtgcggagacgatcaagcgcaatgctgacgactccaaaggacatctttcggttttagtgggtaaaacgggggaaaataacaaaaaaagggggggggaataatggaaaatgccaaaaccaattaattgcaaattttgaagagggaatgtgcaaaaagatcaattaaaaggagtaatttgaatatttggacaagccaaccaaatggaagcagaagtccctaaattggaagtgaaagcgaagaggcaatgaatgggaatctgctgggactgactgaccacgaatattgcatggctttgcaaaggaaagtgccggcactccaagtgtaaccgattagccaggcaatgtgagaagggcaatagcaggcgatgaccagcagatcgaccactgtcaggtgcagtttcagccacaggaaattggtacgcgtcacttcctgctgagaattgaacagaaacagcgggaacgaagcactcggagcagtacccgagagacgcgtgaagttttgcgaggattgaacagcgacgaacggccgctgaactgcttggccagggcgacaatattgagagggagtccgagcagtagcaggacggccagcaacaccaactccacccaatcggtgagcaactgggcaagggatccgttgaaggaattcattctcttttggactcttccggccaaaacccgcccagcttatcgttgccttgaaaggaatggccaattgccatccgctaaatccctttccaattaattctttgaactcgccganttggtgcgctttttctccgactc

SEQ ID NO: 15815 - DNA, 1357 bp, Heterodera glycines
  unsure (1)..(1357): unsure at all n locations
taaattttaaattttacttttcaaaactncggaccaaatttaaaaaatgcactgattgatttaaaaaagaagggtgtggccttttgtttaaccctaaaaattcaaaactcagcccaaattatgtcttcctggcgcagtgtgttcgattccgtgctgatctcattcggcggttggccttcgctggaggcgtcctcagaaccgaacattcgaattcgcatcgaacgcctctacggaataatggcaaaataaaaataaaaatggaaaaatttaaaaaataatttaggtaattaattattgttttttatttacaaattcccataaaagtttatggtttaaaattttttttttcgttttctagtcataaattattattgttttctttttaatggaagggcagtaaaatgtaaatatacctaaattaaattttaaaataaaaatgaaaacacttttaaattaattattttttttctaatttcaggtggccaagttcagagccgactccctcttcaaagcgacggtgcaacccgacgacaaaaactcggacaaacacgtgcttttggtaattattgtacatttacctaactgatcattttaaggaaagtataaaattcaaattttaaaattatttgaaattgttaaaaaaattaaattaaattttcaaaaaatattttttcaattttcttttcttttttattttattaaatgggaagaattttgcctcttcagattgaccagccggcactgaacctttttgcccgcgacttttacatgcttttggagacggaggacgaaaggctggcctaccggacattgtaaatttgaatatatgaaatccattaaattttcaaattttttgagttttgtagaattcgtgacgttttggtgctgctgggcgctgacccgcgaattgcggagcgcgactcgctggagattctgcagtttgagacggagttggccaatgtcagttgtggcactttttcaaaaaccgaaaccccctccctttttttgggaaaatttggcccattttgccagcaaattttgataatttttctgagttaaatttagccgagaattatttcggttattgctgccaatttgcaaataaaatatttcattttaaattttcacattttgtggaattggttaagtcagtgatggcacttttggaaaaagaaatcccttttttgggcatttgccaatttggtaacaaattttgcaggccccgaccaaagccaaaaattttttaacaccctattaaagtgcaaaattcatttttacctgatcagaagcctataaatgcataagaaattgatgaattgattttttttaacgaaaatgacattgccaaaatgatttt

SEQ ID NO: 15816 - DNA, 1878 bp, Heterodera glycines
aggacaaagttccaattttatgaaatgtatcagcgcgacattttggaaggaattggaatgcccgtggacagaaccaggcaaaaaaatggggagaattaattaattgaaaaaaatgggaaattaattaatggaaaaaatgggaaattaattaattgaaaaaatgggaaattaattaattgggaatggaatcagaaaaattcaaagttattggcaaaaataaatatggaaaaataaatttaaccataataaaagttagaattgcacgttgaaagaaaaataccattaaatgaggacaaaaaatcagaaaaatgtcattaattggcaaaaaatgggaaaattaaaattgacctaattggatttatttgtataaattgaaaggcataattttgcacaaataaattttatctaatgaattaattaattaattgatttccttccttttaattgtttgtttgttcagatgggtcgccggcgccgctttggttaatgcgttttattcgccgaataccaacgaaatcagttaaattaaaaaaaaattaaattaaaatttttatttaaaagaaaatgattaattaattacccattaaatttgctttttgtcttaatgggttttcgtttcagttttcccggccggcattcttcagcccgtcttttacaacaaacattttccacgctcaatgaattttggcggcatcggagtggtaattggacatgaaataacgcacggtaagtgccgaaaaattctgtaaattactgtaatgcagttatattttttgtataacaattaaaaaataatctccacaggttttgacgatcggggccgactctacgatcagtatgggaacattcggcaatggtggtaagattttttgcattaatttttgttggcattttgtcacttttttaatttaaaaaatttgagggacaatgcaacaattgtcaaatttgaagagaaggccaaatgcattgaagatcaggtgaaaatgaatgagggaatggtgtaataaaaattcaattaaaatttgagaaaattaaatttcttcctcagattttatacaaaaaaaatgagttaaaacaaataaattggaattaatataaattttactgattttgtttttttagtattccaattacattttggaccaaatttcaatgaaaatcaacgggcggagtacaaaaggggaaaacattgcggacaatggcggactgaaacaaggcaattaattaattaataattaattaaacataattgttttttcattttttcacccaatgcttcggttaattaatgtaaaaatgatcttaaattatttaccattttagcttatcgtgcctacaaaaagtacgaacgctttcacacaatgccgcagcaattgcccggcgtcaatctgacccaggatcagctgtttttcctgaattatgcgcaggtaaaattcggggaaagtttttccaatttgatttaatatttaataaaatttaatttaaatccacagatttggtgtggcattatgaacgacaaagaggccattcgcaaattgagaacgtccgaacattcgcccgggccaattcggtaattggacgggcagttttttattttgcgggaaatacagtaattgaaagtcgggacagaaaattttgcaaaaattttcaaaatttgcaggctccaagtatttttcgaccaggcacatagcaaatttaggagggagaatccgaataccttttgttgctcttcggatttttttttcagtattattttaaaaatggcagtgccgggaagaaaaagcaggcatttgtatccgcttttcgccaaaaaatgaacaaatttctgccattttgggtttaaaattttaaaaaataaggtaaaatgggggttcggcg

SEQ ID NO: 15817 - DNA, 1363 bp, Heterodera glycines
  unsure (1)..(1363): unsure at all n locations
tatttgagtgaaatggcatcgcttaatggcttttccttaaactttatgccgcagcgagaagagaaacgccangnngccttaactttaaagatggtnacggatattatgaggaaattaataaaagaattttcaatattaaaaaaaatggattccctgtggcatttttttaaaaataaaaaccaaattaaaattaatttttttaaagtctaaaaaaataattaaaaaatttttttagtcagttaaaaaataacatattcaatcttacaataaatttttaaaagcatattttaatataaagaaaaaatcaaagactttcttaaacacataatttcattgtcattattttaaataaaattcaaaaacaaataaataattttttatcatttatacagtttaaaaataatataacaaatttatatttaaatcataaatgatatatttatttttatataatttttttttttaattttttgaacaaaaatttaaaagcctagcttaaataatgcaaatattccattaaatttcaataaataataataaatatttttttcaaattgttattttgaattataaaaaattttctttgtgtgaatttttgcgcatatttctctccgccgccgatgcgttttgttcttcctcatgctccaaaatcaaacaaattcgcgaacaccaccacaaaaatgctttaagagctaaaaagtgataaattatactcaccatgacaaccaaattactgacataaaatgtaaatgacgaatgttcttcgtttcggtggtcgcttatgaaaggcaaataattaaaatgcatggaaatatttatgggaaaaatgccggaaatattagagaaaaatttaaaataataataaataaatttaaataaaatgggtttatttattcaatattttttgttatgcccttaatttttgaactaaaattaaattaaatatcgaaataacatttaagattggagaaatcaaatttattaaaaaaaaataaatgaattaaaaaagaacaatcaaaaatattttaaaaagagaggataattataaaatattacaaataataatttagaaattaaaaataaaaacaaaatttggaatttagatgatttttgaatttaaataaataaataaaagcaaaaaatatattaaaatatatttgcttgccgttttcataaaaaaaataattgccaaaaaatataacaaataaaaaaagcaccatcttttttacacttcgccaaactataatggttccgnttgttattggttgctctgtacataccataccaactacataaaaaaaaagtcaagtanattttccgtgacggtttctgcgcgccaaaacttttttttttcaaaagtaaa

SEQ ID NO: 15818 - DNA, 3288 bp, Heterodera glycines
  unsure (1)..(3288): unsure at all n locations
attacttatttttaatttatttttgaataaattttattttattcctttgattattatttattatccatttgagaaatacaattattcaaatgctaccaaattaaaattatcgttcattttttatattttcatatttaaatgactaaatagaaaatatttaaaattatagagaaaattttgaaagtagaatcattgatggctaagtctgaaattttgccatttaagttgtcatttttttttggcattggcatccccaaaatcataattattattatttttttaattttaaataaaaatcggacacaagaaaacttcgtagaatttaattgcaatgaaatttttttaaattttttaatcatacaataattaattaagataataatgttcactgtgtactcaattgtccacctcctgctgacgtgctgccttttgctggccataacagacgtggtcattagtgatccactgccacaaaatgcaacggttgctgatcaaccaacagaaacgctgaccaatcagactgtcaccgcagaaacaacagcagcaactgaatcaaccgcggaaacggtaattgcagatcaattactgtagcaacaattttttctcatcattcaatgccttccagacaattgccacaacagcaactgatcagcagaacgttacggtcaatgagagcattgagacggtaagagaaaatatcagcatataaaacaactgatcattgaaccgtaacccattttaagacagtaactcaaacggcatctggtccgactactgtcatcaattcgaccagcactgaaccggtggaactgatcgccgatgtcgacggcggaactgatcaagcccttcaaacatttaatacaacagcgcaacaaagtgatctgggcaacatgcaactgttcaggtgatcatgatgctggtatacggtattgatcagccataaaatcaaaaatttcagtcaccagtgcttacatccgagattgatcagcagaatgttacactgcagaatgccaccgttattgaacctgttgctttgatcgctgcaactgtaaacggcactgatcaagcagccgctcaaacacttttcaatgcaacagctcaacaaattgatcagaacaacaacacaactgtaatggtatgatgtgtttaatcacttttttacagtaaccgattttcgctcttttactgtaaatttagtacggtcacgatcagaaattgaaaaaaaacacctttaagccgttgcttgcttcgacaaatgagccgaacattacgctcaatttcactgttgaatcaatgcatctgatcacggacaatgggaccgatcagaatcgtactgatgaggccggagctgcgggtccttcagttgctggtggcgaactgggaggtatattcttgaaaaaatattcaataaataattttaacaaagtaatataatttaattaataattccaattaattaataaaaaggaattttaacaacttcatctcatggacaattaattatgtacttagttcattaataatttaataataaaataaacattggattcaacaataattaatggacgctcaataattgttattattgttcaaaaaatcatataaattatgatcaaaaataaattgttaaatatcattaaagaaagcaaaaattatgattaatagaaacgaattcaattaattataatttttttcttcaggcgaagtgccgcttgtgtcttcagggcaggcggacgaacaaaatgccaaaaatgagagtgccagtttaaacgggactgccagcgctgtgtcatccggaactgtagttgacacaaccaaattcataccacatggggacgacgattgttggacagaccaaaatggggaggacacaccacggtggtttgccaacggggaccaggtatttattaacattaattaggtataattagtcaattaattaattaattatacaccaatttatgtcctattcgcacagattgagcgcggcattgtgtggtacgagtgccaaaagggaaagcttgtgacacaaggatgtattgacgagaatgggcaagtttaaaaataattttattacaaaaagttttttttacagtaagcgcctgaaattaaacggtacctaccagttccgggcgttaccgtatgaaatgtatgccgtttggcgagaatgcgcgtcgacaagggatccggctgtgtgccggacggacaattggacaaaacgtacctgcggggcgaaaagttgngtgaacagcgaggtaattagcaatattttaaatgggcaagtaaaaataataattaaattgtgtgtgtagaaacaaatttggtggcaatgtgtgctggaaaatgcgtggcttggcggttgcgttgatgaagcaagtggcaatcggttaaatgttggcgatgccattgaccgcaatttgactacgtatgaatttatttcatttttcaccgttttgccaaaattggcattttgaattcagttacgaatgccaacacaaacatttttgacggtttccgaatggtgcccattggatgcatttttgacggcacccgttacagtgttggattgtattggcaggtataaatataaataaattaataacaatattttagcattatttcatccaatattaacaagaaaaaatattattattgtattaaaaaaaaattctggctcagaatgttttttttctaaaaagatttaaaatattttattatatttatttatgaaatttaaattattaaataactaaaattcttatcataggattaataaaataaatgaaataataattaaaacaaaatttatttgtcaaaatttgcaataaataattttaatgtccttttatatcttagaaaaataattaaataattctattcatgataattaaattcaattaaattattttttatttattttttcaatattaatttaaggacgatgactttgtgttctattgcaaattgcaacaggatgatggtggagctgaagcagcttcttcctcatgcatcgagtttttaaaaaaatgaaattttttttaaattttaccctttcccctcaaaaaaggtgcattcttcgaaatcagcgtttgttcaatgaggaccacgagttccaggatgagcatgccaagaaatgtgcgcaacggttggcacccgaggggtacacaatgtgcacgagatgaacgaaaacagaatgccaatctctcatacaattcttttttttaataaattcattttttaaacttttgaatttttttactgcccattagtttaattaacgcgttaaat

SEQ ID NO: 15819 - DNA, 1223 bp, Heterodera glycines
gaaggaggcaggataacgtggcgatggatgtttctgtctcacaccattcatttcatcccaattcccttcatcgtcactcaccctacactttggtctcctaccgtttgtcgttcagaatggaaaacttgaacttggcgaactcctccttctttttgcattggaccagcaacaaatacacggacaaaaattcgttggactcttttgtcgaggctcttcggctgctggcagtcaccatttggtgtcgtgggggccgtcattgaaccagtgtaatggagcgggaggaatgtgatggaaatcaaaatccacgggcagtgagtgaatcgtattttaaatctttttgtcccaaaatacaaacaatcaacaccaaatcaaaaactgtgaaaaaactcgaacttaaggttttgaaaaagaaacctgaacgtcgaactctccaaaacttcgcccattccctcgtgcaacaaagaaaagttacaaatctaaaaaggggaatatatcattttcaattataaaattcatttgtataattaaagaatagataagtgcaaatcaaaacacaattcaccgtccacacgtagtatacttgcgtgtagtatacttgttggttcatctgttaacaaattacagatatatactaaagaattgtcaataatggagcctaattaatctttcttcaacaaattacattcaatttggattttttgaaaaaatctttaggtaattatatttcaaattatataatttttcgccataattttttttgacgcgatctggcggtgtctttgtgaatcatttgaattcctttgcagtctctccgaattggtaacgctgtacggaggcgacgccgatggcgagaagaattcaccagatgaccaccaacacccaggccaattccaacaaattcgattggacttcttttttgttgttaaacacaaggttaggacgtgatcctgacaggaatgaatctaattcagggcattttttagcgatcttttctaatgaacgattggccatcctcgctacggtaattggcttcataattgacgcatttgtcatcatcgttgttcaagcaaatttctctaatcacccatttgccatcatcgtcgtcgctacagtaatagaaatctcgattaaaaaaggtataaagcggatccaaaggcggctgcctgcgcaacacttcgactgtcgctgcgcctaacacctaaaataataaacgatcaaatgaa

SEQ ID NO: 15820 - DNA, 1310 bp, Heterodera glycines
attttatcttttcgttttacataattaatgcattgtcaaaaagataaaataaatttaaaaattaataaatatattaactgaatattcagaaaaaaatttttttaataaaatttaaaatgcctccaaatttaatttttttttcattttaaaatgatattattgaaaataataaatctaaatttaaaaataaacacccgaacacaagttcccatgtcgggaaatcatttgcgtataatcaatgttgaataataaattataacaattaattataaaacatattacataatgaagctatacaaaagagaaaaaacaaaaatttaagtaaaagttattattaatttgaaataaatcattttaaatattgtttaaatatttctaagtaataaaagattaaatttaattttataatttttaatattattttaaaaacataaaatgcataagaaatgcataagctcgatcagtttttaataaaaagaacattttttaataataaaatatttattttaatattttatttattatttcttaaccaaaaaacaataaaaaataaattccctaacaaaactcgccaacaataatgcacgcacgtaatgggaccaaatgacatgatctaataatttacaagaaaaaattaaataccaatagcataaaataatttacctaaaaggatggcgaggggggaaaggagccgccggactacgacactcctcaagtgaggataagctaatatattcaattaataaatataaaaagtttaataatatatttaatattaaaaaaatagtaaagacaaaaatggaaaatgaattattactaacaaaattaaacctaattaatagcataataaatgtaaataaatgtgttaactcatttctttatggaaaatatatttttattgatattgtgcattaaaaaaagtattttcttgaaatcatttataattagggaacggatttttaggtattacctttttttgcggatagtacttgatgagcgaagcacgaaaaacacattttctccgaacaatttttgatttagagcaaaactttttagcacccaaaaacgggaggggggggggggttagcacgtattttgacattttcgaattttagcacttattttggcatttttcaagaaatttcataacaaaatgcaataaaaacgaaaaatacacccctacgaatcgatcccaaaaaaaataattaaaaaatatacccctaaaaattgaccaaaatttcagaaaatatacccataagaaatgaaaaattttctcaaaaatttgtctcaaaatttatttatttattttc

SEQ ID NO: 15821 - DNA, 2467 bp, Heterodera glycines
agttacctgaataaaagagtacatatttaatcaaattaaatctaattttataataaataaataataaataaaataaatttattttttattaataaatatgaacaaaacaattaaaataagaataagaattaaaaaagattcattcaattatttataaatatttaatttaaaaaaccgaaaatttaattaattataacttattagatataccatataataataaaaaaaaagaaaaaagtttaaattttatatattgaaataattattttcgtaataatttgattttgaatagttgaaaactttaaaataaatattaaatctgttatttttgaatattttctaaaaatattccataaaatttgcattatatattcgattgctttttcttctccaatttaaaaattgtcatctccctttatggttgaaaatttactccaaaatttgtcttcacccgcttccttttgaattgttttcctaaataattatcaaacaactgcttttacacattatcaaatcactgcttttacactatttgcctttttgcagaaacacgaaatctctagtaaatgaaaataaataaacaattttaaattttgaatattttatttaaaattgatagaaattagaaaatgatgaaattaaaatgataaaataatagtcattatcaacttaataaaaaatatatattatttttaatagtcaaattgctaaaatatttatgaaacattttattgtaataaaagtgaaatttttaaataatcctatcaatcgcggattataaaagatttatttattttatttgtaaatattatatttaaattcttaaattaatcacaaaatatttaatggtttaattatgtttttaaaattcaaaaattatgagaaaataacaaaagtataattctccaccttcattagattgatcttatgaaaattgctcattcattcatctctgaacttcgcattaaaaattaataaaaaatgattgctcctaaatttattaattaaaaaataaataaataccgaattatcggatattttcagcaaagttacaaaaagtgatcctttttgaagccacaataaatatgataagctaagaataattgtaaaaaatgaaaaaaaaattataaatcagcgaaaatatttgaagaatacataaattttattaaaagctgtagtaatttttgaataaaaataataataaaataacagagataaaaaggaattttaaaagggcacatataaaatgaattgattctttattttgtaaaacttttaatttatgaaaagaaaagcataaaaaataatagacataaaaattaatcgtaacaaatttaaaaacgaataatatctgataaaattcaaatgaataactaaaaaataataacataaaaccaaaaaattgaaaaaaatatacatataatattataaaacctttttattataattaatattaatttatagaataaaattttagtatgactgtgacttatgtataatcaaataatttttatcttaaaatttattgaaacatttttttattggcatcagaaaaataaaatctgctcatgcagtaaatcaattatcagaaaactttaaaataatcattaatattaaaaaatgaatatattattaacttacttaccgcttatttaatttattgttagcgaaaacatacggaaaacgaaaaaataaatgatataaaattaaattaaataaaaaataataataataaatttttaatttaataaatatgttactattcttaaatgatacgttatttaatcaagtttttaattttttattaatttttattttatttaaatttttattaattatttattaaaatatcgcatgaaaattcggagacgcctgaaaccaaagaaataaaaaacaaaaatgtgatataaaaagaattttttatgctaaaagttgtttaaaaatatcccattaaacaaaccgaattaaaccatgaaaatgataaattttaggtaaaaaatttatcatttgaagcctggtaacagtttcaattatatttatcatttaattatgatcatataaatttaaaagcgttaatagaatttaattatctcataattacctcgagcagtacgagaaaaaataccaagattatttaaatgccaaatatttcactgtaatttaagaagcagttggattcatttaatatttttaattacattattctcacaattctactaattaattattaataaaaaatatattgttattaaaaattagaaattgttttaaaaaaaatagttttaatacacattctgttacgcaaaataaaacttttattaaataaaacaatttatcaattagtgatagctaataaatgtgattaaaattataaaaaggcaaaatattgattaataagaaaatgaataaacaattcacattaataaagtatgaaaaaacaaaataataaaatgaatagaaatagaca

SEQ ID NO: 15822 - DNA, 2398 bp, Heterodera glycines
ggtccggtcctgcaaaaatttttgaattctaatcctgcaacaggatccgcaaatttgaaatttccgggctctagtgattagaaaccagaaatatgaacatttgaggatggaatcaaaatttaggccaaacttagtccgccgaagtttcaaaatttgagatatttccagtaaaaactgtgtaaattttaaatttctaaggtttctacccaatttttttctggatttttcaacttttaagtcaatttcaataaaaagatttgaaaatttttaaattttgtaaattttctatccagtttttttccgatgaattatcaatttcttataataaaaaaaatcattaaaaattcaacgctgcaacatgggaatatgttaatttaattaattaatttaattaaaaaactcagattttgttaattaattacttgcaaggcatatttgaccccaatgaacggctctcgtcgcgcgcggattgtcgcggtcgaaggcgactccatcagaacgcgttgtccttgttgagcatgttggtcatgctgcacactttgctgatcatctgctacttctcctatgaatagagtaatgataagtagtgaattaattcttaaatatttgatcaaaatgcccggtaaattttgcaacaaacacagtgaataaaatgtgtttgtgccaaaatcaattctcatctaatcagacagtctcatcaagcaacaaaaatagtgaaaaaaactgagcagtgttttgaaatttttttaggtccaaaaattgtatatcaaattctgattagacagaaatcatggtaacaaaaaaaatactgcaactgatcagtataagaaaattaatttgtccaaaaaagagtatacagtttagcgtcaattattcattatccaaatttctgctgtcacaaatttcagaccagccatgagaaataagcttttaaaaatttataaattttttctgtcccaaaaggatgatcaaaatgagcttgatctatgtgcaaacaaagatatgacacgcgttagccattagcagactgactgactctcgattgtcgggatcacggccggcactttgatgaacaccacgttgtccatgccgagcctggccaagcgccgccgcctcttttcatgcttttcctccggcatagctgccaacaaagcgttgccatccaattttcttccggccacaactcgttggcacactgacgacgcctccggcacttttgcatgcttttcccggcgtgtttttggcagttttttcttgttggcatttcgtttcttccgcttttcagcctcaggctcattctgctgatctgtcccactttccggtgccactttatcttcctccttctttgcatcttgctgatcagcaacagcagattgaattcgttccgctccgtccaggagtcggacttcaatctttaaaaaggttttaattggcataatttagcgataccggtggcattttgatttataatttacattgtcgatgacatagcgtgccatccttgaatcgatgtgaaatgagccgacaatattctcgcctggcgaatacgcacttttgggcaattgaagttcggcatggattctgtgccgacagcaacagccgcagcagcaacagccgccataccggacctgaaaataaacaacacatactaattgttgccctaaataccgtgctaagtcgtttcctaaaatccgccattttagcgattttttcgacaaaacatggcataacattgcttaaatgcaatcgaattttacatttttggtatcattcgatagccaagctttttctcaattagcatgcaaaatttaaaaaatttggttaaacattagaaaaagttgtatgaaaataagtactatttcttccataactcatgttaagcttgacaattttatttaaagattcgcaagctaatagagaaaaagcttggctatcgaatgataacaagaatctgaaatttgactgcctttaagcaaagttataccatgttttgttgaaaaaatcgctaactaaaatggcggattttactaaacgacctagtacccctaaatactggggttaataagcctcgaccctgagctccccgatccctgctgttctccctttcccgtgaccccaaaatttcttcccgaggggttggagcttaaccctactaaatactgtaaggccataaaagaaatttttgtttttaatggcgattttcagtcgctacagtaacccttcaaagctataccgtctccttgcacgtgatgggctggggttgtggtgggaccaattgatcaagaccgggagaggacccaatggtgaaggccttctttgcgatgaatttgtcctgtaagtggttaatgaaataaaacaattcaagttggttcatgtgtggcaaaatgaaagtatgaca

SEQ ID NO: 15823 - DNA, 798 bp, Heterodera glycines
aaatgggatgaaaatggtaataaatattggaaaaaaaagaaataaaataaaaataatttttaaaatatttattaattttaaataattaaaaaattaatcaaaaaataaaaataaaataaataaaattttaatcgtgaacaaattatttgaacccccacttgccccgccccccttttttgaagccaattcactttttgccaaagtgtcaatccacacaaaacgtccccaaattgacagcccccggccgcccccgcggcggaggtgtcacacccaattaaggggatggactatgatgaaatatgggggcggcagccaaattaatagctgtggtggttggtggtggttgggccttctgttgatgggtatatcatcggtcggtggtggtaattggtagggtagaaaataatgggagattggattggaagagcgcccgggggggggggggagggggtggaggctggtccgaatcggaatggttgttattgttgttggttagttggggattgttgttggcgagagagtaaaatgatcggcgctcactgggtgcaaattggtggagagagggagggagattaagagagattgagagaatagaggagagagatgagaaaaggatatgtaaagaagagtgtgaggatttgaagggagagagagtgtgtcatggagagagcgaaagaaagagatagagtgcaattgttggactgctgagagcgagagagagagagcggcgggtggaacataaaaaagggagttgacgaaaaagatcattccgatcgagaaagaaaatggaatagatca

SEQ ID NO: 15824 - DNA, 1662 bp, Heterodera glycines
  unsure (1)..(1662): unsure at all n locations
tttaccttaaaaaataatatataatttcttaatataaacttatatttttcttagcttaaatttggaatatgacatttaatttatgatcaaattacagaattaagtaaattaaataaaatacctaaatatttattaagcgtgatttctaaaattactaatgaacctttctgaagtaataactcaatattggttttacaaattgattgaaggcattaaatattgtagtaaacatatttattgtcaaaaattggaaattcaccgtaaaaaacaaaatgcgatcaaaggtcagaggttatatctttaaaaaagaaaccaagaatacactcataataatctttctttcaaatttcaaaaacgcaattccgaaaaattaactattcataaaaattgttaaaatatgaattttaaaatttgaatttaaaataaatttattaagagaaacccactcagtaaaattcatataacagaatttttatttatagaaaaatcaaattactatccttagcaggagccttttatgtttgccgaatggcatgaggaaaaatttaaatagaaccaataaataattaaaaaacaaagcagtaataattgtaagtaaaataaaaaatcaaagtaaaattattttcaaaaaaataaacattagtaatacgatttaaaaatatgaaaaaatttacatcaaaaaatttattttcctataaaaaagcattaaattgcaaaaacataatcaaaataaattactcataaaataaaataatagacatccctaaataaccaataataatttaatagaatttatgacaaaattttaaataaccttctgtggtgcaaaaagggcaagcaaggtattggattatgcatgatgtaataacagaaaatataaaaatatataaataaataataaatctaaacagtctacaaaaacgtatgttgatgattaccaatttatataaataattcattaattagaaaccagattgcgtttataccacgaggaaaaatactgggttgcatatatcacatcatgcccatgagaaaaagtaaaatgaaattctagataaataaggaaaaataataattcattttacaaaaatttataaatggatgagaatgttacatataaataaaaatattgagctttttagacaaaataaatgcaatgaaataaaattatttgcaataaaataagtcaaataaaaataaactaaaaattttgcgactttaaataaaagcaaatgacccttttacaatattctgcatataagttgcgaaaataaaaataaattatattttatgcctcgaataataaaaaatgtaaaaaattaagaataaaaaacaataactttataaaagataaaacaatagattattttttaatgattaagaagatataaactaaaatattaatttaatgtaaagctttgaaaattttaaacagaagcactcggagcgcttggtacagaaattcgcctccctatcatgaaattctaatattacagttcttgaaacttcattcggttatatattgaaaataaaatgaaatcaaaatcatattaaaaatttaagtctaaggatttatataaaaaatctaagtttattttanagagagttaactttttcaaagttaaacaaattttgtgagtaacttttgaaggtcttcttttt

SEQ ID NO: 15825 - DNA, 2660 bp, Heterodera glycines
  unsure (1)..(2660): unsure at all n locations
tttttaaataaattatctagtagtttcaaaaaataattatttaatttattttaccatttgaaaaaattggtgatatatctggaattttaaatagcagcaaaaaatgttttttttaattcttttatattactaatttaattctttatttgcaaatgaagtatagaaatgtaaaaatagtttaatgttgcaagatgccacaaatctgaattttcagaaaaaaagatttagccacaatatatgaaaaggacaacaattgagaaataattttataaaactgataaagaaagaaaatattaagaaattaattttattcccaattagtgtaattctaattaatttgatagttcttttagtgattaaaaatagccgataaattttttacttttttctaaattttctaaaattatttaaggattgcaagcacattctgttcaattttgatgaagtaaaaaagaaaaaatgataaaaacataaaataaatatttaattattgacatatcaaaataaattattaactaacagtaaataataaatcttgaacaaactccaatctaattcatatattttttaaataatttaaatgctcatttgatatttattaatatttcctttttcatagataaataattaatattattttatgctagtctatttttaaaatttacatttgtaagaaaaaaggcttaatatatttaaataactaagtattatcatataatcatcaaaattatggaataaaaaatagattcacaatttttttatcattacgataaagaagttaataatagacctagattggtaaattaataaaaaaagcagtgagcgtcgagctagaacagcgtcgggaatcccgacatggcttcacggacacccgcactatgactataagaaatttataatanaattcacaaattanataatcaaaacgttgaataaatgcataaaaataaagattttataaataagaanattaactaattanaacaaagaaaattaatgcaaaaaaataaaggtgtttttcaaaaaagtaaactcaaaaataaagaaaaaatattttaatacattgatggaattcagatgcaaaaatatggaaaataaattgttacaaatacatattaaaacaaaaacttctgaaagcaagaatcgagattgcttggcgtcaacactaaatgtcaagattaaaatgaaaaaatagaaagtttattaaaaatattgataaaatatagtttcaaaaaatgtaacaatacctaaattttccattcctaattattaaattgaacaatatataaaatcatttagcaaaccaaatttaatgtgctaatttaaaaaatattttaaataataaaattcatgcttccagctgataaattgacatgaactgtcagcatataaaatcgaaaagtataaaaaaacatatttgtatattgtaaagaaatctagctaccaagtggattgtaagtttaaagtaggaaaacatgaacaaaataaaagataaatacaaagtgaggaaattatggatttctaacaaaaaaaattaaataatcggatttaatatttacttttaggttctaattataatgaatgaaattgctaaactaaagtaaatatttttaactttcaaaacaaggcaataaaaattaataaatattggatctgcaaaataacctaaaatacttaattatttaacatgacttggatttaaactttttgcaaaaatggacattaaccgttaaagcagacaacctgcaagtgcagcttttggagcactcagttcgcagattacaactttatttgttcaagaaggatcttttcgtgttaaataaaaataataaacactcttaaaatacattttaaaatatatatatatatataaatataatattatcaatgaaattttaaaaaatgattaagtaaagaagaaataagtgtgaggaaactggcaacgatagaaattttttattaaatgcttaaaaattgaaaagaaataataaaaaatacagtacaattaattttttaattgaaaaattataaatttctgaatagaataactcggactaggataattaaatgatatatttccacatcaaatgcaattatttaaaaacaatagttttgatttgtataataatttttttgttaccaaaaagcaaataaccaactttggcttggtcaattaaatttaaaatttaaagatttacctacaaaaaattctattcattttaagaaatattaaataatgttatcttaaataattgatgaactcaaaatttaatatatctatttataaaaaattcactttaatcaggattaatataactttaattaaagaaaggtaaattttattggtgtttttgaaatgaaaaaacaaaaataaataaaaaaattattttttataatctatcaatgttttattggttgaaaatcaataagacttaaacaaaattataaataaataactaaaatcattataagttatgttttatattctgaattcgtattatcattccgaactcttcttgctgacggaataacaagcatttaaaaggaactaaaaataataaaaatgctaaaaattatctaatagaaaataaatgagtaaaagataggttgacttcaattgaaaagataaagataataaaaataatcatcaacttagtgaa

SEQ ID NO: 15826 - DNA, 987 bp, Heterodera glycines
cttttccaaatttttcgctttttaaattttatcaaactgtttttttgatataaatcgaaaaagacattaaaaaaatcgaacaatatcaataaaattataatgtgaaaaatcaaattacgcccatctcggatttatcaatactatatttcgcaatttttttagaaacatgaaaccgaaaaatttctttgttctaatttttccgcttttcgtttgcttttcgatttttgaagggatttcgtcttacaaatgggactcgaaaaacttgccgaacaatgtccatacatttgccggatttatggacgatctttatgaggattacagggtcaaaggacagatgggtgagtgactttattgcagcaaattcaaaaaataattatttaaaatttactctttttaaaataatatattcttaataaattggaaaattaattatttttgaatgcgtttgcttttgaatttaaaaatttttgtataaaattgtcagactttttcagacatacattggctaaaccaaccaaaattgtacacggaaaaaggattttcggataagcaaaaaagaacggttttcaatttgacatttgtaaaatgtgcggcagaaattgcccatttccaagtgcttagccaaaacgacgattcaaaagatgcttatctgaatttaaaagtggttactatcagtgaaataaaacttgtaaaagatgaatttgttggttttttgcattttgaccaaacacttggccaacaaattgcaaaaaaattcaaagacgaaattttttctaaagaaaaacaaattcccgaagaagttgtgcaccaaattcagcaattggccttctcatttgccgcccgagtcattctcagcataatgtaaaacattgaaatttttaaaattaatttgaaaatcgtaaacatttattttattggcatgagacgcaaaatcattgccagagaaaaattcttttttaatttcataatttttttgaaaattttgaa

SEQ ID NO: 15827 - DNA, 2520 bp, Heterodera glycines
aagcacgaagctcgaagtttttaggaaaaataatttttcactaacaaaattttagtggggtggtaaaaattatttgtaacaaaaattaggatcatatctaggctgtaagaggccgaaaatttcactagattcgagaccgagatcgaaaatcccgagacttttttaattttttaaaaaaattttcgtattcacttttgtataaatttaaatctaatcaactgatttttccacttgccttttttgaggcgcatttttaaagaacttttttttgaggggggggggggggtacggcggtgtctttaggcgccgtcgggaaaaataattgaaattttagcgcactttgttaacagatttaggcaaaaaaatgaaaattttagcgattttaagcctattttttaagaaaaattgggtgttttacgcgttgggggtgaaaagtgttaattttgacctatatattaaaaatatacacttacatcatattttcaaaatgttaatttttggaaattaaaaaaaacaattagtcatagaggaactgatcaaacgcaaaaacaggtaaggaaaccaagagcacaacccactaaaccacgcatgtgacatatttgaaagcaaagaattaataaaataatatcaaaagccaatcattaggggtgtatttttcccgaaacttctggtaaattacccgaagccgaagcgcgaagttcgaagcccaaaaaccgcaaagttttcgaagctcgaagtttcgcccgtctctgcgccggaccccccccccccccctttaccatatttttgaaccaaaatgccaaaaacaattttttggcgaaaaccggcagaaaattttgtaaaatacacccctaacaatcgcaacccttatactggccatgatccgggcaaattggaataggataaccggatttacattcccttaattttttcaaatttttttaatttggtataatatcataacaattttaaataacttaactttgatagatctttcacttatacgtaaaaagcattggaagttatgaagaaaaaggttgtacttggattattgaaaaaccttatttcgggagtcaaaaattggcccaggttcgggctccgagttttttcaaaattcattctctactaattattgtaattttttgcctcaaattaactccttaacaccattttaagaagcaatcaaattgagatggaactgtttaatgagccgttgtggaattatctgagagtttttggaattgatgccaatgtagccttgggtaaagcacattaatatatgtaaatttaaaaaacaaatagttaatttaatttatgcataatatcattttttagacgtgttcaaattttgcaaagaccttcatacagttgtccagaaaaaaattgaagaacataaaaaatctgtatttgataaaatgaatcttcaagttaaaaatgtgacaacagaaatgaaagaatttaaaaatttgaattccattcttaagttagtagaagataaggaaaactcaacggcattggaaaatttttcatcaaattataagggaaaaaatttatctcagaaaaaagaggtattaaaggaactgttggcaattttaatgaaaatctacacggactacagcaatgccagcaaaaaagaaataagcaaaaatgccattcggttgacacattctgggaatgtaactttacgatttggacaaattttatatgaaacgatagagaatttggaaaatttgccggaagaccgcgtgaagtacgatgaaaatgaacaattgctaagcattttgttaccatttgccaaccatttgcttaagcggctctatgaatttcttgaaaggtttgtaaattaagcgcttgggataatttgccacatttggccaaaagtctctgccgttggttaaaatttaaaaatggtttaattaattctgatataaatgggaaacatagaatttttaattactttttaagaaatttaaccgagaaaagcaaaatcagtgatgactttgattttgtgcaaacacttcaaacagttgccgaagagagcacggaattagaggcggagaaacggcaaatgccaatttcggctggagttaatgtgaacttgtttcaattgcttttctcattagcaattcgtttgtgcttactaattgacgaaaaagaaaaattggcaaacaaatatttgccaaaattcgtattcgcgttgaaaatgtgcacaaaagaaactaggtaaaaaataaaattgatttttaatttttatttcgatttttattttattaagcaattaagggttgggaaattttaaatgaaaaagggtgaaaaaatagattgtattaagaattttaattatattggtaaattaactttattaattaagctataacaatttcgaactctttgaacacaaaatgaaaattgatggtaaaaatgtgcacataaatttaagaaattggcatttgccttactttgtgtataagcaaaaagaagatgaatttaaaatggaaaaagaggaaggtaatttttgaa

SEQ ID NO: 15828 - DNA, 1107 bp, Heterodera glycines
agttgctaataactcgaaaagtagtttaacaaccgccgaaaaaaacatgtttttcgtgcatttcaggctcggggagctcaggaaaaaatagtgaaaaaactataaatccgatccctaatgatgacaatatattaattatagattatacaaaaaaaaaaatgaagaattcatttctaatatttttataactatattattttaaatttttaatatttgaatatcgtgttatattaacagtatatattactaaatggtcaacaaccaaccgataatacaaaaaaatataaatataattttatatggagataaagctttaaaatttattttaatatttttattccaataaataataggtttaatgcttgttaaatttataaaattgtactttcaatttttatcattttttttgcgaattttgcataaatagctgttcaacttataaagggattaattaattttaatcgatcaataattattctgtctcaatatttaatggctattatgtatatatactaatatttgactcgataatattggattcgatttgaatttattctattcaatttgaattttttctccataattacattttgtaacgtgaatcttttattattttaatttatttatattattgtatgtaaattaattttagatattttattggttcattaatcaattttattctaattcaattttcatttacattcagatttgaattgtcataagttttttctaataaattcttattaatcttaatttattattcaatccataatttcctttttataatattcatatgattagagctttaggtgcagttttaaaatagtttaattgaagtagaaaaagaattcaattaggtttattaaatgataaaaacattcttttcattcaattcttattgcgaaattagaagacataaatattaaaattgcgaaaaatatgcgggtcaagaacaatataaacgtaagaaaagcaaaaggctgaattttatcaaatatttcggggttttttgccaaatatattttacatattttggtttatttcagtgataatcaatataaattcattaagttttccacaatttattaataaacaaccgctgcg

SEQ ID NO: 15829 - DNA, 2772 bp, Heterodera glycines
  unsure (1)..(2772): unsure at all n locations
taataaacaaataaaatttagtgtcatttcaaataaaataaactacaataacgcgcctaaagaaatagcaaaattgaagttcatcttaaaattatcaaaatttttaactaaataaaaaactaaatatttaataaatgagctaaaaattaaataaatatagtataacataaatgaatattatgtttcaaatgatggactaaaaatttaaataaatgcaaaaatttaattttaaaattatcacttggattgataattttaaatatttaaaaataaaataataaacttaaaaatgaattgggtaaaacaatttttctaccaacagacaaaatgtgacataagaaaataaattttaatttaaaacataaattgtaaatgcaagtaataataaaaattttaaaaaataaatatttaaataaaatttttttttatattttaaagttcatcaataatgctcaattctgttcattttaattttctgaatagaaatttcatatttaaatcttgattttaagcttgaatttttaattattaaaatatttgatttttccttttttgtatcgtgatttagtttttaggttattaaatattggtttcttttataaaccttcttcatatccttttcataaattttcaggtttaattttaaaaaatcaatttggtaatttgaatcttacgttggaattttccgttaacaaagtttttgacagcaaattttctttttgaatattattaaataaatattaaatattttattgttatatttaatttctaatataatttataaagctgccaaattaactaacaagaaagtaaaatttttgaaattataatttttttaaatataaaacagttgggtagccaacgaacatataaatattgcaagaacataattatatttatagatggaagttgtcacacatattacatatattagtgaaaattaattttttgaattagcctcaattttaatattntgtgattttttacanataaatgccaagttaaattaattttatcatcttctcttcttgtttgtttcttaagatatttttatgaaacaacataatctataaaattctcatcaaataattccgcaagaaaagcttttaaagagtattagaattattattattcaaaaaatgtttacattgtttgtgtgcacaattagattatttaactctttttaatatctaaatatttgattcgccagcacaaatatttaatattgaaagttctaaaaaactaaattacataatgaagactccgcgcatttgtgttgagcttcagcagccactgcagcacggagacgcacgtttctataggatgaattacttacaatagaggacgagattaatccggcgaaatgatcattaaggacaaataaatataaacaaattaagaaatagaaaaaagaaattttaagaaatcaaattttatttctaaacattttatgataaaaaataaattaaaattgttttatatataaatattaaatatatcattaaatatacagtgagttttagaaaatttgcaaatatctgtataagaattttgaagtaaatgatttgaaaatgtatacaaaagcaaaagttcattttgaaaatttataaattatggctttgtttctaaaaatttaaagggttctttgatttgtctatgggttgtcttaggtgttcgtaaacaaataaaaatctggttattttagttttcgtagttaaaaaattaaaaaggtgcaaatgtggcagttacctcaaaggtaaattactgtatagtgaacacaaaaaaattaacatttataactaatcctgtacaaattatctgtaatgcgcctaatttgagattattatcataataaagatataaaggtaataatatattttagcgaaattatatatatgtataaatgaatatattctttaaattaaattaaagtaattagaacaatgcaataggtatcagggttgcggcgggacgagaaaaatatcaggtcgggattcgggtcggcggccaaaaaattatcgggtcgggattcgggatggattcgggttttgggatttgggtcaattacattttttcatatgaaaaatcaataaaaattttctgcgtcgcgcctttttctttcaaagtaaattctcgagtaaggggtctggcggtgccgataggcgccgccttgaaaaaatttgaaaatttgagtgaaatttgataacagattttcaccaaaaattgctaaatttttgcgattttaagccaagcgacgaatttttactttaaaaaatgcctttttacgtcgcttttttctaaaaaattttggggaacctgggccggcggtgccgataggcgccgccggggaaaaatttgntaattataatacgatttgttaatagattttgtcaaaaaaataaccaaatcattgcaagcgacaaatattgaaagggagaaggtatagccactagactacataaacgaaaaaatgctttaaaagaaataaattatttagggtcgggattcggatttcggaacgagaaaaatgtcgtgtttcgggattcgggtggcaaccatgataggtattggatttattcttaaaacagaggtgcgtccttatcttataaatagaattatctatccgacatactaatagtgctattgatttaaaaactttaatcagacaattattaaaaattagtataatctaaaaatataaaaaatagtaaaataaaatctctaaagcatcaccaaaatatgcgcaaaccattcagattcaagcgccaatct

SEQ ID NO: 15830 - DNA, 1466 bp, Heterodera glycines
catagtccaactgggatttcctcccagcaagcgtttttcgatctgagcaaaagcaaaaaatttcgtaacactgagactgcaaacaggggccatttcagcgccgctggcgctcacctggccaccggaccggaaagcccgtatttttcctgaatccgcctcaaaaagttggtcgggacatcgaatttgcaaagcccgcccggcgctcgttaggctcaaaatagcaaaaaagtgcgaaactcgacttctttctataatatataaactagcgggtgtgtgcttacatgtttcttgggtgcttaaagcgcttcgcgctttgggagcttcgctacctaggccttgtgttagggtctttgcgtcagccgacatgcacttggtttcactcacgtgatgagctgacacattgcatttatcagtgcaatggaaaccggaagtgccctaactcgcacgtcatccctcctccctcccttagtccaggtggcagcactttttgtatgtgtatccgtttaaagtgcagatgagaacggggcgacatcagtaaagtgccacacacgctggactataactcgtttgccttattgtaatttgagcatgtttttggccacatcctccctccctttagtccaggtggcagcacttttctgaatgcgtgcatcccttttaaagtgcagatgggaacggggcgacatctataaagtgccgcacactctggactataattctttgctttattgcagtttgagcatttttgttgccacaatattcagcactttgactctgtcttggtcgtcggtcatcctatgaatcgttaaacacccattataatcctttttttttgtctgtaattataagaaaatagtttatttaccaaagacaaaaaagtataaatcaagcaattcacataaaacaatttataaatcagtacgaggttttttcactaagtcttgttcaacagtactattctttcttttcaatgcaattagttccttttgatttacttcaaatgtgacaatggcaaccattctgttgacagttgcacgaacaatctgttcatcagttatcggtttcataacatttgtttcgtttggaatagctttgtgagttagtatattggacatttcatctctgatgacttgtgctaccatccgatgcactacaacatgcacaatctgttcatcagtaaactaaaattttaaaatttaatcatttaaaaaataataggttattaataaaaccaaagcttagaaatgttacaaaaagagctcacctttttctcctgtcctcggcactcaaactgaactaaagaagatggaatgctttgctgaagatctgctttcataacagtaagtgatgatgaagcaattcggggttccgaggatttcacatgtgttctgtaattaaaaagacctatttgatcaagcagtatcatggtatggctacccgtcggatagatttgttccaatttgaaa

SEQ ID NO: 15831 - DNA, 2108 bp, Heterodera glycines
acagctctttcaattttgaagagcttctccctaaagagtgtggtttccccctccaaaaaaaattcaccatttttttgattgcttttccttttctgtgccctcccctcccatcttattttaattgggacctccaacagcgacgaattcctttgctgctaaagaattgccattttccgtcccgtgcccttctttgccccccccccttttactgcctcttccggatcagataatgttgtcgtaccgctagaattctgtatcatcttggtcaaatgttgtcattattggcgtgtttggcgttttgctaatatttgttggcggcgattttcgccgcgacgggccatgttgactacgaatgcttgctttaaaacaaacaaaaagaaattcattttatttggttgagtaaacaaaataaaaaagaaagttttttaagggggtttccttttttggggtttcctattttttttttttgaatttttaagggttttcctgttttttttttgaatgatggcagtttgtaaattggcaatcgtacaacaataagaaaaacccatttttaatggatttaaacttgaaattgtatttattttcttaaattttaaaaattcttatgaaaaattcggcgttagttaaaaagcgttacattttgaaatttttttcacttttttttgaaattttttttttttttacacataatgatgaatattaagcattaacagcacaattatggcgaataaaagtatattcacgatttttaagtatctttttgaaatttttttcacttttttttcaattattaaataacgtgaaatgcgtatcatatattaaaaaaacagattctgcatcaaaaaaaaaaacaaaaaaaatttttgaccaaaaaaaactttcaaaatgtaacgctttttaactagcgccaaaaattctccattttggttgtcatcgaaaaaagctttttcgggctgttaccacctgttttttaacctatttccgaacaattatgtttcataaataaatatatatttttaatttctaaaataataaaattatttatttttggagagggattgcaataaaatgaataaaaaaatcttcttaaaagaaaaaaaactttttccattaaaacaaaaaaaaatttcattaaattaaacgctggcgccttctcaccattatttgccgacgctgtctcctcatccgagtcggtttcggcacaatgcctgaagtggtgttgctcgtcgtcctcgccatccgattgtggatgttgttgttgtccagctttgccatcgctgctgtcatccacttgtttgtcctagaaacccattggaaatttagtttatgtccttgcgaaattttaatttttgggcccaaccacagggtcaatggcagttcgtacaatggcatttggtacaaaaaaaaaattataatttcaattaaaatttttcagttgagggaacttcttctgattttttttgagaaaaaatgtaattctaatttaattaaaaaaattttttttactaacgaattgccatgaaacaatcctcttacaaaaaaaaagtcaaaggtcaaaatattcaaacaaaactgactttatagtctttcattaacaactaaaaaattttatttccaattttctcaaatttttttaaaattttctttgaaagttgtaagaaattaatagaaaaaattaaaaaaagaagaatttgttttttaaagtatatcccacctcagtgcttggctcggcattgccacttttgccgtcccccttcttcttcttcttgttattcttactcaaactcttcaaatagctggcatggcattcatacacagccgatttgtaacattgtcgtgcatttgttgaagttgaactgtttgaaaaattgttagtgtttaaaaacaaaaaaaaaattttaatggtgcaaatcctcctgaatttattgaggggatattgagcggagcaggccccccccccacaccgaaatttttttaaattttcaagtcataagaatttttttgaaaaatttacaaaatttgaaattttatcttaaaattttttttggggggctggagaacgacggggcgaggggaatgtcagactctgatcagtgaccccgggc

SEQ ID NO: 15832 - DNA, 1535 bp, Heterodera glycines
ccaagcggtgaaccaagacaaaacaaatttttgactttgaatccaatctgttgctccgggctgatcaggatttgttccatgaagcctggtatttccaaaattctgtgtgtaaaatttaaaaatttttttttattttttatcgaattttttgattgtattttttttcaccgtttcctgctattgtggaaatcctcaaacaatttgcgctgattgcccgacacactgctgttcatgttctcctcaattgcatttgacacaatttggtcgtacagcaaaaagggtgaccaacgcgtgatgatgtcataggcaatgacggagccaagtgaatggccaacaatggagacggggcctgacaggtttgtaaagcatacaattttgctgtgaccggttaaaaccattgtttatggaaatgcattcattcatgcagtttcccccccccccccaaaaaaaaactataaaatttttttaaaagaaaattttaagaaaaaatttatagcgattttttacaaaattttaggatgaattaaaaaaattgagtttgagaaatccctttctaaaatagaataaaaagcatgattgtactgaaaggatgcgacatatgtcagggaaacatcgcgcatttgggctcgtaaattaaaaaaacgaaaattagaaaaaacccgaatttttggaattttaatttcggggggaacgaacgacctgctccggtaaaggcatccaacaaagaggaaaaaacgcaaaaaaaaaattgtttttttaaatccatccataccatcaaagtttgggttgttggctttgaatgttgtgtaaattgaattcaaacatcgaattacaccgttcacaatctctgtccggtacaacggtgattggtaatacatctataaagatatcaaaataaataaataaaataaaatttaaataaatggaaatacgaccgaccaggtccatcaaagtagaattgagcgtggacctggcaaattccatctgaattttttaaatttttttttggtgtcaaaaatgtcaaaaaaccgacttttggaagtgttgccacatcagtgacaccttaatttttgaaagtaattattacaaatttacaaaataatttttgaaagtaattattacaaatttacaaaatacattgcataatttaattccgattttacataaaaaatcgaattaaaaatatatactttaaaaatgcttaatatcgaaaaaatggggataaagggaaaatgtagaagcataatgtattttccaccttcatccaatgtcaaagccgagcgccattccaccggcaaaacggcgggccgtctcttctcatttggataatttttgtccattaattgcagcatagcctcacgaatttgggccgaatttttggctatcaaattttggtagcccttctggccaatgcctgaaaattgtggaagctttttttataaacatttacatatattcaaaagattttcagtatttttgaactttttgcctctgacttttttttttttgtaaacatacgaaaattttctaaactt

SEQ ID NO: 15833 - DNA, 1463 bp, Heterodera glycines
cgtgtagttcatgatgaacctaataaataattaaagaacaatacatagctaaacaatttgtgagattgtcaatttaccagtcaaggactggagtaagttcgttgggaagagccatgtccagagcaataattccaggggtgaagactacattcagcgcagtgatcgcccctgtctcaaagtgcatcgacacgctgtccgggttgaagtcttgccacacagttcggaactggtggcggtgcgtcaatttcacggcgtacacgcctgattatgtaaatatacaaaaaatatttgaggaaaaataataaaatatcacttgctgtcgctgtttggttgggagttgcgcaaggactggcgtggccacattctgcagtaagcgaatttcaccgtcagcactcggcttgtgaaaagtgtatgaatggccgttgtgctgaagcttggcacggttcctttttgttagaattgtgtccattttcttagctgtaacattagaaattaagtcgattttattctaattcatgataagcatccaaccgctggaaatcttttctatttttgaaatttttaccaaaatttgtgaaactttttttggtatggaaatgaaccaaatacgtgggtaaggaaacggtggtaaggaaacggttggtaaggaaacggctggtaaggaaacggttggtaaggaaacggtggtaaggaaccggtggtaaggaaacggtggtaaggaaatgagtcgatcccagacatatatatatatatacagtatactttaacaatgaaatcctgtttttaactgcttcactgaagctggggcactacataaaatgccgttacataacaaatatgattttgatgaatttacgttaacattcactaaataagtttggtgttaatctccattaattcagaataaatattgttaaaatgaaaataagtgaagaaaccataagaaaacgactccaatcaattaatcaaacacaagaagcagttcaaacatgctcaaaatgggttttacataatcgtgaaatgattgacagaattgccacctgttggatggatatctacaaaaagggtattcatttattcattcctgtcccttaaaacaatgtatgtaatttcagctcctgagaaattacgcatcgcactcatttatttgttgaatgatgttgtgcaaaaagcagcaagcaaaaaggataataatgtaactttggctttgcatccacactggataaacgcaactgcgatgtccaagtagagttgtttttttttatttcttattgtttgtgagcttaattaagtgtaaatgtgaagaaggcgatctcgcggtgcgtggaagttttggaacaaaggaatgtttaccctgctcatatcatagaagaaatgaaagcggcattgggtaactattctaaagacatcgttgagggccacttctttcctttcagttagtagaatagccactgagaaggacg

SEQ ID NO: 15834 - DNA, 1917 bp, Heterodera glycines
  unsure (1)..(1917): unsure at all n locations
tttttaaggttctcaccgaaaaagctcgtgaaatactggccagaagttcttttaactttaaagaatcagtccaatctcgagtgaaaggtctttataagttaacgagcagagaataaatacctttttcagatagagaggaaggagtgaaagcacttgcggacatggatacatcccgacaaaaaatggcctcgtttttggagagcgttgaaaggcatcggcaaaaagggatgaaactcatggaattgatgcaatatgccaaacagaccttcaatttgcagttgagggatgtgaccgtagtgaacgatgtatacatatttaagcgacacatctatagcacataaacgaatgttcaggcttatgaaaagtttgccgaaggaatgcgtgaaacaaaacagcaactcgaaaagatggaaaagtcaggagcgttgaccagtctggacgcaccttcttcgcccccacgagatgcaccatctccaactgctggtgatgacccattcgtacacggagtcgaatgcgatgaggcagtgggagcagaagacatggagatggatgaggagtacggacccggaccgagcagctgttttcttaaatcttccaaggattatgtcgcgtctattcccgccgtacctgaaatggacccacgtttgcaagtaattaaaatttggatatttttaggtattatatggtacacctcaaaaagtcgccgggccggtacatagcgtcgcagcaaaaaataaataatttttaaaaattacctaattttaaggtgttttcaatcaaaattattgttttttttttcggtttttgtttgagttattttattttatcaaatttcaatttctacacatgagatacaagataaaaaaaatttctaggtgtagaattatcaaaatttacctttttaatatatatattttctttatagcgtttggtgaatcaaactatttctgcttgtcaattgtccgacaacagtaatataccaatgccaagcgccagtttaagccgaacaacgctggacccccgtcaattggaccctcgtcaggctcgcttttttcctcctcctcaacaacctccgccacaattaacgcaacatttaaactttccacctccaatcattccaccgcctggtctttctccaccgccagcaacacaaaacgctacacaagatactgccgaaacactgcttaccattgataaatctcaacctccacctcaatttttttcgatgcctccgccacaaattccaaatggaaatggaaatgtcacagttctccatgaaaacgcttcaaattcgcatgggaggggctccactctctcgccaccaattgcgctttttaatccatcaaatcctccgccatcacttatggtatcgcaaaatcttattattttctttagttattttaatttcctaaacttattttcatttagcatatttcacctccttcttctcatatgaatttttcccttacgcatcaatctcttgttgttcaacctcctctgccacttaatcagtttcggacaacaacattgtatcatggaggccaaaaaaggaggaattcctcgggatcaggtacagtattccatgctacaattagtgagatttcataaaattttaattgctttctattagaagcagctggtaatttcaaacaaagacgtgcagcttggtctttttcggctgctgacggtaacgagagaatgcgaggtactaattggcggagtgttggcgaaggtggggaaggaggacgacatcaccgacattgaaaagctgtttttggcatttccttgacggagtttcaatttacaatgattctcatttttggccaaaacagaagcagaaaaaaacgatttttataatacaatttctgggttattngtannggctattctcaaacgattagtaaagtaaccctcact

SEQ ID NO: 15835 - DNA, 2158 bp, Heterodera glycines
aaaaaaaaattattttagctaattaaacgggacgaagatgaattaaaaatatctcacgaccagggacgattatacgggggaggggctgatcccgggagaaacgagctgctcccgaccgaccaggcaaaccgtgtaattgcgtccataaaacccataaattaatttccaactttttgtgccattatatgccaaaggtaatggccaagttttgattgtaaatttttccacgtttgcgagtttatttccctccggttcgcaatacctttttcgcaccattgccctttccgaccgattcaatgcgaacggatggacaatgtttcgcgacgaatgcctccagttgattgggtgtgtccaacgcgttttcgcgagtgactggtccagagaaatccaacaacaactcaaagagatcgtcgcgcttaattcgcaaccaaataatggccacggaaatgcaaaataacaaacctccatattacgattgataaatatcgtgtcgttgatcagtttgaccatcgaagtaaaatccccgaaaaccttggaaaatattaaacatttggcaaaatcaattcgaattttgtgcccatattctctatctggtgagaaaagaaccgttcaagagaaagattaattttgtgcggccaaatttatgtcaagaaaaagaacaaattcagtttttctctctaattttttcagcctccccccctgaaagttagaccgcggaatatttcaagggagactcgaatgcattaaattcggtaaacaattttccgttttgcgtattatcctggattttcactaaattctaaaaatataaacgctttctgaggtatggttaacaattctctataaaaggcaaaattccttcagcggtatctttctgcaccattcgctaaccatggacgttttgtcgggttggatggacgtgttggaactgtcagattcgagtttgatgatttttttgtcaccagttggtttgctcttctcaagacgcacaagtctttgccgattcgcttcgcccaatgtcagttgccggtgccggcactgcaatcggccatttgagtccagcacctgttgtgacgggtaaagtgagtacgggcaccagccgaaagttccaaaatgccaaagatttttttttttttgcatattcatagtctttctgacaatgagctcacaaacgaatggtccggtagtgtcggcaggcggacaaaaaaattttgcaaaatgatttaaaaaaaggaaaatgacccttgcctggcaaaaatatttactttccgtttcaatgcttcgtccaaaaacagcctttgcgtggtgttcgggtcaaccacagtcagcgacaggttgtcaaaaaagccaatttcgacggcctttgccagtgaaatcggttcgcgcattccgtgcaaaagcaccgtcccgtttttcgtgttcaaaatcctttcaacaatcgcctttccgacgttgtaaccatgtaatggcacttcgatggtgccattgttttcgttgtaagcgcccatcaccgcctaaacgaaaaaaatggtataaaaactaacataacctatgcaaatttttaaatttagaccatttcaaaagtttcacttttggcctcttttaaaaaagcacccgacaaactggtaatgccatttttaatcctggccaggtttatgcaattattcctttcttaattcgggccctggctttggcaattcaagggcatcttttgttcttattattttctttacaaactttgtgtccatttcctcgctttttttgttcgtttggcgccttgccagtcgtttctcccttattttaataaaaaatgatcaaattaaaaggaaaaaaacgcatgtttacaaaaaattcacccgacaaaatgtaattcgatatttaaaacaaatatgtaaattgatgtttgggcaaagtacgacaccggagataccctaacaaaaaaccattgtactcgtaataaaaaacattttgttggaaaactacaatttaatacttgactgtgtaaattggcatttagcattccaactcataaagcagaaaaaaatactaaaaaccaaaataataatgtttgagaagaaaacccatgaatttatttatcggttcttccgaaaacaaaccatttttttctcaatcgtctccagtttcaccgagtgattgt

SEQ ID NO: 15836 - DNA, 1882 bp, Heterodera glycines
  unsure (1)..(1882): unsure at all n locations
tgcttccttctcggcttaagcgacactaccgctattttcgtgattcttcacaatcgccgacacaatttgaacggggaacagtcactgaacacgctgctgaaatggtccacgagctgagggaagtcagcgaattccgcgcgatggacggcgacgatgcgccggagggatctttccgcgagacatcagaaattgccgcgattgtctttccgacgtgccggctgcaaattgagtgggcaaacaaaagcacaaaaacagtggaggaatttgaattggtatggccaaaaaagggatgaatcactcattagctttgaatgtagaggaataatttagagtgattaatttctcccctttcttaggatggcagcgatggctttctgcttcggcacttggctttcaactcggaatactccgtccggcttctcaccctcaactcgtcttccgccgatcattcttcccctccccattggctgtctctccacggcacttttctctccatgcattgttcccaagtgtacggctcgggcagtttggaatgcggtgagtatgataccatttatgcggataaagtgagtaatgccgcagatcctgagccagtgcgcgagctcacagttgtaccttcggtggaaaatgggacggcactgatcagttgggagatgcctgaggaattgggaaatattttgctgtacgaagtgaccgttgaggcggtgccggaagtgaatccggacgaacaatgccaagtgaagccgagcgcgcgcattgtgtcagctgtgagtagcgagtttgactagatcagtctcataatgtcagcttaagcagtccaactccgtgctgttttctctcccgcaaaatgccatttgcgagttccttgtccaagtcgtggtaaaatccttctccaagctttagcttggcatatctcatttgtctttgtctcaaaaggtgtacgatttgctcggccgtgacgcgtcctcccagcaacggttcagcttcatccccctcggtgtcagcctttggtcccagccttctccgatgcaattcctcgtccatttggatggctccgtgttggcccttctctccgtcgtcattttcgtcccggtggccgccatggtgacactgatctgcacattctcacgacaaaacactcgaagaaaagccattcgacagaaattgccggggggaattgaatttgggaggaaatcggctaaaggattggaagtgaaaaagcggacgaagaagcagaaacggaaggggcgcgaggccggcaaatcggaggaggcggaggacgaggaacaacgacggaacgccaagccgaaacagtgcaattcgccacagtcgacattgacgacggagtcatccataattgggggaacgtcagccacaatggcaccccaggggatggaaaatagccaaaacattgggaggcaaatggaaaagcacggcgaaaggacaaccggcggaatggccatttggacggacacaattcgaagcaaaacagagccaaacggtgccattgtttgatcagatttttgccaatatttggtgctgttattattattttgtgccgatcggttgccaattaagtgttttttatgttcaaaaatgtaaaactatcgacacaattcgcacttttcgctcatttgttgctcaaccgtccctttgtgaccattaattccccccccccccttttgctgctgatctccccctcaaaatttacaatttattgtacaaatcccaccttttaaatgtaaaattaaacagatgtatttatttatttatttcgcatttttgagaaataaaataatattttttatttcatttcaaagagatcataaaaaccctaattcatagtataaaaattnttattataaattttcatgtttttgcc

SEQ ID NO: 15837 - DNA, 1231 bp, Heterodera glycines
catctgaacagtcattaaggaatcacagcataagcttacatccgtcgtgcaccgttactcgcctggtaattgtcgtcggttgagccaaggcaaacgttgcaattggggagggcgaagctcggatcactgtccatttacaatattatatcaacaattaacgatctgattgctaatcaaacgtgaaaaagttgtgcatcaatcatgtgccgttgttttcggttcgatttggcattggtcggcttttgcccctcctcgccttccccccccccccccggcccgtccctctcctcggcccccatcattatcacttctccccaacctttgcccgtgttttgctttcgctttcccttctcataaattggatttgcttttccttcgttctgcaaaagcaaaaaacattttttttgttgtgaattagggacaaatgaaagtatttgtttactgagaaaaacattcggagaaattcgatttttcattttacgattttttgagcattttttgagtgaaaaaggaggaaaatggcctataaagaacaaaaggtaaacgaggaaaagaatttggcatagaattgaaagaattgaatattattattcattattcagtctccgcaacaacaaaaaatgatccattgacttccgacgaaataagccctaaagaaaagaatgttggtgaagaaagaacggtccaactaattcactgtcctttcattactcagtcgtttattgggcggcagaattaatgatgcgtgccgaaaacggttcgtctacccgaaaaatcgaagtttggcatttggtggcccaaaaagtttgcattttctcgccttttaagacgaaagtcgcttagcaaatggtgagtgaaaacggcagcagaaggatgaacggccatcccaaactcaaaatgccatccccgccttaattaaaagcagccaagcgaataaatttgtcattttgacaggcattaaaacagaaataaaagggaaattcatatgcatcccccccccattcattgatgaacgctttgagactttttggctgcgaatcgtaaggcaccgcaaaaggaattattgaggggaaccaataaaacgcgaattgagaatgggcggcgtgggatgggcacgagttgagggaggggcgacaaattggcaaagtgggacaattcacgcacattggggaggggggaggaagacaagtgacgagagggagtccgacagaagaggggggcgggtatcaat

SEQ ID NO: 15838 - DNA, 1450 bp, Heterodera glycines
  unsure (1)..(1450): unsure at all n locations
aaccaagacccagtcacggtaaagagaccattgatcccaaataatttattcttattgatattaatatatttacgggctaccttcaataatatatttttataataaataaaattatgatatatgcttgtctaagattgatttagtaatgaaaattagactatataataccatttccttcagttttaatacgcacagcaatgttcattataataaattatttgtaatcgattttagttataatttttgttcttcataactcgatcttacagtatttaataataaagacacatctagttatagtttttaactatatattgaaagtagaatggttatcaaatattatggaaataatcttattcgatctacgtgggtctaaatagtaatgtgtgttttgcttctcttgcacgagagaattccattgatgaccagatccgtagttttaatcagtagtcattattccgtaaactctcaaaaaatagagtgatcagctgtaggatcagccgcatccaattcccgtgaagaagccaagctcatcatttatcacaaagcccaaaccgaaaagcgtcaatttctttgagtgcaaaaaactgactgagtgagtgattaatgacagtgcgatcatctcatttttaagagtgtttgatgatcaaactaatactaaatctatcatttaaatatagcatcaatttatttcaaaatggactaaaaacggggcgatcagcggtaaaatgtgatcaggcaccaaattcttgagataaatctaagttctttattacatccaagctgccaaatgagtggctctaaaagagcatggggtagtgatcagaaattagtggactgatcagaaacttagtaaaaacactgatcaaactttacggattccatccaatttgagcataaatagcatcatcaatcattgaataaaaagaggccaagccccttttttccattcatttggggccaaaagtgatcggagcattccaatcaccacccaagcagcaagcagcacacatttcgatgaccaaacctccgtaaaggccattcattcattcattcatttatttgtgtccaaattgcacattagccgcccggccaatcaaaaagggcaaaaaaacaaagttacaactggccattcagaaaaagccacctttttaaatttaaattataataatgctttaggttagtgccgaaaatttttaagtttaagatttccatttttataaattaatggagcatttccatcattaaaaccttatagattggatcggatggatatgcggactcttatgttatatttggctagacccagatttatgtgtattgtaactgatccatcaaaccaaacctagttttatcctggatattcagtccgggtacattttccaaatcaagcagaattctcanaattccattatccaaattaattatctttgaaagtgaacatggaatc

SEQ ID NO: 15839 - DNA, 2237 bp, Heterodera glycines
tttttgcatttttagaaatatttcggccattttttggaaattttcacaagaaaaatgcgaaaaaaagcgaaaaatgcacccctaaagattgactttttgggaataattaaaaaatacacccttaaaaatcgaaatttttttagctttttgtaagaacttttggaaaaattttatttagaaagtaattttgttttagcatataataaaaatttaatttgtaattcaatattttttttaaggagttaaaagccatcttgagtaattttcaaggcatatttttgtgcatatttgggcattttgcgggttatagggcatatttagggatttttagtgcatattttatgcgaatatttgccattttttagtgatacaacttcgatccctactaataacttaaaaattcaatttattttatgattcaatataaattaatttttaaaaaaatgctattattacttttataataaaacaaatttattaattatgtttttcaatttattattttcacattataaaatcttgcttttaaaaataaatggtcaatcaggtataaagccgatcgcttaataattgtaattttccggttgcaaattgatgacttggccacagcaaatcggatcattgccgtacattgtcgaaattggtcccaaatgaagttccaatgggcctgttgttatgcgatggacgaactgcttgaagacgacagaatcttcgacaagaacagacgaagagcattcaggcattggattattcaaattttataaatccaaaaagtcttaaatttaaattctctacttagtcattatttttattttaggctaattattttttcagaaattaaataatttttaatacagaatacaaaatcttagtttttaagaagttttcccttttcttgatcatataaatgatcaatcagaatgctcgttcacctgttattttttctcatagtaataattagtaatgtttcgggcactaattgattgattgattgattaattattggtccatcgatcaattgcttccgtgatctccgctgataaaatgcttcttggcactgctttagggccaagcttgacgctcatccggtgtaccatttttggcttcgtgtgttggaggaccgtcgggagtgggaacggctgtaccgtcccgaccgactgatcgtcgaccagcaactgatgctggtgttccgatttgcgatcacgcacggctttctcgaacttgtccaccgattatggtaggaaaatttaaaattgcaatgttttaaaaaaataaaataaaacacgaatttcaggggcgatttgacagagggacaaatcgaaacaatcggtgattttttggcatttttaaactttgagaatgcttatgattttgaggtgtggaggattcggagaatttctttgaattaggagtacaaatattaaatattttttcaattaaaaacgctcatttgatttttacttttttttttaaattaatccctaattttcctaaattctttgcagaaaatctgtctcattttaattttctaaattgatcaaatttttgtcaggcttcttgtcctggaaaacgatttgcttcaatgtgcaacacaccgaaatggtccgtttcctgtgccgagtgttgtgccgaattaacatcaatggtgacggcattttccattttttgcaaataatttttttttaaatttgcattaaaaattataccaaacagtttgttaaatcacacacaaaataacatagcatgcaaaaatggcattaaatcttgcccggtgtaaaaatgccctaaaattcaactaaacccattctcgaaaacacaaaaaaaaaaaaattaaaattttggtttgtttaatgctgagatgacataatttatattggcaatttctcgtgttattaatcctggcatactcattaaaatggcgcttcggggaaaccttaccttctttaattaaagttaattgtttaattttgtagggatggttcgcctcagttgggacaatttctaccacaaagtgcaacaaacacttgaagtgaattcaaataaatatccaattttaatacatttgaatttttattttattcagtcggacgaaatgccaagggaagagcaaatgaaacgtttccacaaattggagagtctgctcatcaattggtgtcctgagctaagaaaagcggttctgtcacgcgaaaatttcaggcaaatccgagaaaaaagcctattaattaattagttacttg

SEQ ID NO: 15840 - DNA, 1679 bp, Heterodera glycines
tattaattagttaaaatcgtttattccgtactgaaatgacccgcctcttctgatcaccactcattagcacttttgtcacttcgcccacattcgcacttttgtcactttgactcatcacgagttagcccatcaatggctctccttagttcactttccttttcttttaatttcagagtttcttttctcatccaacagtcgcgttctatcgctctatgaaaccatttgtgtggaaaggacaaaaaatgactaaagagggcggaaaggaacagacaaaaggaggagggaaatgaacgaattgggaggaacccaagacaaacgcattggaagaggaacagtggaaagtgacttttgcaataatttggtagtgcaaaactatgactgttggtttagggtatttgcccgttcaaactttgccgcattttctcagactcaaaagaacgaagggaacacacgaaagaaagcaatttgaacagactcttcttcattcattcactcattcattgtgtgtcgcttttcggtcattccccagaaaaagccaacggatcattcccttttgtgttctttttcggatctctttcaatgcttcttcttttcagctgttcctcctcagttccttcgccactctcccctctttttcctcctcctccccctcacaatttccaattgctcttttcgtccgtttggtctcttttctgtcggcgctaaatgcgtaatcggacggcagaagaatccgtgcacaaaacatcgctttccaagtggaaacccatcgcatcaattgcacttcctgtaaattgtcatctcaatttttttcgctatttttttgccaaattgccacctttaggcattgtgccacattttcaacttcaattgccatattctccgccacaattcgttccgcttcctttttgtaccattccatttcgtaatcagccgtcccttttatgaaaaagtgacagtgaatccaaaaatggcacttctcaaaaacatcgctaaaaatagcaaattatgaaaaagaggagaaaagacaaaccaaccgaacagaaccaaaatcggacataaaagaacgaaaatgaggaagtaattgtgcggaaagaccaggcaaattcatcacaacatggaaattcaagggaaaaactcgttgggaagggccttcaatttcatcgctttcctttcgcaaattttggcagaattcgaccactttttccgggatgacttttcggatgaattctccgccgtccattacgtaagtttcgatgcgctcttcctttatctgtcggtgtgcttaattctttcgcttttctcaatttgatggccaaccccattcagtcgaatgctttcccgcataaattcgatgctcgccgggttcaaatcgttggcaaatgccttttttatttttatttttttaactgcaggcaaaatgaaagggccaacgccggcgaaagcgtcgaaaacgacggaattttggtcgaatttggcgaaggtttccgagtggactctgctgagtcgactgttccaaaagacctaaaagataaaaggatgaaatgagcgaatggaaggcgaaaggcgagtgtgcctttgagtaatccaatcggtaacgcagtccgtgctccaccacctccgtcataaactccgcttccccggcgaccaattcggcgtccatcactcggaattcgtgcgta

SEQ ID NO: 15841 - DNA, 634 bp, Heterodera glycines
tttctaaaatttgttttccttaatttggatattctgaatggtgtagaatgcatagatagctttagaatgagccattaaatgtaaggaaagccaaaattttagaaaacaaaaaatttcaaaaaaaaatcaagtacgcgatgtaaaatctttggctaaatcaatgattttgcaaaatccaagctcggattcatgatcatcagcgcattttttccccaagtaaaagtgattttgtaagaaaatttttatttatttttttctgtcgggacaccaattccgaaggattaccgattttttgaaggacctacaccgtcaaacccaatctttttaaacattggtaaatttttgattaaagcatcccgaattctttttggcaacaaaatgtgcccaactcacgtgaacttactcctgtccaatgtaagcattccatgggcagaaattggcgggaacataatcttgtcataatgtgaccgtgacatcgtacaaagttggcgaagggtcacagacaccaaaaccatttaaaaaggaaataaatgtgacaaaatataggaaaggctacaaatgtatgtgtgagatgattaacaaacgaaaaaagcaaaataaaaatgaaaaagtgatatgaaaaattaacgcagaa

SEQ ID NO: 15842 - DNA, 3389 bp, Heterodera glycines
actttttcatttcattttatttcacaccccaaccccatctgtgctgctgtttccattactatttttgttggcacaatcgcctctgttaatgatacaatttgccagggcctgacctgaggaccataaaaatctcaaaaatttcggctccggaatccgttatatgtttacgcgaacatttagggttgatcagccaaaaaaaaattctaggaatccagaatttcggttaccctaaaaataatccggggctggtcttagtcctggtacagttattatacaatatgacttgaatgactttgagacttttttacatcggaatttacgcccattcattcttttttggcattatgttccatcgaccaaacacaaatatttcattttttatttatcctaatttaaaaaacatcgaattttccatttaaaacatttttgttttttttctgttcccatcagcaagaatctctttctgattttgctcctattcacaaaaacaaacccttttttttgttgttgtattatccaagactttgttctcctaccgctggggcagtaggccatttcccccagaaaatctgaaaaaattgaaaaaacaaaccctaaaacgctgttttttttgttgaaatttttacatcacttcggaagagttccccccccccccccctccaaaaaaatggaaaattaaaaatttaaatgatttgttggcggcctacaaaacgaaacagaacaaagttttagattacaaaaaactaatttgtatttctctgtttctgtctgttgtaccatattatgattgattgattcacattgccaaattggtgaacaacaaacactatcaaaatgttcgaattttgcattaattattatgatcattaattatcacaacccccccccccccatcctaattaattattattttttgttgcctaattttcacgtcactctctcttttcttcccctcaagattgtctcctctcattacgtcgctcttcgtcttcatcatccgtcgtcgtttgcccacaacatttcgcaatttgctcttctcctcctccatccaccacggcaccatttcccccctcttccgtgcccaccgaagagacttggtggcttttttcccgctcctcccaatcatcatttgctaatcccgaaagcgatgatgagcgattgatttgattaatcattaatttatgttttggcacatttttgttgccctttttttgtttgtttccccccgcccattccccgaaatcagcgacaaattttgtgcccttttcataataatcccgatgtttttttatttacataaaatgtatgtttattagacaacaaaaaacagactctctctccatctctctcccgtgtttctctgtgcgcatattgtgatcattgattaataattgttccaccaccacccaattcatgcgaataaaaatggttttttttgatgaaatctttattttaatatgcaaaaatttaaaaaatgttgtttaaaaaaagattggtaaaatttgaagaatttttggtcataattttttgaaacgaacattttgaaataggtaatttgtacactgttaatttaaaataaagacaccctgttttttgggagtttgaccacttcccatgaaccgatcgagctgaatttttaactgtacgtagcaattctgaaaatattaagattctgaaagtgagaaaccgaaatgatgacgtaaaaaagttttacgattcaaaaatgaggaaaaatggcttgaattgagtcattttttggatagtcggtatttacaaggcacccctcagcgaatacttgctatagagcaatcattcaaaggccattttgtagagaattttgtgctctttctgttcgtcatattcatcttccatggaaaatttttcccaaccccctagaatttttttttcgaatttactcagattttcgtattttttcacccgcaaaaattttgtgtttaatgccttttttatggcataaaatgaataaaaaatgcttaaaggatgtctgtacgttatcttagtgctgattgctgttagtttgattcagttgggcaaatgttagaggcgatttaagccttttggcccttaatttctcctgaaaacttagaaaattcaacataactctgcctaaaagacatatttctgttcgcaaaataaacagaaatgtgaaaaaagatttattctttcttatttagtttgttttatctgtttatttttggtagttgttgagattttgttcgtttttatcaagtgtctctattttaaattaacaccccatttttgaaaaaaaatcgtaaaacttttttccgtcatcatttcggtttctcactttcagaatcttaatattttcagaattgctacgtacagttaaaaattcagctcgatcggttcatgggggtcaaactcccaaaaaacagggtgtctttattttcaattaacacagtgtattgttccttctgcagcacccacatttctgttaattgcttttttatccacagatttcatgcaagtattctaagtcgagaaatgctaactgtttattaggcctttttttcacttggtcatacttacattcttggtaccaatttaaatattgaaattttataattataaaaaaaagttttttaaaaatttctcaagccaaaaatagttgttaaaaagtttcataaaccaaaatagttgaaaatagttgctaaaaattgctctaaatcgaaattaatcgaagaaaatgtgttctttgcgtctatccgaacaaatgatatcagcaaaaaaaaataggtgaaaacctaccaatcgggtcggggtcacttcggcgcagaccatttcggcgccgcaaattttgaaatgctataactagggctgccaaaaatatgcatgaaaagtggccaaaatatgcgcataaatatgcaaataaagtcgtgaaatatgcacaaaaatcgcaaaatatgcaccaaatatgcataaaaaaacttaaaaattaggcgtgcaaattaataaaaaaaaattttttattcctcataaattttatcggttgtttttgcaatttcaaatcaaaatttttcaatttttcgcatggaattcactgttgacccactcgcgcatccattcaaaatttgatttaattttaagcataatcaaatttttttctaagatttattcaaatcgaaaaatatttagttaaaaatggcaaaatatgcataaaaatctgagaatatgcacaaaaaatggcaaaatatgcagaaaaatccaaaatatgcataaaaacccgaaatatgcaaataaaagtcccgatttttatacgcaaacacaaaaaaagtgtttttcctactatttaaagcacggagaagccaggaaaaaaacatgcatttgcatatttttggcagccctag

SEQ ID NO: 15843 - DNA, 2102 bp, Heterodera glycines
tgtaagtaaaatattttccccaaagggctaatttttcgttttttgtgaaatcaattaccaaatgatttttttatcagagcattataaatttcgatttatcatttatataactaaaatattttaatgattaaaataatattaatttatttattgattctgcacgcgaattaacaccattttttcaataaaccacattttctttatccattttctatcaagatcacatgaactttactatttccttaatttgtatcgcgtaaatcttataaaagatttaaataatattaattttttaagattctacaccgcgtctgaaaccttcaaatctgtaagtaaaatattttccacaaagtgctaatttttccgtttctgttgaatccattatcaaatgatttttttatcagagcattaataaatttcgatttatcatttatataaataaaatatttttaatgattaaaataatattaatttatttatagattctgaacgcgaattaacaccatttttttcaataaaccacattttctttatccattttctatcaagataacatgaactttactatttccttaatttgtatcgcgtaaatcttataaaagatttaaataatattaattttttaagattctacaccgcgtctgaaaccttcaaatctgtaagtaaaatattttccacaaagtgctaatttttccgtttctgttgaatccattatcaaatgctttttttatcagagcattaatacattagtagtatatgacccctaaaggttgcgggtgtttcccgcacgagcccgtgggcgcagccctttgaagtagccgccgtggacatttaccgccaagaaccaaatcctaagggatggatgcgcattcctttgattccaaaacctattggaccactttgatgtagccgcctgaccaaatccgatttcccaaattgttgcgggtgctttttttttcaccgccgcgcagcgccgcgggaaggtcatcaatcatccacctgtcaccaaagtgacaggtggaggaaattcaatttaacttttgcaaattttaatcttttgtttcaaaaccttttagcgttttattttctcaatcctgaaattttttttttatgatgattttttgatcctgaaattaaaatttttttttttgaaaattagccaaaattgtgaggtttttttatttccactcactccctgccgatgcgccgcgatgctcactccctgccgatgcgccgcgatgccgagtcgcgcaaaaaaaaaaaaaaaatcgataacggaatttggaagaagtgcaaattaattgatattggcagcaaataattttgattatgaattggacaataaaattactatttaaatccaatttaaaagtaaaatcaaagaatgaataaataaattaaaaaactttttcaaaagtaggtcacctgtcaactaaaaattgattgatgggttttttatttttcttcccttatttctcaatctgcacgtgactttttgttcaaattatttcgcaatatctcccctaaattaggtcaactgtcaataaaatgtgattgattggtttcttatttaaatgtctccattatttttagttttctgttccaactatttcgcaatatggcccgtaattttgcaaacctgtcaaaaaaaaaaatgattgatgactttcgaaataaggaatatccaaacgatttttgctcggtttttgaataaaatgagacagctgtctaccgaaatgattgatgaccccctaaattaaggcaaccccagacagtcatgtgactagacccctccccctttttgcccaatccgtacacccggcccaaatcgaaaatcattcaactaaatagttggatttcattaaactctcttcgcgctctaattttaattccgctctatttttaattgaattaattaaatcttctattaaattcccgtctttttcttttcaaatctctcttcactctttaatttactgtatcaatttcgcggttttttgttttaaaatgtcttttacacgcgcgacctccttccaacccgccgtgccaatggccaaaaaatgaaggccgatcaatcgggtaagtgatttttaataaattaa

SEQ ID NO: 15844 - DNA, 1261 bp, Heterodera glycines
aaaaaaaaaaaaatttttaaaacatttttttccccccccttttttccccggggggttatttttttaaagtttttttttccccaaaaaattttccaaaccccccttttcccccccgggaagttttttttttttgaatttttgacccgttttgggaaaataaaaaaaaaaaaaaataaaaattttaaatccttttttccccctccctttttcccgggggtttttttttaaaatttttttttcccaaaaaaactttttcaaaccccttttttccccccgggaatgttttttttatgaattttgaaccggtttgagtagatttgactagaaaaaattgaaaattttgaaatcatgttttcccctcccttttcccaggggtatttttttgtaaaatttttttttccccaataaacttttcaaaccccatttttcgccccgtgaatgttatttttattgaattttgaaccgttttgagtagattagactataaaaaattgaaaattttgaaatcatgtttccccctcccttctcccaggggtattattttgtaaagtctttttttccccaataaacttttcaaaccccatttttcgcaccgtgaatgttatttttattgaattctgaaccgttttgagtagattagactagaaaaaattgaaaattttgaaatcatgtttcccactcccttctcccaggggtattattttgtaaagtcttttttccccaataaacttttcaaaccccatttttcgcaccgtgaatgttatttttattgaattctgaaccgttttgagtagattagactagaaaaaattgaaaattttgaaatcatgtttcccactcccttctcccaggggtattattttgtaaagtctttttttccccaataaacttttcataccccatttttcgcaccgtgaatgttatttttattgaattctgaaccgttttgagtagattagactagaaaaaattgaaaattttgaaatcatgtttcccactcccttctcccaggggtattattttgtaaagtctttttttccaaataaacttttcaaaccccatttttcgcaccgtgaatgttatttttattgaattctgaaccggtttgagtagattagactagaaaaaattgaaaattttgaaatcatgtttcccactcccttctccccaggggtattaattttgtaaaggctttttttccccaaaaaacctttcataccccatttttcgcccccgggaatgttatttttttttgaatttt

SEQ ID NO: 15845 - DNA, 2649 bp, Heterodera glycines
  unsure (1)..(2649): unsure at all n locations
tttagaccgaatacattttcattagagtacaaattaatgaacgaaagttgaaaaacaaaaaaatgaaaattgataatcctacgagaagcaaccaatgtttaaacgtacaaaaacaaaaatttttggtcttttaaaattttgggctttttaagtaatacgttttgccattgtatttttggagctttttaggtcaaaaattcgaacccctatcatggtcagttttagaattatcagaaatacaaatagtgaggctttctttggaaaaatttacctaaaaaaactataaaatctcaatattaagcctccgatgtgaattaagaaatgccaaaagttggaagtaaaaaagtagaaatgttggcattagggatgcactttttaggcaaaagcctatttttttcctgagctccccgtggcctgaaacgcacgaaaaacatgatttttgggctgttgttaagctacttttcgagttataagtgcctattttctaggcttttatttttagagcctaaaagcctaaaaaaattttgaaagagcctatttttgcctattttggcgttttgtccaaaatttgttaataaaaaatgcaataaaaacgaaaaatatacccctaagaatcgacctagaatttttttcaaaaacacacccctaagaaatgaaaaatttttaattattcatctccaaaattttttatttattttcttgacaagaatttttggtgttaaaattgaatttgtgatttaaaaattatttacctcaatactgatttggcctaattttttacttttttgaatacattttgtaattttacacccctaaaaatgaggttttttagtgcctattttccattttttagtgcctattttaggggttttttaaagcctaaagcctacctattttggcagttttcagagcctaaaaagtgcatccaggaccaagaaattgatctaaaggtcaaattgaaaaatcattcgaaaaatttatcatatgcaaaaagaaaggtcagaattaaaaaaaaaaactccgaaaaaagtaaatattgtggattaatgactgtgaaaaaacttaattccatgagatggaacttttttacattgagcaaactgtcagtttcaagcttcagctttttaaatcatgaaagcagaaaataatagctgtccttgaaagaaaggacagattcgaaccctgccatgcttatatattaatatggattttcataaagccaaaaattcttaaacaaaaaatatatataactaaaaagcataaaaaatggacctgatacaaattataattaattgtgaacatgaaattgacacgcacgaacaaaaaagcaattaattgactcctaattattgtcacttcaaagggaatacaaaaatttatgcacattattcgagaatattttaggacttaaatgaagtggaaaaaaattggaagcggaattctaacaaatgcgcatggaggcccaagaaaacaaaagtcttagtcaatatgttttgtatcgaccgaccaattcgggagaaggcgacaaataaatttcgttaaaattctcaaatttcttccctcttgactcaaaaattcccgtaaagattttaaaattcagacgaaaattcacaaattggtcatttttagtcaaaatgaattaagaaaacggggtcatgatttcaaaaattttccgacggaccgctctctagctcttcaaaaaattttttcttaaaaagctcggcgaaaagattaaacaaagcccttgaacttgaacacctttttttttgcacttcattctaattttttcatacttttttaaaattcattacaatggaataaaaaaataagctaattttaaatttgtggattttaggggtcgaatttgatctcgggcaggcaggcggggagagccccctcccccccccgccctcttctcttccacttctagttaagtgcctgcacgcgaggtgttgtaagtgagtgcgcgaaaaatttgtatgggatgttttatcgtggacatgaatgctaattaaaaaaggggtacgctgtgtgggaacaattagcgtaagaaatttggccctgagggcaacctccggcggcacggggcacacacacaacccagcccagaaaatttttgtacctttcggcaaaacaccattattaccttttttattcgaggaatatgtgtatgtttgttgacacagtaaagcgctaaagcaagggacacgcttgatgccagccgctgattataaataattaattttaaagtgtggcgctggggtcgcccccggcaaaaagggatgacagacggcggcacgtctttgtgcagctgaagcggctgctgccaacgacgaggcttcgaccccaaaaagccgttggtcccgctacccgtccgagtgtttccggcactcgcgtaagcagtgaaccatttcacgtgatactatgtgctcaattattcattcattactacaatttcatctgctgctaagaaaagagtggcgccagtcgagctttaaaagtggcggccgagtaatgcgggtaatcagcgcgtcaattgtcccccgcccccctttatggccattgggatggtcgccttgacaacttttgtgccgcgtgccgcgttgctgctgttgctgacagcccgncgggcatttcgggtaatttttt

SEQ ID NO: 15846 - DNA, 1441 bp, Heterodera glycines
taagagcgatcagatcaccgtcaaattgaagaaaaatgatactgtgcaagttttgaaggggaagataatggaaaagttggataagaaaattgaaaatgtgattggacatgaattaggaatcaatcaaccgaagccgacattgaaatatcagcagaaatcacctgcagataataatgcttttgttgttgagcttgaggacagtaaaacattgaaagattatggcattggacaaaacgcaaccgttcatttgtcgtttgacaaatttgaaattttcgtcaaatttcaagaggaaaaccaaaatgaaaaaaggcgattaactgttggggtgaaaaaacggacacagttgaagcattgaagcggataatccaaacgctcactcagattgagccccaaaagcaaacactgagaagggacaattgcggtgctgtgcttaaggacacagaaacaatggccaattgtaacagtaaacacatcgtttatttggccattgatgagtttcaaatccaagtgaaattggagtactgtaacaatgaacatacagtatgggtgcacagtatggacacagttagcacagtgaaattgaagatttgtaatcaaatgatctcatatatttctgcatataagcatattagggccaacgaacaaacattgaaatacgacggcactgatggtgtgcttgatgacaatgcaacaatggcattttatggcatcggagcaggcgcaaccgttcaattgtcattggatgaaatatttgaattttttgtgaaatatgaaaaagcggaggaacagaaagaggagaaaaaagtggaaacattcagtttagaggtgaaaaaaacgaacactgtcgccagtttgaaggaaatgatcaaaaatgagaaaaaatttgtgccaaaaagacaaacactgcgacgcttttccccatatcatatgctgcttatggacactgaaatattggcaccaacaattcaacatgaaccaacaatttacttggccattgatgaatttcaaatttttgtggaatatgccagcgaaaggtacaacaccatttgggtgaagggcacggaaacttggcaattttaaagaacaagatcgcaaatgggcttaaaccatctaagtacattgatcccgacagccaagcgctgcaatacggcacattggctctgattaatgaccgtaaattattgaatgattatggcattggaaaaggtggtgcaacagtgtccttgtccattgatacattttcaattgatgtggcacatgaagaccaacaaggaagacatgaccataccatttgggtgtggaagagtgacacggtgaaaatgttgaagcaaaagattgagattaagctgggattttcgcccaacaaacaatcactgagatatgatcataaacaaaatccatatcctgctgaactttatgacgacagcaaaacaatgaagga

SEQ ID NO: 15847 - DNA, 2462 bp, Heterodera glycines
  unsure (1)..(2462): unsure at all n locations
gagacagtgcttaaagacgactgaagggaggagaccaattaaaaaacaaagatggcactgagacagtgcttaaagacgacttgaagaaggagaccaattaaaaaacaaagatggcactgagacagtgcttaaagacgacttgaaggaggagaccaattaaaaaacaaagatggcactgagacagtgcttaaagacgacttgaaggaggagaccaattaaaaaacaaagatggcactgagacagtgcttaaagacgacttgaaggaggagaccaattaaaaaacaaagatggcactgagacagtgcttaaagacgacttgaaggaggagaccaattaaaaaacaaagatggcactgagacagtgcttaaagacgacttgaaggaggagaccaattaaaaaacaaagatggcactgagacagtgcttaaagacgacttgaaggaggagaccaattaaaaaacaaagatggcactgagacagtgcttaaagacgacttgaaggaggagaccaattaaaaaacaaagatgtcactgagacagtgcttaaagacgacttgaaggaggagaccaattcatgggttggcactccgtttaaattgaaattaaaaaacaaagatggcactgagacagtgcttaaagacgacttgaaggaggagaccaattcatgggttggcactccgtttaaattgaaattaaaaaacaaagatggcactgagacagtgcttaaagacgcctctcaaactttggcattttatggcattggcgaaaatgataacaacatttacattggacaagctgaatccgattagttgttgttgcaccatcgatagagaagaaggctaaatccacaaagatccggctgccgttataggacattttgaaaatccgtcatttttacgcccttttcgaaccaaaaattttggcatagcattttttttaaagacaacanaaaannccaaagaacatttgatgtcattcggtaaaacaaaatgctcagaattaggtgacaaaaatctccactaacttttcaaaaaagtagtgaccaaaaatgttcaaaaatagttaggtacatttttttacaaattttttttttaccatggctgaattgacgaactgtcttacatatcatccaaaaaagatggaatgatcgatccgaaacatttgtcgtttccccattttctttcggatctcttcagctgtcactgatgaaattgtttttgtcatttgaattttatggatggtagtgcgttttataaatccgtcagttttggttactgtaacagtaccatttgacgatccagtgaggtcagagcacatgcacaaatattgaaaagtttgattaaaactgagttcagcgtcagggtaaaaaaatgaaaaaagatttttcaattttttgagaatttttagggttttcagtttttttttaatatttttcagagaaagttttttttacaccttccatcgataaaatttataaaaaaatgaatgcatttatacatattttggggatcacaattaaaccaaattatgaaaatacaataaattgacttcgggtattgttcagtaaaaatttttgtgtttcgtattttattttagtttctttttttcgcatttcacattttattttaagtccccatttacattcgccttaacaacataactcgaaaaagaacatataaaaaatctaaattttaatcacccaactttcgaaaaaattaatttttaatttttttagacaattcatttctgaaatattggtccgcaaatgttcggctaactgatcttggattgtgttatattccattaggatatttggcactgttttcttaatttggttaacaactaaaaaaaaattagggtccaaaagttcaatgtttgatatgtattttcaaataaaatggaattttatataaataaattaattggaaaaatggaattttatataaataaattaattggaatttttatctgacaagggaatatatctaattgtgagtgtccaaatcactttaaaaccacttttttcgagtagagcatagtccatttgctattgtaaaatttcggcttttttggtcttggtgacaaaagtgatcagaaaaagtgatcaaaagaaaaaactagcaaaaattcgttaatttaattcgttgtttcaccatttgtcataggttcggatccgctcgacagatgttgaattatttggatttggatttttcttcaaagtataatattgtatctaacttttttanaatttattcattttatggtacttgtagtggatcacgactanaaagagacaaaaaatggcgaaaaaggcactataataggcaccanaaaattgaaaaaagggcatgaaaggcactaaaatcacgaaaaaggcatganaaaagcatttaaattntttaacgcacattttttttcagacgtttaaaagtcacattttttaatcagcataatttcttggaaa

SEQ ID NO: 15848 - DNA, 3179 bp, Heterodera glycines
ctactcgggccattcgcgttcatgtggggctgccggccaagtcgggcgtgtccggcgtgaccattgttgtggtgccaaatctgatgggcattgcgctgtggtcgcccccgttggaccgtatgggcaattcgtgccgcggggtccatttctgcaaaaagttgattgaccgcttcaatttccacaactacgattcgttggcacataacgaatcccaggtgttttttgatttattggtctatatgaatgttaagaaattttcgaaaaattgatatgtaagtgtgctagtgcgtttcttaaaaactgcaaaccccaagttctataactcaaaaaaatttttaaaaatacagtaaaaaaattttttggcaaaatttagagaagactttaaaaaagttaagaatttttatttttttaaattctaatttctagatttttctttagaaaattctaattttctctaagaaaatttttaagtcaaaatttctttcatgaagcttcattaaaaattttacacttttcagtcggggtggtccaccccattttccgtgcaacccgagtaaattgatttaaaaattttcgtcattttttcatataaatttaattgaaaattcttccgcgcaccttgacggcactgctggaataatgccacaataaaatttttcttcaattcttgaaattacttgattttttttattttacagaaatttgacccacgccggcgtgtcggtgagcgcgaaaaaactgcggtggtttcgttgctgtttgcttcaaaggctggcgatttgaacaccatcagaaggtcataaactaattatattgagttagttgatttcgaacaacaaaaactcaaaaataaaatttatagctttttttattttaaatttaaaatcgaattaaattattaattttcaacatttaaatttaaagttcaattgaattgtcagaatgtatttgcaaggctgtgacttggagatggccgactatgacaagcgaactgcgctgcatttggctgcttctgaaggccattttgatgtggcacttttccttttggagaccggcaaagttcaaccagacccaagagatcggtgagtcataatcaaatttaaaaatagtaatggcacaaaacataattatttgttgaagtaaatttaaaaataataaagctcagaaatttgtatttttatgaatctttaaaaattaaaaaaataaatgataataaaattttaaattgtttagtagcttttcaattcaaataaaactttgaatacctgaaattacaaattctaatatcttatttcaaaaatatatgaaatctatgttttccgtgccgaaacctgggcttggattccgtatttgatatgagcctgtttcttggacaaaaatcctggaaaatttaagccggacaaaattaaatttaaaaaaaaagaaaacttttgactcaaacagttggaatcggactcctcttgacgatgcccgttcggaacatcacacatcggtggcactgatgctggagcgacgaatgcaagacattacacagacaaacaatttgccggccaacaaaccattgcagagccgaacagtttcattgcatgggttacaggtgggataaagccgagagtgggcggggtggggatatccggtcaaaacggggaaagcgggaaataacgaaaaaatttaaaatcgctgatcacaacatgagtcaaaacctacaacccagggacgatcccaggattacggattggttggcatgccatccctcgccccccgtgcctggaactacgaattttcttctttttttttgttgttgttgcttttcatacaactttttgcggcgagttttcgaaaaaatttttatggcttttcctctgtttttaacaaatttttacccaaaagtatttagtatttccgttctactaatcggaaacggtttttccaggctgtcagcaaaagtaggccaccagttgtctttgggttgggatcgccgccagcaatcagcagtggccaaatgtccgtctcatcgccaatggtgccaacaatgccgacgcatcatgtccaatctggtagtggcgctgtaatgaattaaaattgacaagtcattcccaactcatcaacatccaaatccaattctgaaataactatatacataaatccaattataatgatcagactttcaaaaaatttccaaaatgaaccctaaatacaaaaagaatgaattttttaattataatttctttgtaaaattgaaataaaaaataaagaatacatcccgaaaaccgactttttcatttttattaattcactatttaaaaaaaaatttcaaaaattctgacaaaaattaatttttgaaaattacggattacgcattacgggaagttacggcttttttggacaccctccccccataattactgattacggatttccataactgaaaaaatcgccgtaattacggattactgatttccgtaattgaaaatctagttgcgtgcagccctgatagctatcatttggcgaagccacaaaagctccagcctaggtccgactgttcaggcacccgctacttattgaattacataaaaaaatttcccaatagaacaaattatattcttccacgtctttctgatcgcttttgtgcttcctggctttgtgatgccacgctttttgtgggcggtgatgcgcaacagacggcacaatttgcttgtctggtggatttgttggataacgctgcacaatgcgcatgcgatgatgggattgctcacatacattctcaacttgaccgtaattttcgagattttcagtcgtgccaactaccaaaaacattacatgaaccgcaatttcaaaaacaattaccttttataataaaaaaggctccggcaatttggacatcagaaaattagacactattggatataataaaaatttttttgctaaatatagcctaagcttaagcctatgcctaagcccaagcaagcctaagcctgagccaaagcttaggcttagtctaagccattgtacgggttgcttttgtacgattgtcatgacatcgttttataagcgtaatttggtgtccagttttccgccggtgtccaaattttctttggtgtccaatattccggtgtccaatttaccgccggtccggggggcatgctaggtcccgctctccaaaatttaaaaatagtcaa

SEQ ID NO: 15849 - DNA, 1513 bp, Heterodera glycines
attgcattcgtcggcatccagtgaatgccttctgctgagggagaagcttggcggtgtgccaccgccggtgcgccaaagtccgttgtgccattgcaacttcagtgccaatgccaaacagcaacatttacaacgcgcggactcggctacaatgttctcttgtttgtcatcggctgttaagcaatctacatgcagcgtggtaacatgaaaaaaatagtgtttataatcaagggcgtagcacaaacccttggcttcgggggggggggcggggcgggggctgaaaattagattttaagggttatttttctttttttagaaatctcgaattaggaagtgttttccgatgaatttgtagtcgtttttcgccaaaaaattactagttatttgctattttggtctccatttttcaaaaatatggtaaattggaggtccggtggtgcctttatgcgtcgcctgaattttttttttgaaaattttaatgaaattgttaagaaattgcttaaaatttgttaaaaaaattctcaggctgcgtctatcggcacccaccgtattcaaaaattcattgaaattttccaaaaatttgacccaaaatgctaaaagtggccattttttggcaaaaaaaaacaaacgatgtttgcattcccatttctgatttttttttttttgcttatgggcctgatttgtctgggcatttgccatcaaagcctgtccctagtaaaaactaagtcacaaattctgccaaaataaaaaaattcaaaaaacagcaacaaaatgatcatggttgcggcggcggatcattgcgcaaattgtcctgctccacgcctattgttggtggacatcattatgggcaaggtcatcatcgaagccgaaaaattggcaaattttgatttcaaatttttataaaatatttataaagtctttactttttgtttgaatatcgtactcgtgccaactcttaccgtataccaaaaattacttctaacttttagctggattaatataatttttaaaattaagtaaataatttattctttatctattaactttcaatcaaatataaaatgaaaatattattttgaaatttcgcggtgtccacaattcttcccatataccacaacaggtcagcagcaccagcataattatggtattcaaaacggcaacagtaacaataacaacaacaggacggagcagtataacaacggcaacattgacaagcatcatcacaacaacaataacagttgcaacaacaatcaattaactgggcaagggcatgatcaaagtcatgccgaaacgcaggaaggtaatttatggcacagataaagtaatggtcagcacgggaattttctgaaattttgcagaaaaattcctttgaatttatgcaactaaaataattttataaaatgtttataaatcaccataaaaaatccaaaaatttaatttaccgtaacgcaggggcgtatctagaaaaatttttcggggggggggggggacccgacctgaagaggacttttttttt

SEQ ID NO: 15850 - DNA, 3031 bp, Heterodera glycines
tggccttaaccttcactttttctatttctttgttttttaataataaaataaattatttaaattattttcctttttattttgtttttgccttttgcccattgaaacggagtgaataatgcaaaagaagtcaaaaaactttggccaaattcaatttttttttttgctttcctttggcccaccatcaataatttcctcctcccccgccgccgtcgcccattcattgcgtcgcggtcattcggcggaatttggcgggagagattgaaaaatgcggcgaattgaaaaggcaaattttatataattttacaatttgaagattaggtttgatgcagtttgtttaaattacgattaggatgaacaagcaaatctgccccttttctcatcctttcgtttcgatttttcgtttcatttgtcctcaatttgcccccccccccctttttttacgccccatttatccgtcggggaaaattacggaaagtatgacagtcttcgcagaacaaacaacaaatacaaaaattctgagaaatagatggacaaaaggaagcacacacagttagcaatttgtcctttgccttttcgcctttgaaaatgccaaagaatggcgctgccaattggccaaaagttggcaaccgacaaaaatggcacgtgtcatcagcgacaaaagcacctggcgacggacgacggaaccgtggaaagctttgacgcaacaaaacggaaccccaaaagcacgagttcgtctcgcaatttaatagccattagcataaatagattggaagacaaaatttgatcctaaaagcattgcctagtaagccgagattcgcgaaaaatgggcgaaaaaggaaaatattacgaatctgataaagcattctgggttttcgaatctattgaaataaaagcaaaatgaaagtcatggccagcattccgacaaattatgccacaaaaataaaatttgaaattttcttcttccattttttacaaagaatttcaaaaattttctattggtttcctcacaattaagaaaagttacggttataagcagatgagttttatcagcagctgatcaaataccaaaaccaaattagtcaactccatgaaaaatcataaatgtttaattatgaaaacaataaaaaattatatgtttttaattcgcaatgtttttgatcatagcccccaaacgaaaattaaatcggcaagagataatttctcaattttttattcttttttattttgtacaagtagcaaaagcgaagaaatgaatgaatgaatgaatgactttacaatttgtcatccgttcttcgtccgttcattcgttgggcgcgaggacataaaaggcgaatgatttgtcatttgtaattaattagcaaaaattacctaataaattaaataataattgccaatcatttttctggtgtttttattttttatttaaactttgaaaaaaggttttctttttcgcaaattgatgaaatgataataaaacgagtttatttttgtgctcatttatttcctttttattttattgcaaaattaaaatattattctttgggcatataaataaataaagaagttggaaagaaattatcattttgcatttgtatcactttatttggagaagaatatggttaatttattgaggctttttttacgtgtaataaaatttaaaaaattaaaaaacgcatatatttaacaaatttaccattcattgcttatcaccgtaatttcgaaatgaattgaccttttgaatttattaattaataattaatgttataaggcaccactaattttaaatctattcttaaaatggtgaatttttttgttatttttgtgccgtttttgttgttgattgtgtcaaatcagttgaaagccgaagaaacggaagaaaatcgacataaaacggaggaaacatggaattatgaggagcccgaagaatggggaggaaagtgccaaaagggcgacagacaatcgccaattgacattcacaaacaatgggtaattaattaattaattgaataagagatagcatgggtggcaaattattacttattaattaaataatatgatttatttttataattagtcgtgttaattaattatttaattttatgccttccttttcagttcattgattataaaattccggcaatttcatttgcaaattacgaaaaaaatggaactgtgacaatgaaaaacaacggtcatacgggtaaagaaagagctgaaattacggactgggacactatagtctgagccaagtttagaacatcataacttttttatttgctgaccaaatccaataagcttggtatcattcgattgatcttaacaagctctattggttttccaaaaaatacaaagatataccgacatataaaaaagttataagcaaaaatatgcaaaaaatctgaatttttggtagtattcatgtttcaacttttttagaagctgttcaatcgcttagaaatagcttatcaaaagcttctaaacatgtaaagctttcgaatgaagctaaatttataaaatttggccagctgagaaaaaattttgatgctttaaacttagctcagactataccggcctatagtgtcccccacccctgaaattaacataattagtataataaaaacataaacaacttaaatttacagtggtcgtaagcggatttgacacttgggaaaagcagccgaacatcgccgacggaggctttgggagcaaatacatgttgagccaattccattttcattggtctcaaaacgagaacggaagtgaacatacggtggacggagaacattatgacgcggaggtactgtagagagagagagagagagagagagagagaagaaatagagagagaaagaaagaggagaaatagagagagagagagaaagagaagaaatagagagagagagagaaagagaagaaatagagagagagagagagaaagagaagaaatagagagagagagagagagagaaagagaagaaatatagagagagagagaaagagaaagagaagaaatagagagagagagagagag

SEQ ID NO: 15851 - DNA, 1388 bp, Heterodera glycines
cctcccctcctctcccctctcctcctttccctttgcccccttttccctccctctctcccttttcccctccctctctcccttttcccctccctctctcccttttcccctccctctctcccttttcccctccctctctcccttttcccctccctctctcccttttcccctccctctctcccttttcccctccctctctcccttttcccctccctctctcccttttcctctccctttctcgaccctttcccctcccctcctcttcttcaggtggtcatttacgccccggcaatttctttgaccggtgtcacttcggtgcgactttggcccttcgttcttctcgtcggcgtcggttccacaatttatacggctgccgggggaattcgggcggttatttggacggacactttgcaggccggattcatctacggagggttagccgttatcattgtgcgcggcacggcacaagctggcggattgacaaatgttttggcgattaatcagcggacggggcgactttggtccgcatttcgtgtgcacccgtcactgctgcaggtgctcttaaacattctcatcgcattccctgtcggtcctttgatgcccttttgatcagtacaacaacctgtgggtggcaatgtttggtggcattttgcaatggacgtgcatttacgggctcaatcagatggccatgcaaaggtgcggtcggcaattgccacttgcgcttcttcgacttctttctcgcacctgcaggtactgctccatgccgtcccttcgccatgcccgcgtcgtcctctctctgaccatgccggccaacttgctgatccaattgatgatcggctacatcggcctgctaatggccgcttactttgaccagtgcaatccgcttgcgctgggcgaagttgaaacggtggaccaagtgaccattctgatggcttcgcgcattttcggtctcccaaaatgctgcaaattccacctcccccctctccaccatttcagaaggagtgcccgggttgccaggactgtttttggccaccattttcaggtgcccgccattcattcccatttactttctctcaaattgtgccattcagcgcgactttgtccaccgcaagttccggcatcaattcccttacagctgttttatgggaagactttctcaaagtgccgttaaaagatctgtcggatgcccacaaaagttgcgcaatgaaaggcatttcggtccctttgtccttttggctttgctcactttttgcttggctttgaaggtctttttcggggctttggccacagtgatggcttttgcttgctccaatctcggtggcattttcaacgtcgttctcacaatcctcggtcctttttgataatttgcgttcaacgtgccatttgtccgc

SEQ ID NO: 15852 - DNA, 840 bp, Heterodera glycines
gcatggggggaaattgggtgggaatgagcagaggtaattggaagttgtggtggcaaattttgtaaatggggcgcataaactgtaataattttgttggtttaatcataagcatgccaaatgccaactcgtgccattgtttcccgttcagtgccctttttatgtccactttcggtgcccaatttcacttcggcacttccaacagttccgtcttttccaaactgtctcccttctgctattccagcttgggtatggtttctctccttttctgcttttctatttccccctcttccctaaggcgttttgcttgtcattttcatcggattgccaattagctgtgtctttaggcaacggcaaagtcaagcacagaaaaagtccgacttagtttcaatatttatacttcaaattttgttctttttcaggctgacttttgcctgcacttattttggcttggaaaaaccaatcgaaagaaagcaaagttttggcgaagagattggccaaatggaattacaaaagcaggagcaaagtttaagcttaatgttagcggaggaagcgcagcacggacagagagcaacagaagaaggggaacagataatgagcagaaggaaaagcaacaaattggagacgtacagagcgacggaagagaaacacaaagtgacagacaaacaaattggtgatgctcgagactaacctcggcccaatcgcgagaaagtctcgagttttttgtgcctcgctgaaatgatttgcctgatatatattaatgatgaaagtcacagtacaaacactttcgaatctttttgatcagcataaaaagtcataagaatttttttcgatcaacagtga

SEQ ID NO: 15853 - DNA, 933 bp, Heterodera glycines
gcacttaccaaagaaataaaattaggctaatttttaacctccttatgcttatattttttttgccaattcagaaaattgcaaatgaaaaataagaatataaaatttgatttatgctcttaatatttacaacaaatcaattaatgaaaaaggcatgtgccatcgaatggaaaatcagcggggaaaatgaaatgacattttggcatttgcttaaacagcaggggaatgaatgatgaaataaatatggtcgatgcgattgcgaggagtgatttaaatattccaaattccccccaaatgtcggcccctttcatcgtcgttttctgctaatgttggcactcattcgccaattcaattcattcgttcgttttccttctcttcgctttggccctttctttcgttgcgcggagaaatgcctaaaaattgggggggggggaattttatgacttttcaaatccaacttcacttcttctcaaatgcatccattcattcatcgatttgcgcgtcctttctttcatccatttcttattaattcaattattattttttcaaatgaaattcaatcccaaaaaacggcaaatgtaaaaaagaaaaagaaaaagccatcctttgctccctttaaaaaattaacaaacaaaaaattataaaatatttctgaatttttatttgaatgtcgtcattatattaaatgcattctttcaatgacgacattttatttttaaaaaatcataaagaaaaggcacaaaatttttggcaattaatgccaacattttgctggcgggtgcaaaagtcgcaattggcattcaccgcgtgccttagtcgcattggccaacaccaaagtcactggtgaaagcgaattgcaacggcaccccaattttggagaagaagggcaattgttcatttgagaggaattcgacgaatggtcacaaaaatgggaaa

SEQ ID NO: 15854 - DNA, 2129 bp, Heterodera glycines
tttcaatccctttaattttttgagcactttgaaattttcatccaccaaaaaaaacagtttctattaaatattcaagataatgggcaaaaatatggccggaatttctgaaaatttatactcatagaatataagaccaaagacagtcctcgtatttgtacattgcttatggtttttttaaaataattttatctcatataatattacaatttctaaccagttctgtgttgttaggcaccttttggcatgcatctaacatatctattcttatcatagatctgattcatcatagtcaagtagatcaaatggccctttaaattgttatcactcaatataatatggagaaaatagactcattcagccaaaactgtggcatacggtctgcataatacaatttttgtacagtatgtactcaaatggtcaatgattaaccctttagactcagtcttaagaaaataaatcattttatttagagaaattttcagattgatcttctatttatagaaaagctttactattatcattgtcgcagaaaacttcacttattacagaaaatcaatactccttttggttttcagtacacatacatcatataattcgatttttgtaagtatactatcaatacatcaatctacattgttttgcacattttctttcagaggtgggggggggggcatttgtcgagaagggcagaaaaggaaggggaacattttcaacagagggcaacgcccgccgaattagagcgagcattttgagggtcagacgaaacggagggaagggaagatccgtcggaaagtgccggatgggccctaatggaaatttagtgccgaggaagaagaagcagcatcagaaaagtaaagcccgccgacagccgaccgagcggagaggcattagcgagcggcggagcggagcattgaaaagccgcaacggacggacgacggtagggaagaacaaactcaatttttgtggagtcggcggagccgagttgcttcacaggccgtgccggcgcctttgaagagaattttccgcataatcgatacattttggtgggcttgtggaaggaaaacatttgggaagagtgggaatggggggaggaggaatggcggtggcatttatagagaggaagtggcgcggagcaacgaatggctagtgggagcatttaggaatggggcgggaatggagggagggcacgggtggcatggcatggaagggccggccggtcgtggactgcttgcttcatccccacagctgcggcccacttcgctgcagaccaagacaagaagaggggaagaatggaattgaacagaatgagccaagggcgggagcagaggacggagtcgagagcgcagctgccaccccgcgacgattgggacggacggttgctacgccgacgaatggcacagaaaattgccgaagaaagggtagggcaaatgagagaagaaagaggccgggagggaggaaggcatgaccaaaaaaggaaaaagagaagggacagagaaggaagagggagaagagggaacgcatggaacggagaggcagagacatcgcgaatatgaaaacgtgagagttaagtgggaagaagtgggaggagtagcagagggagagagggttggcccaaggccccgtctaggaaggcactcaatgccgaggaatggcacaaacaagcacccctccccttcccctccttctccaacccccgcctcttctgttttctttccgccttcccccccccgtccgtcctcatttgtgtgtcgggaaagagtcggccaacactggatttaaggtggagcataacaggagccgatgcccccgctatagcagctccctcaaccacaaatggactactgactgagttagttgggagggaaaagagtctgaggagcggggcgggaggagaaagaggcgggggaagggaaaagaagggggaaggagaggagagggagcccctgaggcggaaagggcctttgcccgtccagcaatttcctcccccccccccccccacaatgtccgtccctcgccatgcatttgttttcttctcccgtgcatcccacccacccgtccatcgatggaaagaagtgtttgaattgtatgaatagggaactctaccacagcatcaaaggaatggggaagga

SEQ ID NO: 15855 - DNA, 2492 bp, Heterodera glycines
  unsure (1)..(2492): unsure at all n locations
acataacaataaattgttttttctttacgaatttaatttcaatatgttaattttccttttctacatatttctcatgtcattaagtacaacaaatttgttgtcagctttggtgttatgtattaatcattattcaaattaaaatttgactctttttaaatccacaaacatcaaccaattcccaaattgctgttgaccatttcttctcatccatttctgagccaattgaaaataaataaaaatattattttttgatactcaacaaatattcagtgattagagagaggatcaaaagaactgacgaaagattctctcctcaaaaacttttcaagtgcatttttcaattttaaatacaaaaaataaaataatgcacaaatcaatggctaaattatttaaattcaaattaataaatggccaattaattcctctaacaaatcaatttttattttattgcctcaataacaattaaaatattaatttgttttttaatttatttttgggaaattattttacagacaaacatattattattctatgattgttttccttcttatgttccccaattgggtgcatttttcctctgttttggcgctttacatattattatttttcgtccgtccgtcccctccatttatattttatgtatgcattaattattttcctcatcccccgtgtcacgcgacaaaaaatttttgggaggggtcaacaacaaaacacgttttgttattttggcgcactttgggggataaataactccaaaaggtatgtctaataggtgaataataattgttggattgttagagaggggaggagagactgagacagacggacagacggcagagaaacacagaaacatagaaagtgttgaacaagacattcacagtggcaattgaatagtgtgtgaaaaggaaaaggcaacagacggtcagagcaaagctatgatagagagagagactaggcgaaactgagatggacagaaaagagggggcacagagagtgtgccgaactgaaaagcggcagaagaagcaaaggcatggggagcagcggctggtggcataattggacggacggcgaaatgaattttgttccccgttcgccccgttttcccctcgggggcagtcgcccccggcgcggcgacagacggacggacggagggagagggagggacgtgtttttcgagcgccgagacaaaaagtgtgtgtaaacaagttcccctccctccccccccccccctgtgcttccatcggctgattgatgaattttcgtttttgttaccgccaaattccttttttttcatctttttacgcagggtattgtttttctgccccatctacaagcggataccgtacctgtcttttttataaatgaataccgtattctttgaatatcgtattttcccttctacatacaaataccgaaacaaagctcactgtcatatgcaattatcgtattctccctattaatgcgagtacagtaatgtccttctgtgtgctgcggataccgtcctccttccccctttctgtcaatgttgcgcccataaccgtgttctctccccatactgcgtttctttaggtgcaaataccgtacccttccctccctctcgccgccggtcccacctgctgccgataattcggtaattaacttcgtttcgcttctcccccccactttgcctttgctgcttctgctcattgtcagtgtttgcacacttttggcgcgtgcgttttgcgccttaagcaattgtcagtcaaagccaaacaatgaatgagtgaggggcacggcaaaagcttcgctctgtgccgtccattccattcatttgtttgtttgtatttgttgtgcattccctcaggctaaatattgtaattattgctaatggcaacatcataatcatcatcaaaatcatcattatggcatttgcattaactgttttgctgggcttcttcaaccaaaaaaaaactcagaaaaaaagaatttgctcatttttaaaaccttttaaaaattaaatctttgaaagatattattattattatttttttgcttattttataagcatttgggcaaaactttcgtcgacaactgacggacaaagacaaatgacacattcaattttctgaaaaaaaacatttccttcttttctattgcttttgagcagcacattcactcacaacaagaacagaagaaaaccccacaatgaaattaatttttaaaaatattattaaaatgaaatgaaaaacacttcatttgtttgctttgcttggcattcaccccgattcatcctttttcactattcttttttgcggtttttgatcaattttgggctccgttactttttgaaataatttggataactttgctcaaaaataacaagtcttaaacttatctggaatttgcttacaattttcaaaatcatcgttcggtttaaaaaaggctaatttattgtcactttggtcacagctttttttgatgattttttaaatgccaaanggttgtaaatttaa

SEQ ID NO: 15856 - DNA, 2529 bp, Heterodera glycines
cggtcgattgtttcggttttttaattatttcggtcgaacggtttcggttaaaaaaccgaaaccgaaaaaaaccgaaaaactcaaaaatttctcggtcggtttttttggttaaaaaccgaaatcgaaaatcgaaaaataccgaaaaaaccgaaaaaaaccgaccggtccgatctctactaaaaatgttttaattttcaatttttccaatttttctaaggcattcatctggtgccatacccggcacaatttgctgtcccattgtttcccgatgctgtgaagaagcaatgcttgaaggaattgaaacagcgatatgaaaatgtggaaaaataaaaaataaaatttatttttattttttaaattaaaatttttcagaaagaaattaaaagtccgccggaaaattttgaagaatgggttctgcaccattttggaccccaaattttggatgtgttcttcaatccgtactccaaaaaagtgtggacagtgaaaccgtcgaaaatgtaaaaaaaaaatggggcaaaataattttaaagaattttttttttattttaggtctccaatttgggttggcactcgggtggcaaaattgccacaagaaaagctggaggaactgtgctcaatggatgccaatgtgttgaaaaatgccgattttggatggggcccaaatgcacaatttaatgtaaataaaataaaataaaatttagaatttaaatttaaattttgtaaaattaagttcccaaaatacggtggcaccggcgccgtgtggaaaaatatgacggagaaattgccatcggaatggttcaaatataattcaaaggtgggctgttttaataaatttatgtatatactatgaaaattttcgtaaaattagtgacaaaattcagaaaattttcattttttgcgcatcgcaaaacgaaaattttcttggaaatctattaaaaattttcattatgaatagcaaaaaaaaaaaaacatcacccggattggtagagagttaatattttcgaaaataggatggttttttctattttttatccagaaaatcacggggttggacaaaaattttagtaaaaaaacgggatttgaatcggggctgaacgtaattacggattatggaaattacggcgtttttggatccctgtgatgacggattatggattaccgtaattgaaaatccagttacgcccagccccaggtaaactcggcactttacatttggccaacattttgtggccaacttcttccggaacttccaaaaactcggattttgtgattggctttctcggcgccattttccctaattttgcttttttccaattaaattttaatttttaaatttaaatttttttaggtccttcgcgttgaccatcgccaaaagtgtgtgcattacgtccaactgaatgccaatggtcagccgacgggcccaacaaagtcactgaaatacgacgcactgatcaactccagtcccatcgacgcgttcgtggcggacaacaaaatttgcgagatgccgttgttggagcacaacaaagtggggggtgggggggggagtaattagttggactgctcgagattctcgatcaccgttttaaattcatatatttctatgggggggggataattaatggtaattaccaggactgctcgagattctcggtcgcggttcgacgaaaaaattcataaaaacgctaaaaagccataaaaaattcgcacgcaactttttgcatccttctatttcagtcccaatggtatagaaatttcagtaccgctctctaagattgattatttttcggaatttcttcgctgaaatttaaattttgccttagaaagggcttggattcaattagttcggagtaattaatgtgtctaaaattttttaggtttttgttattggcgtcggattgaaactgccaatgactgagttttgcgaggtaccctaaaaaattaattgaaattttgaaaaattcaaatgtctttaagaaatacacttggctctactttcctgaccctgacgtgccgttctatcgtgtcacatttttttcacggtaaaatttgccgttttcagacaaaatcagaaccccgccgggaactctctaaaattttgaaaaatccgaaaattttttgaaaatccatgggtttttccacatttaggtatggtgaagtaactccggacaacaccaaattttggtccgttttgtgcgaatgcgcacggcccagcgatgacacggtaattatcaatcaattaattaatgaaacagtaaaatcaatcaattaattaattaatgacacggaattaatttaattgatgacacggtaattaattaagtgattaattaattaatcgactgattttttaagcaaattttttaattaaattgtgcggatttttaagatgaccgaggccgaaattcgccaatgggccatcgagggtctgatcaccaaatcgatcattaaaggtgagcaaatcatcaatgaatattccatctgttccccaaagggctatccgattccgacggttgaggtggaaaatttaaa

SEQ ID NO: 15857 - DNA, 1959 bp, Heterodera glycines
ttttgtaatttttttttcttatattagttgaatttctgttgacatcaataagtgtgcttagagttgcttttgcacttctcttttatatgcaaccacgcgaaaacgaccctcacgcgaaaacggccacgcgaaaacggccacgcgaaaacgtcctggcccgcccaaacgcgtgagtcccagttgacccatagtgagcattaagcataaaacaaaatgccaactatgtacataaattttaaaattttagtggagaataatttgctttgccaatttttttggattccttcaaatttggaaaagggttcggaattgattgaaagtattatccgcgaaaaattgttacatttcaagaaaaaaattatgaaaatttcgctcaatttggaaaattttaatgcattttttgagtataattggaagcatataaacattaaaaaaaagtgctaaacagttaaatctaaaaaattaatgctcaaaatcctttatttttctcaaaaaaatattttaatcgacgatcaattcaccgaagatactttaattaaaacagtgcaagagcattgattggaaacgcgataacaaacgaatactcaattcacaaccatcttaatgtttgtccacgtgaaagataaaagatacaaaggaaaaatggttccaccataaaaggctatctatttaagtctacgtggccatacattttctcataatttaaatatttaaaagctttttaatttctaaataaacttattcttgaatatactcgagaaaggatagaattcttgtttcctcattatatataatttctttaatgccagtttgcatgatttgacacctaatatgcatttttttttaatatagtcgcgctacaaaattacatttttagattggttttttttaattgaatcaacaaaatgtctaccgaccgatatgatattgtgttgtacggtgcttcaggctttaccggccaacatgttcttgaatcattcgtaaagaatggtcatttggaccaatttaatttcgccgtcgcgggaagaagtgagaaaaaactcaaacaaacactcgaagacatcgaattcatcactggtctggtgcaaaataaaaaatcatagacatacataaaaggaatttaacaaaataattcagggaaagttttgaccaaaattccaattatcatcgccgattcgtccgatgctcagcagctcgcagaaatggccaaacaagccaaagttattgtcaatgttgttggaccataccggttgtatggtgaagcggtggtaaaagctgcggttgaaaatggtgcaagtcatgtcgacatttccggcgaaccagccgtttgttttccaccatacaaaaaataataattgcttctcatactcatatttcactctcacttcagtggattgaagcgatgcaaatgaaatattcggagaaggcaaaagagcagggcgttttcattgtcagtgcctgcgggtgggactctgtaccgtgcgacttgggaatgaattatttgaagcagtacttcaaaggcactctttcgcatgccgaaacatttgctcatattcaaatcggggaagcggtaagcccaaaatgaaaaaaacaaatatgcatttttagtcattttcagggctattccttcaacgccggcacttaccaaacattgattttgggcctttggcaggccaaaaatgatggtcttggaaagatacgacggtcgattatgcccgagaaaatggagaaaactaagtggagacctccaaaaaggtacaggcacttactaatcccaacaatttaaatgctttttctagaggaatgttttggtggaacgattcattggacgcttattgccttcctttcatgggtgcggacaaaagcattgtgcaacgatcgcaatatttcgataacattgccgacaaaacataccctgtccgtaaagcctttcggtttttcattctttagtgcgttttt

SEQ ID NO: 15858 - DNA, 2284 bp, Heterodera glycines
aaaaaagctaaaaatgggaaatagttatgcgtctgaccactggttatggatgagaatgctcaaaaaaagggaaagagaggaagagaaaatagtattaaaacgaaaataaataaataaaatatcagcgaaataaatcattaagcacaaaaaatttaaaaagtttggggaagcctaaaataaaggacaatctttaaaaaaaggacattttaacttttaaagatccggcccctccaaaaaaggacaaatctttaaaaaaagaacacttggcagccctgcatttattgcattttgatttttccaattatttctgttttacagatgtgctacaaatcattcccgttttggttgccgaattggaagaaatgcttgaaaatggcaattggaattacacaaatttaagccatttaaaaatggtggaatggaaaatgctggaatttgcacttcacaaaaggggggaaagccaaaaatggaaagaaattcaaaagctgtggaataaatggagacgaaaatttatcagaaaatttaaaaatgcaaacaaaatgccaaatttcaaaaaagtaatggaagagttgaaggacaaaatggaacaattgagagcggaaaaggaagcggaatgatgaaaaaaaaggaggaatatgttctttgtatattggcatttgttggttagaatttcgttctaatttatctaactgttgaaaaagattaataattgaaaaacaaaaatcaaaaaaatacttttgcactactcaaaattatcagatttgtgataagaaaattaccaaaaattttttggttttacaattcgtatctgacaaatgagtgtcaattttattggttcgagttttatataaataatcaatttaaattatcttatggctaacaattaatttaaaaatatatattcgatgtttgagtctatgcgccgtacaaaccgtacaaaggcgcgccgccgggaaaattttttgcctagatttgataaattttgcccccaaaaacacttttttaaaaagaatattaaatttattattattatattcaacaaataaagggaaaacataaagtagataataggctgaaaaagggcaaatatttcaaatcggattgaaaatttctcagattgggcccatccaaataaggacaacgcaacggcaattcacttctgctgaccacttgggactggcgttgtgtccaccaaactaacgagaaaaaaaaacgaaagtgattggatagataagtaagtagtgattagtagggatgatattcttagctgctaaaaactgctaaaatagttagtttttaggttcttaaaaaccccccaaaataggtgctaaaaattggaaaaatatgtgccaaaaagttccgaatttagggggggggggtgtaaaaccaaatttatattcaaaaagcaaaaatattatgtcaaattattgagaagcacaatttttaaaatcaactcttcaataaaataaataaatagattttggagttgaatttttgagaaattttttaggttaggttctaaaaaataaaacccgtagcttaacaacaaccgaaaaaaaatgtttttcgtgcttttcaggtcactgggaattctggaaaaataggaaaaaccaaaaaagcgtatccctagcgattagtaccaaccatgcactgatgtagtgatcaaatgtatcatcttcatcactttctgacaaattaatatggctccactgatcatcaaatcgccaaacaatcgcttccttttcccacttggcccatttgtgctcatctcgcgaaattggacaacgaatcagcaaaaagctacgcttatcactagggagcggattagtaatcaaaaatgttttttaaagatatttttctcaaaatttaaaaagagagaacattatgtatgaacaaatgattaagtcttctcaaactcttttaaaaccagagttcggaatttttttttcttcaaaataagacaaaatgactgaaaaaatttacgttaaaaatcacgaaaggatggctgaattatattaaaaaaaacaatttagaagaaaaaattacaaatgaaatctaaaattttgaaatttaaattttattttttgggtttttggcctaatgcggtcccaccgaacccaaatgattgataatgtaagattaataacatactcatcataaatctgtttcagtgtcaatcgctccccagttgaattgttgaacaattcaaaggtcggaataccaacccgaacactccaaaaagaaaagcgaaagcgaatgtaaacgatgaaattggcacgagaaa

SEQ ID NO: 15859 - DNA, 661 bp, Heterodera glycines
caaaaaagaaaatatctgaaaaagaatgaaacaaaattatgccgaaattggtaagaaagtcggagttagccatagaacaatgaaaaatgggaagaaacaatttgaattagcagtaaatagacggagaaagaaaaaatggagaaaattaaaatttattggcaaataaaaagagaaaatccaaaaatgagtgacaaagaaattgcgaaaactgtgaacacttctcatcagaatatttttaattggaagaaacaatttggagaagaaatggttcagagaacaactgaagaagaagcgtgaagtgccttgtgcttttcaatttgaaaatatttttttggatatctttttcaatttagtttcagtatttactgaattagtaacccccgtggttctaattcagtaaaaacggtatttgggctgggattttttatgccataaaaatgaccttttttggcattttatattttctttaccattattttaattgaatttaattaataaaaaatattttaatatattttttttttcatttttaattgcataaaaacccataaattaaccaaaatttggtcattttttgacaaattctgttatcaaatctcgctcaaaatttcaaaatttttccggcggcgcctatcgtcaccgccggaccccgggtcccgga

SEQ ID NO: 15860 - DNA, 1622 bp, Heterodera glycines
  unsure (1)..(1622): unsure at all n locations
ttaaatcatatttattttttgatgaatttttgagatttttataggagtgcaatttgcttatttgactgacaaaataactgagtattatataaattgtttttcgagactgaattttattatcaatccattatttctgagaaagttttttttttctatttttactttatttttaaaataaataaaattttgtgtccaattttcaggcccaattttggtgtgataattaatgtcgaatatcgactcgacaaaatctcgagtttctttttggtattggactcaattctcgggaaactttcggtctcgagcagcactaataataataatgtccactgtgtaatgaacaattaaatgagagtgactgacctccgcttatcatttgttgctattcatctctcaattaactaattaattaccttaattacccttacacaattgccaaggtcacttctctttcttgctaggtgagcaaaagttttggagcaattactacaaaacattaaacagttgttgctctatctgcagaatatatttttaaatggcttgaaaaatatgtataatataaaaatttaataaaaataaataaaaggattttaaattcattttccaaattattcattcacaataaataaaataaaaaagttattatttatccataaaaatcataaaatagtttatttttaagttttttttaaattatatatttttgccttataaattaatggaaagaaatattttttgaatttaaataaaatttccttttttccgttttaatttaatgctttaagtcacttgttcaaaaaatgcccaagttatttttactaattatatttttaaatgcccaaattcctcccccccccctttccttttccaaattttcgccctttccttttccaaatttcgttgcgctttctcttttccatcagggattcctcttcttctctgttttttcacaagcctcccatccattcgtcttgcgcactgactctgaccagcccccccccaaataacaacaatttctcatcgattctttccgtccatcgttatcgccgcaactgggtcttttagttggcgtcgcaactgcctccaccagtcgccccccccctaagtaacagcaatttttcattgattcttttccgcccatcgccgttatttccgcaactttggatggcgttgaatttgaaaaaaattattcattcgttttatgcgattaaagattttaccaaatttaatatttaattcttttaatttttttacttatattcaaataaaatttaaatcccgaatcccataataaaaattaggaatattttctgtcatgtggtcctttttcaaaattatttaatttttttcattcagtatttacaaatgattgaaataattattctttatgtaatattttattcaatcatcatgcggctttgccaccgaatcactgcaaagaaaactactttcatccaaatcttcgtcaagactcttgggggaatgacgctgactatttttgcccattcctttgacaccatcgagaatgtgaaggcgaagatccaggacaaggaagacatcccaccggaccaacagcgtatcatcttctctggtaattcttccgntttgttaaacttttctta

SEQ ID NO: 15861 - DNA, 3015 bp, Heterodera glycines
tcgtaattaatgcatattcagaggctttttacaatccacgttaattggcattctgtccctcccaccttttctgtctctgttcctccgattcctctgcgtccctgtccgactcgtttagttttctctggttcttgtccacgccgtcactttcgtcgtcgccgtccgacccctcgtcatccgacaaatagccatgggcgacgaagaagccgtcattctcctcatcgtccatcacatcgtcgtctctctaaattgtgccggggaaggagttggactgttctccggccccccccatccgtccatttcggcacctcaatctcttcgtccgatttgcattcgtccgcatcttccggctcctcctcccattcttcgtccgagttctcctcatagttcagcgtctgccaaaataaaatgcagaaacatttcacaaattgtgggccaccttttctcggccaaacggtcgacggccggtgatttgggcactccgacgccgccaagtgccccaatagggcggccgataattgtcgtgaaaatgataatactttggcttttgcgcatcagtgtttgtcgcggtgtgtttttggcgcttcgttttgcaacgcgccaaaaagtcagaggccttaaaaaagggggaaaagtaaacaaattgaaagacacaattcgaaattgtatgcgtaatgaccatattttcagtcttccacctcatttgcagcgctgcggagaaaattgtggtattccgtctcatttaggggctaaaatttctcagaataaattatgtaaaattcaaaaaaaaatgtgtttttccaccgacccttcgcattagcaccggcgcaattcgcatgccctccttcagttgaaagggtcgaaagcgcgtgttcaaaatgctgggcggcacagtgggcggtggcgccggtttgtccactcggtggaaaaacgtactgatgacggattgacgaggacgcttcacactgtcggcattctcctaaaaacaagcacatgcaatagttttggtaaccatttatggtcatttttcgttgcaaaactttttccgaaggttcctccggcaactccaatgccaattgcttcgtcgattctttccgttttggcgttcttgtcggagtttgagttggcgttgtttttggtgttttcggtgtctttggggtacccttcaccatttgatgtaatttttaagcaaaaattattaatattgatagaaaaatgggctgaaaataaagtgtttaatcggattataaattaagaaggtgagttaaagcctgggaagagaagcgcaaacaaaggcaaggcttaaaaatagacgcaggcatcaatttttggcgccaaaatcatttaggcataagctgaaagtgggtcaaataaatgagtggcttaaaagtccaattttatgccaaggctttgaattttgaattctcggcattagtttttggcgccaaattggagttaatattcgttcgcgcgaaccgtgccataaatccccaatttggtgcagatcgcgatcggctttatcaaatttgaatttcggcatttgatttaaacgcaaagccaaaatacgcggtattttgggtattttgattttaaattttttgttaaaaaacattctaaaattgcaatcgtcgtacatagatttttggcttttcagcaattttgcactacaatgggtagcgagggcaaaattttgactggagaaacaaaggaattcggatgaaatgaattatttgcggcaagtgggtgagattttgagtcgcggaacggtgcgcactgacagaaccggcacaggaacaatttccatttttggcatgcaaacgcgctatagcctccggggaggtcaatcgaaaaaaatgaaattgtttaaaaaatggcggggttaagggaccattccattgctcaccaccaaaaaagtgttctggaagggcattgttgaggaggtacaacaacacacacttaagaaattaataaagttttcattttttagctgctttggtttattcgcgcagaaacgaatgccaaaacgctttcttcgagaggagtcaaaatttggggtaccaaattatttttaaatctatttttgtattacctacatttattgctcaattaaacataaattttgacagatgccaatgggtctcgtgcctttctcgactccgcgggtttcactgatcgcgaggagggcgacttgggccccgtttatggcttccaagtggttattattttgagagaaattgcttatttttgccttaagtggcttcactttggcgccgagaatcgcggcgcggacgccgattacacggccaaagggactgaccaattggcggaactgatccaaggcattcgtacggacccgaacagtcgacggcacattttatgcgcatggaatgttcttttttattattgatatatttgtggaaatttgtaaatttcaataaagcatttttgaaaaattgattaatttggggaccaaatatgagggccctgctgacgtagaccgcgacagaacttatgttccaccataagtaattgtttgaacttgataaaaatcagaaaatcagagggacatggaaaattttttggttctagtcggttttgacccggcaatcaaaacatcagcgtgaagaacagacttcggcattgaagctcactttggtttttgtgaccagcttgttctgccgactagcgcggttaattacaccggacagccttaactgacgatcgtgtaatcgatatgaatacaaaacgaagaaacaatatacaacgcatgtttttccctttggaggttttaggacaatcaacgtgaatccgctgaatactgaaaagcagggacatcctgaatcgcattaacaatactaatttagaaaattatagaccaaaataagactcactattcccgagctaacgccctttttcggatgcggaaggaccaccccagatatcttatgatcgcggctatctatgtaatgcaagaattattgaaacaggccccgtggtgtgctcactgcggttgat

SEQ ID NO: 15862 - DNA, 1139 bp, Heterodera glycines
taatgaattatgttcctacatatctccccttattacatagtaattatttcacgaagaaactctcataattcaggatttctaatatcaaataatactcgtttaaaaatctcctgaataaagaaaaatacgcactttaaaatcgactgaaaatagaataattcgtctctaataatcgatattttgatttcaaccacttccgaagacaagggtctggctactgccttgacagagacttcaaaattcaggaacaatttgtatatcaagggcttcttagatttttcagatggtttccttataatttaagttatatctgaataatcaggtctctcgggatgattgtagttataacaatacctttggatgtcataaatctatatttgtctcataaaactcgattggactcataaaactcgattgcactcataaagtgcattagagccgaaatcggtacgtagaagcgcttccaattctgaagtcattatgaagcgatgcgtttcctttatgagagagaacacaagacattggcacgtgcgcaggaacgcgaggatgagcgcaattttttgcgtcaatggttgctcggtgagttaaattttttgttcattagacctaactataccaacagcaatattcgttcattaattgccattaaaatagcatttattatttccctttgtttcaaggaggcccacaagggcaacagggacatggaggcgttcaacaacaaggacaaggtcttcaaacgttaataaggccgtttgagtttgattacctgaacgtttaccaaaaatgcttatattgcatatgattataaaaatttttcgccgaaaatgcagttttgggtgtgctttagtcaacccccagaaaaaatggcacaaatgatgtatcaatcgattacacaaaaaaataggtctccacttgaggaaatgccaaaaaaaccggtttttgaaccggtttaaaactcgaaaaattgagtgaaaaggagggctccatttaaaatggtcaaattcggacaaatttagtatcattcgaaagctcttgatgagctaagtctaaaaaataaggtataaattcgaacttatgccttctaagcactgggacaactgagtcccagtggaatagacaccagtaccaaagaataa

SEQ ID NO: 15863 - DNA, 529 bp, Heterodera glycines
agtatgttaccgtaaatgactgtttcgcttaacagctgatccattctattgctttgatggcttacataaatttttaatcatgattgagttatgcccttacccaacggttaaagggtagagtcaattgtgcaatgtattatatataccatctttattcattgatagtgtacaatttaaattaacatgttttctgtgcctagtgagtacaatttttaaaaagcagaatttatactaatatgtatgttcgttaacaattaatattctttctcttttctcccaaccattcaccctcagcagtttgcgtgctgcactccccatttaggattttattgttaagcgacacactcattctcggtaacaccgtcctttttgtttaccgtttggctgttagatggttagtttccccgctgtctaacagcgaattccccatgctccgctgtcgaacagcgaatcccccacttactgtctaacaaccaatcagtaaacaaaaaggaagtatgttaccgtaaatgactgtttcgcttaacag

SEQ ID NO: 15864 - DNA, 1953 bp, Heterodera glycines
atatagccatcggtatgtcgtttacgagtagggccactcccggtcgctcatgttgctgaaatggcacgggtacacatgtaccgatggaaatatcaatacccagccagctcagacttactccaagaataatttggcgctcagcgggaggttggtcgatttcgtcagcccaaatccaccagcgttgagcgtcagggatattgttgtctgtagttggggcataagtagtttcggcataggtattattgttgctgttactgaagttgctcatttggattattttatttaaaattatgtagcgaaaaaaacgaacggaggaaaatggtgcaagaatggcagaatgagatcatttgtccaaactccggcaccgccctttcattcagtgagggatgtcacaaagaacatttgttgccatagggcgcggttgtggggacatacaatgcgacgatcaaaacgaatgtgtcaatcaatcatcagattaggggcacaggaccacaaagactaagggctttgtccatagttaggcccgagaatacacatacgcggtaattagtcaaaggattaaactttatatttggccaccaaaaatttggacacagatgtaattaatcaattttaatccgtttagaggccgtacataacttacaaataaaaaaattaaacattttaaatatcaatgcatgtcgtccatgtcaattctttccaagcactttcgttttccttgcatgtagttgtttcttggaccacctctacagtatgtaggaccgtaattatcgtaccaaaagttattttgactgtcattttcgtcattatcgttgtttttattgtttctgtttttattgctgttgttggtgttgttgtagttgttattacgtggctgatatgccataaattgcacagaattcatatcgctgagtcgcatgttgagcattgtacaatgtttgcaccggtgaaagttcaagtccacacctccatcgttacactctgctatgtcgtccttacggttgtatatctcttgtgcacacattttacatagtttaaatgtcaacatgtatttttgtcttttcaatttccataactgttttgtggggcgcgcgtagcagtgatcatggtcgatcacatcagtttgatgttgttgatcttggtgttgttgttgttgttgttggtgttggtgttgttttggcattttgtcctcatgctgaaactgattattcatacaaactccttcactttttttaatgaaattgtccatttttcaaaaaattagttttaatgaatgattaaagtgtatacttaagcatacaatctgcacttaaataggctactatgtgcgattttttgaagcgaattttttagcacaaaatttgaatacaaattttgagggtgtgtagtgagtgagtgattcgaacattcattctttcaaaaagcacgcattcacttttcgtgtaactaactcctgctcagatgagtttgctcgatcaattcaagaatttgtttaactgttctgcttatgacgttagtaacagactgcttagtgatgctgagcgaacaaaggctttagtgttgtgtaatcacaaacttctcactaccatgtacaaggaccgtaatggactgaatcacacgttcacgtgtactggtctgtccgcagagggagcagaatcccttctcgcgtatggaaaactgagagaaccgttcaatatttctgtcgctgcccattattacgcacgtcatcgaataatactgagtcaccccaaagcaccatgtgctattgagcgaacaactttgtctcatcgcggcggtcagcgaaccaccgtattaaagttctatcccttggaactcgtccgattctcctcctattgtgcaattccatcacggtctcctcatatgaacacctacgttgattatgctgattactatgctgacgatgatgatgatgaattatctgctactacgctt

SEQ ID NO: 15865 - DNA, 735 bp, Heterodera glycines
aaatgaataaaaagtaaaaaataaattgaaaattatagaaaaataaataaataaatgagaactcgaagctcaagtgccaatcctcatctcggtcgacttcatgttcatccgttaggcatatcaaaacattttccatgaattttgaatcgcttgctgagttttgccgttggatattttgtcgtcctcattttcttagccattttggcactgttcgcaccggtaattgccatattttttgataaaaattatgtcttaattaaattggcgcatgcgtaaacaaacggtcacatagttttcggcttggaaaaaaaaattatgttaagtaataattaatataaaaaacagggttcgcatgtatctttatttctaagatttgtctttatttggaggggcagatcttaaaaagtgaaaatgtccatatttctaagattttttattttcaatcttcccctaatttttttaagaaaatatttgaattaattcaattttgaaaaaatgcatttttaaaccgttgtagtggagcgggaccggaattttaaaattcaaaaattaaaaaaattcaaattgtaatttatttcaagtgaaaataatacaaaattaaatttttattttataaattccaaaaattaaagctagattaaattaatgaaaattttcaaatcgagttttgaattatttcaaacaattaatcattttgactaaatgatcgaatattcctttttttcagcgcgcttt

SEQ ID NO: 15866 - DNA, 1754 bp, Heterodera glycines
  unsure (1)..(1754): unsure at all n locations
cacaatatttaaatttntggagactcttcaatttcatggtaaacactcgatgattttttgagctctttatcaacaaaggattgctcaacagtgccaatgatttcattacggcaactgagcaaatttgcttaaatatttaaaaaaaattaatatacgaacatttaaaaatgtatttaaaattatttatcattcattttatcttataattaccgctccaaaatcacgcaaatatgagctgaaggataagcttcattttaaggtcggttcttggattatctaagtaagacaaatgaaaatttttttatttttaattattattttttatttatttattttaaccaaacaaattggttaatccaaaattaatcaatgcatattttgtgttaatgaatgtgaagcggattcatcactgatgaaagaaaaaaagttcattgactcccaaaccagtgaatttatgcatacataattaaaataaactgtagaataaaaactaaaagattttagaaattctcggaaattttaatagaaaattactctgaaggattgaattttcattcttgaattttgtcaatgcttttcatttagtaaattccactctcttaaaatggtaatttaaaatggtttaaagccttaaacccggggacacatcagaatctttcaaattaaaaaagttatggcacgctgcgccgaaaaagccaacaaaaatcgatttttgagatttttttgggcatatgaaaaggcgatttgcttggtccaataatacctcggatcgattttgagctcgcttttcctagtgctgggtcgtttcgtaaaaactgccaaatttacaacatcctaaaaaatgatattgagtcattcgatagcaagctcttgagttgctctattatcatgaaaaatctcagaaaatttatcggggttttccgaaagttatgtctattttttaacttttttggtcagaaccttctggaaacacaataaaattttctgaaattttttagactaatagagcaagccaagggttatcgcatgatataaatttttttaatttggttgtgtttaagagaagttatgacggattttgcccgaaaaatccgtaaattagtagttttacgaaacgacctagcaccgcttttccttaccattcatgcccacgaaaagttttcttctgcggattaatgatgaaatctgtaacgcctcctaacttctttgatctttttgataaaaaaaaatataacaatttatttgcaattgaaattttaccaaaattaagattttgattaagttatacgtgctttgctaaccaaaaagcgttaataaacaaattttttgcctattttagtgcctattcgaaggtctttgtgcctatttaatgcctagttagctattatgtctaaaaattgcatccctagttattatataaaatagctaaagtgactatgataaaatggatattacgataatttttcagtcaaaattgaatttcaattaaaattttagtataattttaaaatattttattgttttttgttttattcattaagagtattaaatattaaatggaaggtcagtattttctgaacagaaaataaagaaaaaaccgagaaaaactaattaatgttttaaaacaataaaaaaaaaaattaaaatagagaaatgtttctattataataaacacatccaaacccgggcattaattataacaaatgatttggatagaaatatatgcactaaaaaatcccttaaatatgccctaa

SEQ ID NO: 15867 - DNA, 2204 bp, Heterodera glycines
tttttttccaaaaaatttccagaattttcagtgtagttggcgtcccgatcgctatgaaggagtgatctgatcaaaattgctgttaaagacttttttgatcagcatcaacagttagcatggcagggattttttcagaatttttggcccacaagatattgattttattaaagaactaaaaagtgagtctaaacatatgactaccaaaaatgggggtgaagttgacttttgttttgtaattattagcgatgagaagaaattaggctgtaaacatacgaccatgactgtataaagcaattacaaatttatgttaaattttaaattgacctcgtggtggtgaacctgcaccgtttgtaacattggcaaaaatgatcacaattattaacgaaattattaaaatttgcatttttatcattttaatttgtttttttgagagttaattataattatgaaaaatatttcttattcgacaaaataaatagcgatttttttttttgcatttccgttgtttattattgcatcattaaaattattttacgttgccattgcaaaaatcaataaacaattcatgatttaaaaataaggaatattattttttgcaaattttttttatatgtaaacaaatgatgaatattttaaaatctttgggattgataattctttggatatttccatttttttatgagctcctagggacttgaaaagtaaaaaaaaaacttagcttaaaattatgtctatcaaattgagaaattagcgaaaattatcgaatttgtttaacgaaattggattgtttttaacttggtttgaagctgctaggatggatttcggtactcattaagtttgtatcccccttttgggtcaaattttttcaaaatttttttttcttttttattgtcgcaattgctttttagattgatggaaaagcttaaaaatttcactcttgccgatttattcaaagtattggctctaccagacaaagaattcgaagaatggctcaaagaacttaagcttctacacaccacccgtttttgcgactgtggcaatgaaatgagctacaaatggaagcaagatcgacaacaaccgctttggatatgctattcgaaaaagaatcacgacggcaaacagccaactattggcttttacactggcactttttttgaaggagcccatttgtcgcctaaacaagttttaaatacccttaatttacacgatcaattgatattaaggttttggaattttcctactattgggcacgaaaattttcaaatgatgaaatcagttttcaaatgcaattgggacgtgatacagtgaccgattggaaaaacttcatgagagatgtgacatcagaattttacagcagaaatccaatcaaaatcggttttttgtttgcttgcaaatgttttattaaatgataagtttaggcgcagcaggtgcgacggtggaaattgatgagactgtttctgattttttgtggcgtaagcaatttggaggaccggatattttttataatttgtggacccaaatcgcggaattgtacccaataagcacgtaaatctccttttatttgttatttaaagcaattccgacaataaaaaagaaaaaaaaattttgaaaaaatttgacccaaaagggggacccaaaccgaaagagtaccccaactcgttctgatatattgggtggggagcagggatgggccgaggtttcgcttttcgcatttcgcctttcgcattattcgcattttttggcgtttcgcatttcgctttttggcgcgaaatgggacttttatacccacaagaattggattaaattcccataaaatttttcaaaattttacatataaattggctaattttcagtgaaaaactgtttataaatgatcaaaatttccaatttttttccccagcggcgtctatcggcaccgccgcgcccccaaaactcctattttttcttagaaaatggcccaaaatcgcaaaatttggtaatttgatgaaaaactgttctcagcggcgcgccaaaactcttatttctcattagaaaaatgatacaaaaatcacaaaatttgatgattttttggtgaaaatctgtcaacaaattttaatcaaattttcccggcggcgcctgccggcgccgcctgccccctcttcccaaaaagtttttttggaaaaagcgcgcctcaaaaaagcgttttattgatttttaaagttgga

SEQ ID NO: 15868 - DNA, 2268 bp, Heterodera glycines
tgtatgaggcaatcgaaaaaaagctcgtaaaagaatatatgtaaaacaataggtagatactgtgtgaaatttttttgtttatctacatttaccatactgtaagtaaaggattcgttttttaaggactagctaggcattgtcttttgtcttattggtattgtagttttcagtacaaaaattcttatgcaatttctttctgtgcattaaataataaatttaaaaaatatcaatttaagtttcgtatacaatacatataagctaaacaaagaaaaagctttcaatggaccaaaacaacgaccaacgccgtgctgttaacgaatatcggcttaatgaggacaatgaactgcgtttagaagtgggcaaagaagaagtcattctcgaattgctggagggttctgccgaaatattcggctcccagatatccatgcacaaacgctactctctccccccaggcgagtcactgaaacaatcgcattcacatatctttgctttttgcagggtttcgcgccgccgttttcacatataaaggtgcccttattgaagtggtcggtcgaacagatagtgcttacattgcacaacaaacacctatggttgggtttggttgaacgtcttggaggaatgcctccggggactcgaattttcattaaatttttgcatttccacagattatctatttgaatactcatgccgctctcgagagtatgcgaaaaagtgccgagacacaattggtggccgaccgaacatcttccgcccgtggtccacgtcttttggttgccggaccaactgatgttggaaaatcgactctttgtcgaatattatgcaattacgccgtccgggagggaaggacacctctttatgtggaccttgacattggacaggtaaaactacggaaaaaattcagattttgggaatttaataagcatttacatttgcgagactattatccttttagggcagtgtttccattcccgggaccatcggatgcctttacattgaaaagcccgcagacattgtggacggattcgatcgaaaagccgcctatgttcacaacgtattcaatttacttgtatttccatttcgattttaatttaagttcggtcacatttctccgtccgcgaacattcgactttatgaccttttggtgaaggaattggcacttgcagttcgcaaaaagagcaaatcatcttcaatctgtgatgtttccggattcattgtgaacacttgcggatgggtcaaaggggacgggtcggtgcttaatttttaatgggtacaccccaaaatctcgccgagacaaaatctggccgcagaaatttcaaaaaatttttttcgaacataaatttttcaaataaaaaattcttataaaattttttataagaaaatgtcaaaaaaaaaaattatttgttaagattttttgaaaatttttgagaaaacataatttatcataatttcataaagaattgcttaaaaattttctaaggatttttccttggaaaatttcttaagtttgaaaaaattgaaatttctgcggcgagattttgtcccgtcctcattttaattgccttcaattggtcttttgggacaggtcataaaatcccaactttattcttatgaatttcatttaattgcttaataaattttatggaaagtcccatggctttctttttcagttacgcttgcattgtgaatgcggcggaggcctttgagcccgacgttgttattgtcttggatcatgaacgtctttacaacgaattgcagcaggatttgccaagttttgtcaaggcaatgatcgattattatactattttttagtcttattttttacctggttattttttctgacagattctgcatcttcctaagtcaggcggcgttgaaagtcgatcacaagaaattcgaatttcgggtcgacggagtgccatccatagagtggggcggattgtttttttgatattttattttgttttagtatttctatggtacgaaatcatctcctttttacccacattcatttgaactgtcatacgacaaaccgacggacgaacaggaattattaattgccaaaattggagctgaacagctgccggcttcgtgtgtgccagtcggaatggtgctggcggatcaccgaactcaggtaaatgggggcagttctcccgctgtagtccactttgggtgtccagtcttcagtttatttggccacaaatttcttgttaattcttatattgttggtatcaattaaaagtttggtcttggggttttataaataaaaga

SEQ ID NO: 15869 - DNA, 843 bp, Heterodera glycines
  unsure (1)..(843): unsure at all n locations
tcacaagaaaaatgcaaaacgaaaaatacancccnncctaaagatcgtacttttttggaaatttaaaaaaatacgccccctcaaaagagatttttttcgaaatttcggaattttttttaggtattttgtccacttccgaaaattttcactgaaaataatgttattacaaaaattttaagatgtatttgattttcaattgtgaagctagaatttataaaaattggcatttttttaatgttaaattcattttttcgcagtttttagcgtatttttaaagtctgttttagcaaatattgaatataaatacatttttcggaattttttagggtttaaaagaaatattttgtctctttttagtccatatttggccatttttgagctttttagtccatatttcgggcttttttagtccatattttatgttcatatttggcgtttttaaaattttctaattgaggcatcctttttttctttacgaaaaaattgaatttacttagaaaaaaagaagcaaaaattagtaaatttttgcaaaaaattaattttacacgaattgctaatgaaaaattttttgtgcaatttttggtaagtttctcaaaattttcaattttagggcgtattttccaaaaatttatcatctttggggtgtattttttgaactttttgtgaaaatgccgaaatatggatatcaaatatggaaatatggacaaaaatctgaaatatggaaaatatggaagtaaaaaggcatcctagaagcatcaaaccaagctaaaaacactatttacatggtttttaggccgaaatgagtgtgcaaaaaatatggaaatccatacaaatcctgtccct

SEQ ID NO: 15870 - DNA, 1045 bp, Heterodera glycines
  unsure (1)..(1045): unsure at all n locations
tattcaaaattagatctaacatagcaattttttntggggaaaattacttaatataaatgtaaaaattttcacgctggcccatataaatccttattctcttaaaaaattgagtaaaaatcgtaaaactttgtcatttttggtgtaaatctgttaacaatcacacaaattttttaaaattctccccggcggcgcctatcggcaccgccggacccccccccccccccattgtaccctaatttttttttgaaaaaatgagccgtaaaaagggtttgaaaagcaaaaaaggtcgatctaaaggcttgatataattctaagctaaaatataaaattataaaaattttttcgaatttttaattaaaatttcaaaaatttgaaaaagtcccggtcccggcgggatcccagcacaaaaattgggacccggaccgggagtcccgtttaaaccgggagtcccggtcccggtcccgtcccggttcatttcccaagtcccggtcccggtcatatcaaaattccggtctctaatttgcacccacaaataaaagttcaaatttcagaaaaatgatattaaacaagcgggacttttaatctcacaaatggccaacacaaagattttggggttgccgaatgaacaagcatttgacagaagccgttgcatcaaaacgctatttaaatgtgctaatcgagaggcaattaaagcatttgcttccggacttagttggcaaatgattttggaaattttatggggtggaacgaattgccaggcatttcatttcttgtcggagtgagtaaatttggggccaggccgttttcgtacgaacacatgtttttggactataacttttttctttgccaaccaaatccaacattgttggtatcattcgaaagctctttagatgctctattagcctgcaaaatttcaaaaaatttcgtcaagttcaaaaaaagttcgagccaaaaagttggaaaatttggttttttgaattcttctggccataacttttttgaaccttaacgaaatttttcgaaattttgcagactaatagaggat

SEQ ID NO: 15871 - DNA, 984 bp, Heterodera glycines
tatacgaaaacgaaacgcataaaaatattttgaaaaccgaaaacgaaacacgaaacgaaaaaattttgacggacgaaaacgaaacacgaaaaccaaaaaataaccatttcgtacgaaacgaaacgaaaaaaccgaaaattttttgaacttatttcaatcataattaagaaacataaaactttaaaattgtatcctctaactgaaggaatgaagatcctagtaggtggaaaagctaatgtggctctaggacaggggtgtgaccaaacaatttttaaaataaagaacatcaatgacaaaaaataaggtttagggtcaaaaaatacaatcttgcaaaattggttcgaatcagttaatatataattttttcgataaaaaatgtattaaaatgttatgtttttcacatcctattatggattttaacaatttttggggaagaaattagcaactgctgaaaaaaaagattttcaaacgtttttttgcagtgtagtttttttttacaagttgatgaatgggaagtggatccggcggcgccgataggcgacgccgggaaaatttttgaaaatttgagtgctatttcatagcagattttcaattaaaatcggtaaaaacatgattaaaaaatcggtaaaataaagtgcggtcatgcgggatcgaacattaatgcacagcacaaaacaaacctgctgttttcaccactaaactaaaatacttaaataataaaacttattatttctttccaaaaaagtcattcttaagggtgtaaatattttcgtctttttcgtaaaatattgctctgacgaaaacgaaacgaaaatccaaaattttaaaaaccgaaaacgaaacgaaaaacaaaattttgaaaaccgaaaccgaaaacgaaacgaaaaaactttagcggacgaaaacgaaaacgaaactcaaaaagtaccgaaaatttaggacgaaacaaaaacgacacgaaatttcgtccagccctgaccggga

SEQ ID NO: 15872 - DNA, 1513 bp, Heterodera glycines
gaaaaattttttgaaatttgagtgctatttcatagcagattttcaattaaaatcggtaaaaacatgattaaaaaatcggtaaaataaagtgcggtcatgcgggatcgaacattaatgcacagaacaaaacaaacctgctgttttcaccactaaactaaaatacttaaataataaaacttattatttctttccaaaaaagtcattcttaagggtgtaaatattttagtcttttttgtaaaatattgctctgacgaaaccgaaaacgaaacgaaaaaactttagtggacgaaaacgaaacacgaaaacgaaactcaaaaagtaccgaaaatttaggacgaaacgaaaacgacacgaaatttcgtccagccctgattccaacccacaacattttcaattgatttcgaagccgccgtttccaatgccatacaaaatgttttcaatgggaattgcgccataaacttttgtttttttcattttgtgcgtaacatgaagaagaaactgggagaccaaaatctgactcaggttgtctcaatttttcaattcaatattctcaactttattgattttaagcgttttaatacggatccaatttttgccgagtcagcaaaaatgctgacattgattgcttttgttcaaattggcgatcccacagaagcagtcaatgcattggatgttgcgttccgaaatttaccagaaatacaaccgatgctcgaatggtttgttttttgcagtcattaacatgcaaatatttactgcgttcaggttgatgaacaattacacgggtcgtccacgcgcagatgggtcgcgaacggaaccacgtttcaaagccgaagcttggaatgtctacgagagaatgctgagcaatgacgacagaacgaacaattttgcagcccacaaaagaatccagtgtcatttcaattgtcaccctactctttggaacttcattgacgttcttcgaaaagcccaaacagtgattaaatttattgcttatttatccgtaacattccatttaagactacggatgccgattactcaaaatttgtcaaaggaattgagccgcctccaaaaaagaaaaaataccgtgataccgattcccgaattctagcaaaggttcagaactattacattgacattcccaacaacaatgctcacaattatgttaaccgtcatccccgtatcattgagtatttgaaaggcatttctcgcaattaccagatgaatccttgatcaattttttttaatattggtattatttatggaaatttgttagtttcaaatttcaataataaattattttgtggaaatttgttaattgcaataaaacattttttggaaaatagaaaaatttttacttggggcccaaacgtgtggagcccaaacgtgagggcccaatcgtgagggcccaactgacgtagaccgctacaaaatgaaccagaagcaagtaattaaaacacaacgaaataatgataagttggtgcatgatggtgcactctatgtgttccacaaattcagt

SEQ ID NO: 15873 - DNA, 1500 bp, Heterodera glycines
tcaataaaaatatcactcacggtgcgaaaaatggggttttacaagtttattggggaaaaaaaccctttacaaaataatacccctgggagaagggagtgggaaacatgatttcagaattttcaattttttatagtctaatctaatcaaaccggttcagaattcaataaaaataacattcacggtgttaaaaatggggtctgaaaagtttattttgaaaaaaagactttacaaaataatacccctgggagaagggagtgtgaaacatgatttcaaaattttcaattttttccccaagttgcaaatccccaaaagtcgcaccacgtatgctttttcagcatttgtcactgatttaaaaaacctagttaaaaattagggcaagaagaatcatcgcattgaaagaataaatcagttagagtttttattttgcagtttgtacataacagtcataaaaacgaatgaaaaagcaaaatttttggcctatggtgaacctaaagaaatgagaaaacagcaccacgtgctaaagaggtgacaaaaacgggctgatctttgatcagagagaaagcagaaggaaggcaatcagcaaaaaatggtcactaaatagcataaaacagagagagattgcctgtggggacaattagcagctgaaaatgaaacaccggtggattataaaagaaaatcgccaacagaaaaataaaaataaaatgatggggcaagaaatgggagccggaaaatccgacactggaaaatccgacaccggaaaatccgacactggaaaatccgacacaagcagaaaatccgacaccggtggaaaatccgacacaagcagtaaatccgacattggaaaaaccgaccccaactttaaattttaaaaataatttttgattgtttgagttagtaaatatttaaaatacatataataaaagttaaatacttaagttatttaaaataaatatttttattgctataaaatagatttaaagtagacatataataatcatattatttcaatgttctttttgatcatctcaaaaaaaattgtaacaatccggcaaatggaatcagatgaaagggcatgaagcataagaaagtgaacgtggtgcaagacatgaatctcacagagatttatgcgactcgcaacaatcgacatcaatatcccatcgaatggcagaatcaattaatttttttaaatccaaatcgaaaacttgataaacttagccagatattaactcaaacaatcaaaaatattttttaaatttaaagttggggtcggtttttccaatgtcggatttactgcttgtgtcggattttccaccggtgtcggattttctgcttgtgtcggattttccagtgtcggattttccggtgtcggattttccagtgtcggattttcctagagcccgcacaaagtgcctatatctccaataaaatcatcggcgtcgtgcggtggggggggggggcggaagacggacgatgggcggcgtacgttcgcggaccaaaaat

SEQ ID NO: 15874 - DNA, 1986 bp, Heterodera glycines
  unsure (1)..(1986): unsure at all n locations
tgctcctgccgacgcatcacaatggcaccagccagtaagtgccagtagtacatattgttgctcgaaacaaaaaattcccaggactagagagtgattctgattgagaaaattcgagacttttctcgagtcgaggctcaagactgacactttcgagcagtactagtaaaaaaaatagtagtggtagtgtgtgttggtttgtttcgtaaaatccgccattttaacttctttttttcgacgaaatatgctatatatataactttgtttaaaattagtcaaattttgtattcttggttctttgatagcccaggtttttctctattagcatgcaaaattttaaaaaattttataaattcgaaaaacttgtatgaaaataagtatattgaatttgatatttaatttaaaattttgtaaggctaatagagaaaaatcagagctatagaatggtacctgtcaaattttgtaacttttaagcaaaattcttatttttggcgtattctcaggattatggcacgcccaagccaaatgctccatatccgccatatggccaccattgagatgctgtgccaaaatgaaatgggcaatggatgaattttaccgtgataaaaaatgagtgtggggaaattagagtccgtaatttttaaaaatcggggatgggattgggaatcaggccgggatgtgatttaaaatccaatttttggtccgggaaaatccacacgtcctatcccatccgggccctattactcataattggttagaatttctcaattggtgattttgatgtgatccgcgatttcaaccaattaatatgataaataaactaaatttatcatctacgccaattttttcattagaattctaagcgaaaacacaaaaaagatctgctaattaacaggattattacaaagatttttaccaacctagtccttatggggcggagtcgttatttaaaaaaccatcaatatgatttgatgaaaaattatttataacttagctcaaaagcaaccaaatttttaattcttgataccattcgatagccctaagtgttctctctctaccagtccacaaaatttcaaaaaattttgtttagtttaaaaaatcgaatgatatgaagaattgaaaattggttgcttttgagcaacttataaatagtttttcagcaaatcatattgatggtttttcattttttgaaaacttgaaaaaacatcggtcacttgaaataataaaaaaatttgcgattttaagccaatttttttaagagaataagaatttgggccggcaggaaaattttgcagattttatacccattttaaatacatttcgccataaaaagacgaaaaaaagaaattatctaggaaaatccagattttttatgcctggacctagatttcctggacaaaaatccaagganagtcaaggtccaggaaaaatctaggttgccaaaaaatggcctggacctgggcctctggagccaggaaaaatccaggcctgggtccagatccaggccaatctctgcttattttcttaattttaaaacataaattttatgaaaatttatgtggaatttgccctgtaaaaacacacaaatgccaaaatattatattgttgcctttgtgcaattctttcaatggctttgcaatttctcggatttgtttgtccaatttttgtgccccatttttgtcattaaaatccgtcggattgccataaatgcgctcgtgcagtgtttcttcgccaagttccattattgtgacgcccaacatgatctgtttttgttgcggttgtgattgatcagtttgatcagaagcatcgtcttgcattttgaccggtgccttttcaatggcaattgttccgctgaaagccataaaaatgggcatcattaaaagcattcattagacacataaatacccacaaatcacacagcaacgaaatggaaaaatataaataacaaaactttattgtaaaatttaataatcgctaagagaaatatta

SEQ ID NO: 15875 - DNA, 1889 bp, Heterodera glycines
  unsure (1)..(1889): unsure at all n locations
catccgcaatctgttgaccgaagtggaaattcgcgtcggcggcactcccgatccgatcaatccgacatttccatgcgcaaaaaaaattgacgacaaagtgaaccagtgcccatgcgcaaaggcggaaggaacttggcaagtccaccccgaaataacttagtccaagccatcattgtaccagttttggttgggcagcaaatccagtctaggctttagcagatgcgaattctcagcttttttggggccttcttatgttggcagcatttaaaaaggaatcaaaaatcaaaaatttttgtaattttttaataaaatttgtccatgtctcaaacaaaaaatttttaggagtaatttaacgtaatcaaaataaattaaaatgttgatactatttattttacaaaaaatatatgtagaaaaattgaaataaaattaattgaaaattgaactgctttttggaaattttgaacgggtccatccatatttttaatatttacgccctatgccgggtgagcaaaagattttttgacgcttttgcagcttgttctgcgatttttgtcgccaaatgcgcagccaacaggccaaagtgtccgcttctgaggccgcaaaagtgtcgcgcgggtcgggcgccgcctcggccgaatcgctggaggagcagtgcaaatgtgaggtgatgcagcccggactgtacgacatcgagacggagatgtgcacgccggaattggacgacgccaagcagttcatccccactgagttgcagaacaacgtcatggacaaaacaccggtggggagaaaccatcaacaaaatgaattaacttaaataaaattgaaaaattaaaaattttataaaaaataattgcaaaaaagcatgctagctagattaggttagttccaaaacacagggttcgttttagggcgagaacatttattttgtgtattcgaatccaccccagaaccagaacgaggcccaaattttttggcaaaaaaatgttacaaatttctgtatttttttttttgctctcccgcgctgaaattttttaaaaataacactgttttccgtgtctattattccggcgtgtaagtattttgctgaaaaaatggatatatcgaattccatacagatttccatgttcatcacggtctatcttatggacttgcaaacacatgccaacgagtcctacttgtccgcctttgggcgtgccattcttcaacggcggatggcacaaagcacggtggcatgttttctgatggggcttgatgtaacgttggccactgcacagcaacaacaacaatcccaagctcaacaacaacaaatgccggtggcaatggaaaaatgaatttaaaaatgaattattatttttctatacgatcgaatatccgcgcctaattagtgcaaaatttttgtgcattgctaagacaattaaaaaaatgtgtgtgacaattaacttatttgattaaatatgtttccatggtaattacatgtattgcccaaatttgtaaattatgattattaattagccaaaactatttggataatttttattattaaaattaaaacgataaaattcaattaaaatgcaatatgtcctcatcgtaaacggctaaaaatataaaaaatgacattttaattaaaaaaaagaaatattaccccatgaagatgaaccagtaccagacgttgaacagaataaaacagaccgggaaaataatcattgaatatttatcaattttttttgccgttgcatcaggacatttccagcaaatcatattttcggaacatttgtgccttaatgaaatatatttattttaaattatataaataattagatattgnggatttgtataatttcttgaaacaaaaatttaaattaattntatgcttccgcctaaaaaccggc

SEQ ID NO: 15876 - DNA, 1327 bp, Heterodera glycines
  unsure (1)..(1327): unsure at all n locations
aatgatgcttgcctgtgcatgaagtcatgactaacaatgtcagggttcgattgatggaaggggcgagcagtgatgatcacgaggtctgacagggcgctgcaataaaggagcactgaaattttctcatttttccagggcgactcagcttcacggcttattgcatcccccattaattttttcaggatttttttaaacattttttcgggatcttcgttttctgggcatttaaaataaaaagttgtcacgagctcttttatcccaaattttttattttcgtttgtgtgactctccacttcttcgaaacattttcccaaattagcactgtttttgaaataatttttggtatttttcgagcggcggatatcttttgaaatttcttggaaaatttctttgaccaaatttgattaatttaaaatattaaatgaaataaacattaatagaaaattatcaaaacaaaaattattaataatatccaaagggcaaaacattaaagtgatcgtcaataattccttttttctgcaccggcgtacgcttccacctttatcttcaaaaacatccgcacatatcctttgaacagttgactgtcaaactgctcaaaatgataggcccgatagaagcctgtgacccgatatcccagctctaaagccttccgtaactcaattgatgtgaacgttcccaaaaatgctctctgcgctggacggtgttacatttctttacatcttttgtcatcacaaactcattcttggccctttttgcacaagcccaacaattggggaagaggagcatgtcatcgatgtgcatggggaggagggggtaaatgggacctcaggcattaaaaattcgattttgaggccccataacttttttttataatattgctaaaatattcattcattaatttttcacatggaaacatttcaaaattctggtgaaaaatgttttcggacaaaattgcagcagatttactggagcaacataatatagacacggatgtgaccaaccaataaatgataaggttttttttttaaatgataaatatttttagttttgatggactatattaaaaaaactttagaaaaattgtttaaacaattgaaatgaataatttaatttaactaaattaaaaatacaagcaacaataagcaaacatttattcaaaaaaggtgtaatgtgagcacatatttatttccttattttttanacaaaactttttatacattggtgaaaatcaaatgaaaaaataaaataaaatccattcaaaacaaaatcataataataaaaaaaagcaaagttagtgacatcaaatacgtttgctaagtacatttaa

SEQ ID NO: 15877 - DNA, 1292 bp, Heterodera glycines
caacccaccagcatttcaatcgccgggaaccaccccaccagcattccaatcgccgggaaccaactctccggcattccaatctctgggactcaaatctccggcatccaaacattgggactcaaatctgcggcattccaatcactgggactcaacccacagcatttcaatcgccaggactcaatccaccagcattccaatcactgggactcaacccacctgcattcaatcactgcgactcaatccaccatcgttccaatcgtcggggctcaacccaccaacatttcaatcactgggactcaacccacagcatttcaatcgccaggactcaatccaccatcgttccaatcgccgggactcaacccaccagcattccaatcagtgggactcaacccaccagcattccaatcactgggactcaacccaccagcattccaatcgccgggaaccaacccaccagcattccaatcgccgggaaccaacccaccagcattccaatcgctgggactcaacccacagcatttcaattgccaggactcaatccaccagcattccaatcactgggactcaacccacagcatttcaatcgccaggactcaatccaccatcgttccaatcgccgggactcaacccaccagcattccaattactgggactcaacccaccagcaattcaatctctgggactcaattctcaagctttccaatcactgggactcaaatctccggcattccaatctctgggactcaaatctccggcattccaaacattgggactcaaatctgcggcattccaatcactgggactcaacccacagcatttcaatcgccaggactcaatccaccagcattccaatcactgggactcaacccaccagcattccaatcactgggactcaacccaccagcattccaatcgccgggaaccaacccaccagcattccaatcgccgggaaccaacccaccagcattccaatcactgggactcaacccaccagcattccaatcgccggaatcaaccctccagcattccaatcactgggactcaacccaccatcgttccaatcgccgggactcaacccaccagcattccaatcactgggactcaacccacctgcattcaatcactgcgactcaatccaccatcgttccaatcgtcgggactcaacccaccaacatttcaatcactgggactcaacccacagcatttcaatcgccaggactcaatccaccatcgttccaatcgccggaactcaacccaccagcattccaatcagtgggactcaacccaccagc

SEQ ID NO: 15878 - DNA, 1120 bp, Heterodera glycines
ttaaagcaaatgccaagtctagcaaagacagcgcagttcgaaaaccattggcacagagaatgaatgccctgaggcgtaaattacccattcattagcattcatccgtttgtgaagtaacacgaaagacgggttgtgcccgcgaaagctttcttagcgaaggtccgccctcagctttttctgattgtgatgttcggcagtgattgttgatctcatccatccaacaatcctcgccttcccttgccctctgtctgctaattacccaatggcaccaattaaacacaaattaattaatatgtatttgaacaaattcatttgttaaaataaatttttattggattttattttatttatatttgtgtaaatattttataaaatattttaatatttaatttaccaaattattctaattttagttacctaggtatgtagagtagttattttaaagtaaacaattactgcatttatttgggttattttttgagattatttcgttctttaccaattttttgccgtgtttctcactccttttctttttttctttttctctttcttttattctttccactcccactttctcatctttctctctatttgtctgcactatgggtacgccccactgtgcagagaaaagcctagtactatctcgtcgtttctctttttctttgtaatttctctcactttggcgtactatctcttcattttaattatgtaaaaatcaacatttacttctctccatataactttttttctatgcatacaagttgcaccaaattttgcataccgatagagaaaaaaattctgcatcggttaataggtcaagttaatattaaaataggtcgaattagaaagttatggagtgattaaaatttttgcatttcttttcctctcgtgttggcgtactattttcacatctctaacacacaaaaaacatcaaattcgtaaatgctaacaattttggttataaggatacaaaatcactttggacatttagaattaatagagaaattaatagttttagcatttttggtgaaaaaagcagtttaggactttgagtataacgtgataaaaatttgaaaatatcacaacttttttctgagatgtcaaatgcttagcattcgct

SEQ ID NO: 15879 - DNA, 1578 bp, Heterodera glycines
cgccaaagcagtgcttccaccccaaaataaacgaatttttctgttgcttttgactttctcccgctattttgtgcttgtccctattccctcgatttataacaaattttcatccaaaaaattgacattttggaaaatttcgcgtaaatatattatttttttcatggaggagtagtcttggggtatgtacaccgcgaacccctccccctccctgagatagtccctgatgtccaatttaggattgtttattgttcaccaatatccacctgcggtggcgatggcacatcacaattagttgacggtggcgcgcgacacattagttgttgttgaggttgtatatgtcctcctcggattgggaattggagcagcaataaatatctatttgcttccgtgtaattttggttaaattttattattgtcagtaggcgaaatgtcccattttgggtttgtaggcgaaatgcccgattttggctttgtaggcgaaatgtaggcgtgcccattttagcaatttgtatgaaatacgcttatctaaaagggcgagggaaactcgaaggatccgaaaataggccaaaagactcattcaaaaaaacaatagtgactttgtatgttttttgtccgcaagtgtcgtaatattaagattcatgtcaaagcatatgccttcgtggatctttcctcgagttgctcaacaacagcagcagtcgccgtttccacagcctccgaccactgccgttggttcttttcaacaacatttccaatcgcctggcagcagaggagcaccgttaccgccacacattccgccccaacctttcttttctgcagggcctccgaatggcactgtatgactgacaattgtttgatagttttagtgatggatggtagctattctctctatcgaagactcccttttttcatggcttaatttcttcacgtttttttaactatttctttcccttttcagatgaattctacgccagcaatgaacaactttggcactgacggtgctcagctgcacccgtcctttatgtacgatggacaagtgccgaccaacggcggtgctggtcacatgcttatgaacggagcgggcggccctggcgggacaattgacttcaatgaagacttttctggggggatcaatggcacaatgcctgcccaatacattctatccgacgaattgatgggaaagattcataattcgactaaacgaaaggtgtgtttgttataataaaatatgtttaaatagccgttttagacgctgttggaactgcagattggatttgagcaaattgcgtacgacgtgtccaacatttttgagacttgggctatggtgatcaaagagcgtttggttggcagtgacccgttgtcgtcttccgacttggagatcggcgccgccattctcattgaaatggtttcaagaaactgctattaactgtttctcagtgaacttggatttaggcggtcgttcttgacgaaagtcagtacaattactctcgtcttggtcaatacctctgccgaaccatcgaaagttttgccaccggcatattgttaccgcagatctccgtgtttataaacgaaaccaatgca

SEQ ID NO: 15880 - DNA, 1882 bp, Heterodera glycines
tggaaacgaactccaagaagcgctttcttctgctgccttttttgatgattttatgccatttgttttggcatttgaatttggcacaaaattttgtgcacaaaacgacggcaccaaattgtgcagagagaaagtccattttgatatttaaaattcacaattttattttatttgaatttagtgcctttcccaaacattggtcgccccaaaaacaaaggcaccgtttgttggcacaaccaaattccatcgcacaaagccacgcgcagtgccaaaaaccacttttggcattgtgccaacaactgaacaaacctttggctttgtgccatttgtgcggcatgtggaccattttggcatgaattgtacgaacattttcttcccgacggaagtggacaaattcttgttgaatatcaccgcgacgccatacgaaattgcatgcaatgactatgaaaaacgtgccaaaattgacgagccaataccgtcatattattggtcagatggacgctttgtgaatgcttgcatggcggtgccgagtgaaaaatgcgaaaagtcattttttggaatttattttttgaaaattttaaatttgaaggcacgtcgaactttacgcgtgctatgaaagcattggcaataagccaagtgtcaatgccatcggcgaattgtgccaaaaacatttggacaatgccacaaatgctgctgggtttgctgttcaaatttgtgcacatcgacaccaaatggaggggataaatgagctcattgttgaatcgttcatcaacttttcgttcactaatgagccgtttgttaattaaataataattttttttattaattttattaattaattaaggttccaaaaaacgcgtaatttgccaatttcaatggacaaaataatggacataaaaaagaaaacgccatattttctcatcgaatttggccaaaacgagcaaaaaagtgcaatccgagaaaagggcgacggagaaaattttggcggcaaatggaacaatgaggcaaaaaatgcattaatttgaatcaattttaattgcattgattaatttagaatgatggcatcggctccattctcaaagacattgcgccacaaatggtcaaagacactttggcaaaaatgattcattttgtgccaccatcgaatgatgataaaatgctcccatttttccaaattgaaaggcccaaattttcaaaattcatcaacaacgatacggatttgttaccctaccaagatgatccgaacaaattcagtcagtaaaaaataaatttaatttttaaaattaattttggcactttttaagacaatcctgacccctgtgatgaatacggcgcagattgcgtgccgatcaaaaatttgttgttgaaaattgaggcattggcaaactgtaccggtaacgaaaacaatgcggtaaagacagaaaaaaatattaaaaaaatatatatactaaaataattttagattttcgaaatgccaaaatgggccccacttcctccagcgatgccatggaaaaagcgatccgaaacaatgctatgcgatggggatttgttttgtgacaaacgaaggctgcacgaacagtacaacagattgagggagagtgagtcacttggaaattaaataaattaattaattaaaaataaataaaactaaaaaatctaaattaaaattcagtttgtggacttcagcctgaaaaagtggaaagtcagcgtaaaaaacgacaatacaatccaaacgagaaatggaccgaatccccgatcaaaatcacattcaacaaaaaagctcgtaataatcttaccacattatacaggatttgaacaaattttttaagtgcctgataaatacggcctctgggacaatgccattagagttggagcaaaattaatt

SEQ ID NO: 15881 - DNA, 1942 bp, Heterodera glycines
tttaatttgtatctgattaaggattttaacatgtccgtcgttgctggccatgaattgatgcacgcgcttggctttacgcatgagcaaagccgaagtgatgcccgaaattacatcatcttacgactagacgatgacgtaattaacacaaataatttaaatataattttccatgtgctaattttaaagcaatcggaaattgacccatacacaaaaaactttggcttcgcttacgatttcgggtcggtgatgcattatcaatctgggggcgatcatgaacagtaagaaaaagttggatttaataacgtaaaattggaattaaaggggcttatacaatctgatcactttgccacgcttttaccaacaaacgattggccaaagcgaacgaatctctttcaaagacgcggcgataattaaccgaatttattgcaaaggcaaatcaattaaatataattaagtgattttccatttgttcagactcatgcaaaggccatgaggacaagtgccaaaacgggggctatttgaatccgaatgattgtacaaaatgccattgtccggacggctacggtggcgaatactgtaaagaactcgaagagagtgagcaattaattaattcaattaaaaataaattataaataaatatatttggagatttgaattgcgaggatttgagtggaattccgagagaattgatggccaattattcagcagtgttattgaaggcggaggcaaaatgtggcggcaattggccgtgccgatgccgttggcgaattaaggcaataaataatatttttgaatttttaggttttttaattaatgcaaattttaattgctttcagcctgaagcggggaaaaaggtacgaattcagttcaaaagtttgagcaatttgtttgaatgcacacacaactgctcatcggcgtatgtcgaggtcaaataccgagacgacaaaagggcccaaggcaaaaagacaaataattaattactgattacttagcaaaatgatggctcattaaggtgccaaactttgctgtccccgtgcactcactgatctgaacgccaatgaatacaaaaattggatcgatgcggaaaagccggacatggacatagtcatttctgcgctcctttcaacaaaatggaccataccatctaccgtattcgaactgacgtatgaatcaggcaaggaaattgtaaaatatattttatatattttcatttttaaaaaattaatttattttaaattgcctttgttttcaatgttttacaaaccattacaaaatgcaaattgttcaaaaatgttaaggcaacgtcaaactcataaattcaagcaaatgccgttacgccttcaatttgtatgccgaaaaaaggaaccccggcagcggcaatttgagctgttatgacggggtcaaacaccaatattatcaatgcccatgtaaagttggtaatgaaaaatgccgcactgaagaaaaatgggcacacgaagaatttctttgcccaataataaaggtaattaattaatcaattaatgtcaaaaggcaccgccacaaaaaaatatttgagttaaatttttaggcactaaaaatttgaatttgaaaaacaaaaaaaaaggccgaaataagtgcaaattttagaaataaggacaaattagaagataaatgataaaaactccatctacatataattttacttataaattcaaggtcaatggaattcaaatccaaggaaaaaggcaaacggtgtttactgacccaaataatgaaaaatacaattggactaaaattgatgttgattgttatgtgagttgtgtcttctaatttcgaaaagcctatttaattgacttaattcacagaaagccgaagggggtaccgtaaacttttggggctacagtaagccggagactaacgaaatcattcgggtggacgaaatccactgcttgatggatgatgc

SEQ ID NO: 15882 - DNA, 3781 bp, Heterodera glycines
agtcatggggttcaccacacagcacaggtcgcggccacattctttggtcgccttcgaattctgtgtgttgttgttgatgggccgtttctcctccctttcttccttctcctcctcctccttttcttccttctcctcctcctccttttcttccttctccaactcctccttttcttcctcttcctcctgctcctcctcttccttctccctcttcctcttctacactttctttggtcccttcaaatgcatctactgcttctccttcttctgctttttccactgcccttgtgccaacggttggcgtggcattcttcgccaacaatcgttccgttctatcggacgaaacggtgacacctgccgatgctggtgattgtgggaaatggaagaagaaagggttcgaaaatgaagagcacatctgtggacgcaaaaaagaacagcaaaaggagctaattaaaaaaaagcaaatttaagacaaaagagcaaatgaggaaaaagaaaaagaaattggcatttgagagagagaaaaggcaaaaaagagaggtcaaacgaaacgaaagagacgaaacaaaatgaaacaacggcaagccaaaggcaggcattttctgtttgggtgcctttctttgccaatggattaacttccaagcgagagaaagaaacagaagagaactgaagacatacggagggaagagagtaaagagacacacaaagcgaagggaagagagtggcagacggcacgataataaaaacggtgccaatgaaagacagcaaaaaggcacaaagccggccaatggtgtggacgggaaaagcagcagaggaccaaatggacagaataaaggacacatatctattatttttcaaaaaaaagcaaaaggtttttaaaaacatccgagagaggggaaataggggtgggaagtctaaaaagaaaaaatgggagagggagaggggagagggagggtggtggagagactaaaaagagaggggggaggaggagacgaaaaaagagaaaagaaaaatggggtagggaagaggagagaggggaagaagaagaaaagggaaaagtcgaaaagaaaaatgagggagggaagaaggaagggaatggagaggggcgagggggaataacagaccaaaaaatgcacttaaaacgaatgaatgggaaacatgaccaatgaccaaatgaatgcgttacacatctgctgatcaaatccatctgctgatgggaatggtaaagaattgcttttcctaattaaattttttttttattttgagctcaaaatcagtttccggtggcttttcgaaggtgctgatctgatcagtgaatcaaaaacctgaaccctccgggcctttgactctttcttttccctctttccttttgaccattaatgggctgacacattagcacattcactaattggacctgagcgagccctaatctgtgaccatatcgctcggttaccccacgaagctttttaccccagaaaaatgtattttctggataaacttttcgacttttgtcgaattcggacccgggattcggaattgggctaatccggttcagaagcgtgaccagcaccttcgaaaacttactggaaacttattttgagccgaaaataagttaggtaattagggacatcaattctttaccattggccatctaaataaattgggtgggacgcaaagggaaagtcacggaaaataaagtgaagtaaaatggagtggtactactgaccaaaacgacagatgagaagcagagaacggaggaataattggccgaaatggcaaatggacggggaggtaatggatactgtggtcaccgtaatccggtgatttgtgcaaatcacaaaacccaacaaatgttaaactatcgacctgtaatatgcgaatccaaaaagaaaacactgacaagaattattggtcaagacaaagaagggatatttatttattcacacttttattagttcccgttaattgtgtatgatcgtttgcttaaataaagcacgtttcacaagtgagtaatcacaaatctaaaaacgcggcatgacaatccgtccgattgcatttcggcaacttctcaagtacctccctccgctcaatttcggattaacgctttgcaactcgcagaacagcaccgcacctgcagttctgtctcagcaacaaattctctccttgcagttgggcgttgctggcttttagcgtttctatcagttcggctttccgacagttctaaaaaataaagcttataagcattttatgtaaatttgggtaatcatgtactttattggttcctaaaaaaattaaagggttttatgcggttctgagtttttaaaattgttaaaaacgcctttcctgtggttttcgaggtgctaatcatgaatctaacttcaattttggtcaatgccgaaccccagacccgaattcgaacaaaaggagaaaattaatttttcaccaaattttacatttattgtcccaaatctattcaaatggacggaatacaatagaaaataaagatcactgccatttagtgcatttgaacctgttttggacaatacatgagaattttagtgaaaaattaattttcgacttttgttcgaattcggggttcgaaattggggtcgcttatgccgatatccgttgtgggaaaaacatgcttaagaaatttttcgaaatgcgaaaataggtataaattttaaaattatttttagattcttgctaaattcaagaattgggcggagaaaatgcggcactaaaacgtctaaataggtaaaagcgtagaatccgttctatgttaatgatataaaaaacccagtaagcttatataaatgaggaaattcgtccttacatcatcttgtaagagcttcagctcgctttccttggcttcttgaatgcgttttgctttgtctcgactgcgtcggactgcatcattgttctgaaacaagttcattatatcaaataaatatattcgctcataataatttctttttttaatttaaaatcagtttcgaaaaaaggtccggcgatgtcggaggggttgtctggaaattttatttcaccgacacttattgttagattaagaaattttaccataaaaagattcgattatattttgaagatcctcggacttaaataatttttagttctgagggtttatcgcgcatctgctgcaaccctaatcaatgtgttttccagtaaatagaggtcaaaaacatggattttcatatgtcaaacataccttttgcctctttatccgatacaaagggttctgcttctccgaatccggctttatcctatatctccgaggcctaagagaactgacagaaggttgagtgccttctttgtgatacttaaaatggatcgatccgctggcaacactcgactcgcgagacgacttcggcgcgtctaagcccaattgcaggttgatctgttcctgaaaataattattaacataaacaataaataagatattttctccaaaatagcagtgatgtttcggccaattattttttttataaaataaaaccgcccaccctccctttttcatgtatgatgatgatcactcacttgctcagagatgggttcctgcttcattaacggcatcgatgatttcgaagtgcttggcacgtgaggaattgcatccaaattctgtgaatagatttggtgtgtagcgggcggcattgggaagggaactccttcatggaaagcagtgggaacgtcaaaatcggaacggccgtcagagggcacatttgcgaaatcgtttacgccaaaaatctgaaatttatttcattctgac

SEQ ID NO: 15883 - DNA, 1982 bp, Heterodera glycines
  unsure (1)..(1982): unsure at all n locations
aatatacttttttacaaatgaaatgggttttcctgttaataaaacactcgcagaaaaaaaaagttttatagcatctttagcaacctggtcatataaattaattttttgataattaaataatttgaattaaattgaaagtatttttgaataaaaattaaacacaaaattcccggaaaccgtttatgcaagaacaacaaccacaacaaaaaaccaaatcccatgacaatgaaaatgtaaataaatttaaatagaaatgaaagcgtttcctcagatttttcctgtctcatcaatcatcaatcgcatttgttcaaattgttttctcaaaattgttccgttttcccatcaaaaaatgctctcaatggcctccccctgtctttttgtaaacttcttcaatggattcggctgatccattttcatgaatttggtccattgaatgatagacaacaggaaagtctccccctgtctttttgtacacttcttcaatgaattcggttgatccattttcataaactttttcacctgaataatagacaggaggaagcggaggtttatttgaatccattggctttttgcccttattttttgcagagaaagaagaagaaccaaattggtttgattggttgctaattggttgttggctgccaaaattgttgcttttccttttgttaccaccaatgctaaggaagtcttggcccagggttgaggtgttttggccacgactttgagttggattcgatgaactgtccaactgatggaattggtcacttgcccaatttggctggttgggttgatagcttccaaatgggttgctattaaatgggttggacaaagaattgtttgcattgtgattattggcaaagttcgttgttgaaccactgttgctattaaatgcattggacgctttactttttcctttactgtcgcccaaactcagccaattttttccaaaagatttattgttcttgtcacccattccgtcacagaaactggcacacaatgccaaagtgaacaatgccaagagcagaagcataatggtggaaatttgtttcaaaaagatagatgggcaaaatgaattgtaaaattgatggatttttttctttttgtgatgggaattgaattttattttttgacgaaatgtgtgccattcgttgatggcacggctatttatagaggcaaagtcttttttcttaccacgtaaagataaagctattatgacgtaagcctactgaaaatattaaaaaagtttctttgtttcattttatgtaaaaggaaattttaggcccggaattgagcaattgattctttttttattgaatttatggaaaagaaagattttaaggcccattaaaagcgaaataataaaaaatagtaaagtaattataataaagatatatatttttttgttttataaaaccaggactcatacatggaatcggaattccgaggcccaaaaattttttataaataaatcatgtaaactgaatcaaaaaaaaaaaaaaatttaattttggtcatttaaatgattattaaatattaaatattttataattttttcgaatagggaaaatttgtaaatctaaaatttttataaaaaaaaaaaatgaaattttggcaatcaatttttgagaagaattttcaattcttagggggtgtatttctgaaattttttcaggcatttcttagggggtgtattttcccgattttatcgcatttttactggaattttttcggaaaaacgccaaaaaaggcacgaaaaaatgccaaaaaaggcatctaaggcacgaaatcccgaaaagggcaaaaaaaagacataataaaactcaacctaaaagcttcaaaccaagtgaaaagtgtgttatttatgcttaatatattgaaattagtgcgcaaaaaaaggcttatgcctcaaaatccgaatttactttacagncctgtggacagacactngtgccaatttgaacattaaactgnccaatgaccaa

SEQ ID NO: 15884 - DNA, 1122 bp, Heterodera glycines
gttgtccgccaacgacattttttgagcttttcgctatatattttttttaagcgtaaataaatttactaaaaataatgactctttttgtgacattatgggacatttttctgcgaatctaccaaattttcaaccaaatttctattaaaaaaattttcaaaaatttcatcgacttccaagaaattaagcctaaaaaattcaaaaagcattatttttgaacataaattcacccaaatttctattccgaagagcaaaaagcataatggaaaaaaatattctgtccttcgaagcaatatattagaaaattttctaatcatgttaagctttcgaatgataccaacagcattggatttggattacaatgaaaaaagttatagaaagttatagtggaaaaacatgctggcgcccaaccgtgcgcgcccaaacgtgagcgcccaactgatgtagaccgtcattaaagcgtgtttccgtgggatttcggagtcgcggacgacaggctaatttatgaaaatgcaaaattttcgagaccctttgtaacctaatcatcacaactgcaccattttctcgaccaaaacactcgcttccaccggtaagtttgaacccgattttggacgttctgttggctttaagaaattggaaaacagttacatattgtagaagtggtgcaatgtgtacaaaagcattgagcagaagtacaacaccgccactctcgcccgccaagtgcgcggcgtcaatgctcactcactcattaatgagtatatttagtgagtgactgttgagagtttgtttgatcattttgagtgtgttgggtgcgatcattagcaacataagcagaagaagcaaaagagtgatgctaatgctaatgatcgatcacacactacacaaatagagcacaaacagtgcgaaagtgcacaaacacagtttgtggtggtgaggctttcttgggtgagagagaacggacggaaaagctgaccctcgtccttcaccaccaccaaatgcatccccaaaaatgcaaaagaaaaattccattttgcaacaatttttgttttaagtatgaaccggaatttctgtggaatttaaagctgttcgttaacgtagccaacagatattagggtatcattttgt

SEQ ID NO: 15885 - DNA, 2046 bp, Heterodera glycines
aaattcaatgacgggaattgtcaatgtagctgaagaaatataaaaaatgctttaatatacaaaaaagtttaaaattactcaatccgaaggttcttaaagcgaattttgatgggcagcggacggtccggcaatggaaatccctcaaaatcttgatccaccaaaagttttgacattccttcatccttgctaatttcgattggtctccaaattgtcaattcgcttttgccatcgaaatgtttgtccaccaaaacatcgaaacggtcggaaatcagtgccattttgaggccaagttgggcatggtcaaaagatgggaaaatgtccatccacacgtcgttacaaatccaactgaaacatgaaaaaaagaattgggaatttaaaattttaattttttttaaaattgcttaccgtctgttcatttttgttgcaatttgcacaagtttgtcgtaagttgtgattgttaactaaaaactttatttgtgttccaagaagtaagcagaaataaaatttttaacatttgattgcttttttcatgttttaaacaaaaaattggcaaaggcatggatttgcagaaatttattgtgccaaccgcttggcggatgatctgctgctcctcatccgctgtgctgaccaatttgcgcatcaaaactttatcgagacccccatttttgtccccaaaatcgcagtcgttgtacacaaaatggcacagccggtccaaatagggattacatgatgcctaattaattttaaaattatgcctaattaattgcaaaaaaaattaattagtattaattaatggttgaacccattagacgtacgtttaactgtccaacatgttcagtggttgcttcatggtccgccatttgttcagcagtcactgatcggaaatcgcattcggcacattggtgaggtcgataattcctttaaattaattttttaaaaatgggttactgtattttcaggtacagtataattagtcattttaattattgctcttacaaatgttctgcaatatgtgccatgaacgtgctgcgggactccgactggccacacatcagacatttcaatactttggtggtgctgctgccaccattagcagaaatcattttgaaaatttatatcgaaaaaatgtttaaaaatattccattaaaaaaggttatttacttttttttatatagcattattagggctgccaaaaatatgcacgaaaagtggccaaaatatgcgcataaatatgcaaataaagtcgtgaaatatgcacaaaaatcgcaaaatatgcaccaaatatgcacaaaaaaacttgaaaattaggggtgcaaattcaaaaaaaaggtcggacacgtcgtcttccccagcgtcggcggcacctcaaaaagtggaactgttgaacatcgacgagtacagcaggaaggagcagacgatgtgcaattgtttttatttgtctctaaagctaaagggcctgtggtcagaaaaattttcaaggggagggcgacccgaatttttttgcctggcaaaactttttttttcaaaaataggcctcgctgtggcaaaaaatgcatttcagaagaaagataaatgtttgatttgaatgggagcgaagaaatgagaaaggaggaatcgattgtatggaagcgaaatttaggtcggtaaattatgtgccgtccccaaccaaagacatattggagaaaagggactgagagagagacagagagagagagagacaaagggactgagagagagacagagagagagagagagagagagagagagagagacaaagggactgagagagagagagagagagagagactgagagagagacagagagagagagagacaaagggactgagagagagacagagagagagagagacagagagagagagacaaagggactgagagagagacaaagggactgagagagagacagagagagagacaaagggactgagagagagagagagagagacaaagggactgagagagagacggagagagagagagacagagagagagagagagacagcgggagtgagagagagagagaga

SEQ ID NO: 15886 - DNA, 971 bp, Heterodera glycines
  unsure (1)..(971): unsure at all n locations
tttctctcggttcgaaggtcctcaacctgtcatttgctttcattgtacaaaaccgccaaatcggtgtatcaaaatgaatgccctttttttgtcctttgcgtttggcttattcatccttcgtctcccccccccccgccctcccgtcgtttttctcattttgcttcctcaacaatcgcaaattttctcgattttttgttgcatttgttcatcgtcccgccaattatagtacttctcttcgatgaaaaagaatctcttcaaatgcaaaaataatatttgttttttaatttagacaattaaaaatcgtttaaaaaaagctaaatttgaccaatttttattgaaaacaaattcgaataatcaaattttacatttgatttggcacaatttaataagttcgatgagtcattcctcaattggcttaatctctttcctacagtattcgccttcccatcaccacagtcattaccgtaaccatgcgttgttttcgctgtgttctgtgttttgggatttgttttgtcagtgtgcgcgtactccgagcccaaaagtgtccatactggcctaacaaattctggagcactttgcacaacaatgttcggttaaattgccgattaatcttttgttcacaaaatgtgccgcccttcgttttgtgccgcttccccgcggcgagttgggatttccgatggcattgtactcgcgcggttgtgccgatggctgtaatgcccttcagaaatctcatctcgccaaggggcgccgaagcgaaccctccaaatgccaaacactcattttactctgaattgaaaagcggcgattatgattatggcattaatcattgaatgattggagaatgtttttttggtctttcagnccatctccgctaatcagcagatcaaccgactgaatattcgccgactgatcagaaaatctttttgcccttttctgctggccatcatttggaactttcgcgcacttattta

SEQ ID NO: 15887 - DNA, 3353 bp, Heterodera glycines
gatttccggcacaaacagtgcccaacgaatcaaaaacgtcttcgtatcctaagtagaagggttacgatctcgtctcgccattttattctcggatttccttcgaaaaattcccttttttctccaatttttcgatggtgccaattccgctcatcgctttgctgctttttgtgccattcattcaacaaattcggctcgtttctgctcaatccctgcgaaacattcacttgggcttccccgaggcgtgggacggggacaaattccccgaaatttactgtccttcaaaaaacatcccaaaatggttgggtgagcattttttgctttgttatcagttcatttatacaatagaatttaatttgttcacgagaatgaagtttttttgaatttataatctcaattaatattttcccaatttaaatcaaaaatatttaaatttttattttataaaattcacaattcattatttctcagacggttactttctgtgccaactttcggcagcgtacggcgaccccaacgcgcctccggggcagaaactgatgcatatgatcgacgccattggcgtactatattaattaattaattttttattaaatcatttttaattttaataaaggcaatcggatcgttccatctcagcgggggagaggtgaaaaatgattggcaaaaaccagcagagagagagagagtattcactgcttctctgcttccaattgcaggtggtgttctcggcccgctattacccctccaggccctaccgtatctgggaattctacgaccgtaacatgaccaaagcatcgggtcagtggtggtcatttacgcatgggatttcattacggtatacccacccgtccttttacagtaccatgggccggctggtcccactacaatctgagcgcaatggcacggtgggaacaagtgccagctaacccggacgcaggtcggtcaaagcgcaaaaacaaaaaacgaaactttaccaaaatgccaattttcaaatttgcttccacccacacagtgccattcattccattgtctgtccctttcccatggctttagcccgcttccacccgaacctcgacttttggcgggttggccacagaattatcgcgggcaccgaagcgccctattgggtgggctacgaattcgatgttcgttttttggcatttttttaatcaagtcccattcctcaatgaataagaggcattttcacaggttccaaaattgtccaattttcgcttggcctcttttgtggaggacaacgacattttcggcacttcggcacggccttcgctgattccaatttcgatggcaatgcacgaaagggcggacacgacacggaatgccaagaatggcgacgaaattttatggggcactttcagcgcaatgaattttgatgaggagcgattttttcaggcaaaatcattttaatgtttatatatttaatttggaaggatgggaaattaattaattatttaattagaaatcactaattaaggggctgttcaccatcgactcgaacggtgtccgaaaggtggtgggaatgtacgattacggcacttgggacgcaaaagcatgctcaaaagaggacgaatacatcggtgagacaaattggcaatcattgaataattaattaggcatattttctatggaagttaatcaaaatttaaatatgaatcacccaattaattaagacatttctcaatgcatacatttcgggaattcagaccaaaaaatgcccttaagagaaaacgttttaaaagaaatcaattatataatagctctcgtgtaaaattctcccctatttcataagtgtccatttattccgtcaattgtctctccgtcattcaattagcgtcaattagcataatgcgttccttttgccgcaggtgacaaaagtcatctgcccggttacatgcactcgatcagttccacggaacattacgtcattctgccgatcacttcgctggtgataaacccgtgcaagttcaaagagccgccgcgcaccgcgggcgccgacccgcaaattcagcagggcggcctttggggcatggacttttacgacgtggtgccgatgaggtgcgaacttgtgtcaggaaagcacaacaaaaccaaagcctcggaattctgttggcattattctctgtcaggtttttggtattcgacaaacgcaccaattcgtggtttacccaaaagccgttggaagtgttcccgtcaatgttcgtcacccatcagctgaacgccttcgaagactcggaggggaacatcgtggcggacatggtcagtcaattagcgatcattagaagagggagggaaggaaaaaagggccgaataaattgggtaattaagtaaatattaatgactaaagggagggccgaaatcccattaattcaccgtaagtgtgattttggccacaaacgtacagacaaatctttaagtttcatctctgacttttggcattttgccaaggcttaattggggggggggtgattgcttctcgggttttcatttttggctttccaaagattgtctacgacagccacgacccttacgtcaaatatttctacgccgactttcttcgttcccaactctacccgaacactgctcgcattttgcgctttacgttggacttgcgcacttttcgcgtcatgtacagctatttgataccgcaggcaaattaaatcaaattaaattaattggctaattaaatttgataatttcaatccattaaggagaccatttccgccgacttcccccaaattaaccgcgcgttcgactcgcggccttaccaatgggcgtattttgtggagaatccgttcgccgggggcaacaaaattgtcaaaataaatgtcaacgaaccctcggggacaaagtgccgaattaatgaccttttttaaaaagcatttaaacccttccaaaactcagaaatttgcacttcaccccggacgaattgcaattggtgctgcacgagccgtactttgagcagaggccgggcgccacgcgagaagacgacggcattttgttggtcagagggttggagttggaggagaacaaaggcaggcgaaggaggaaaagcatttgaaaagcttattaattaaaattaaaaacagacccggggggtaatttgggatgaaatgaataaaaatgtcatttaaatttcgacaatgaattaaatcataaaaaataaataaatttgaattaatgaacagttttatccttggaattttttcaggcattctgctggtgatcgacgccacctcaatggaagagattggtcgcgcttttgtgccaatttccgtccccttcggcttccacaatcgctttttctctcgccaacagttgggccttaccgtaggcca

SEQ ID NO: 15888 - DNA, 1084 bp, Heterodera glycines
gattgaatttccccaattgtgacaataaatgggaaaacggccgggtcctctaacaaaaaaacagtatttcgtcatttgtagtaattatgtggttgaataattatttttaaatatttaatgattatcaaatatcagtcacaatcacttgtatgactatgtctaattctgtttaggctatcgtggcttgaaaaaataaaatttgacccgatttttgacaggcgcaaatgtcgggactttaagggaagggttattcgaatagttaatacgctttatctcaccgtttatttttctaaggtcaacactttggtcacgcccgatcatacaaagaaagcgtatgttcgcttagccgccgattatgatgctttggacgtggccaacaagattggtattatttgagtatattctgcgctttgtttttttgttttttgcgcataaattgttgctgtttttctgtattgaattgaaggtccatatggaaaaacttccatttttggggtcggaattccgaaatttttgataaaaacggagttttgagtttttttttccaaaaaattagcaatttttacaatttgtgttaaaaaattgcattgaatttcaattggttcggttgcacccaatggatggatgcgacatgggtctccctttatgcccacgtgtgcccctatttggcgattccttcggcgccgtttccgtccctcgccctgcccagcccctctccaccattcactcaaaagggtccaacttgagcacgcgggtcgcggcatggagatcagttgcgctttttcaaagggtcgaacttcgacgggcggaccccgcttatccgtccgaattgctttgtcgcaccagggacaattgttgcgacaattcgacatcgatgactgggacgtcctctcctttgtttagtcattcagcacgagtgacgattctcggcaaaaaaacaacgcccaaaatatgattcatttaaaaaccgttttttcatccctttgtttgttaccgatgctttcatttttaaatgcttaaaaaaattttttgttttcaaaaatcatgaaaaaatgtttccaagggttttctgggttgctgatca

SEQ ID NO: 15889 - DNA, 1960 bp, Heterodera glycines
tgttgttgggacgcgtaaaatgtgatgggacgcgtccttcaagtgggacgcgtaaagtgtcatgggacgcgtaaaaccctctagaacccatttaagtatatttaaaccgattttgaaccaatggaaaattcaaaattttggattttcgaacttttgttcgaattcgggtccggaattggccgaaatgtatgccgtattcgtaatcaccgacccagaaaaccattggaaatatgttttgatttttgaaaacaaaaaatatttttttccaaaaagggggggggtaccatctaaagtattaccctagatgctatcaaaatttgacatagcctgaagaggaagtaaagcatacatccagacagtctcgaattgtacagatgaacagaatgagaacccaaaggctatttttgtgtgtccgcggagtttcaaaagcaaatttaattactggataaagcacattttgtccttactaaattgggtagtactgccaatggtaggaacatggtttaaatgattttttattgaagcactaatgattcatggaccaaaaatatgaaattcgaaatttgagtgacttttgttcaaattcgggtccgggattcggaattggtcgaaatgggtgccggattcgtgatcaacgaccccgaaaaccctttaaacatgttttaatgaatcttgaaacaaaaaaatttctaatgggggaggggttaaactttactgttatccatattttctgtgatttttaagtttaattttttcaagagaggttctaccaacatgcaatattgtctgtaatgcttttctttttcgaaacgagcaggtttattgggaaaaggccgttgcgcatgaattcgattttttaggcccaagtgaaggtaaaataaatcaaatttaacggaaaagtccaaaacacaacaacaaatttgattctttctccaaactttctcagcgtatcaacggtccgttcattcttctggcacttcaatctctcccgccctgatcatgtccacaatgtcgtgagggtgttgtccatcgacggtacagccaaccgattgagcggtgcctataaaaattcgttaaatttgttgcaatggattaggaaacaaacccaaaatttccttgacggtgccttgcaattttcgtgcgattgaacgggggcgcatctgacgagcgatgttgatcacttgttcaatggtcaggttgccgctgtgcttcactaaaagcgttttataatagtgaccagtccatacctactggtattccttggtctattcctgatattattcagcaataagatttcgacgctactttaaaattggcaagttttgaattttactaaaaaccaatgggggggggggaccttttgttcccaaaagttgacacttttaaaattgcgccacatttctaacgagttatgttacgtttgtttcatttgctctctgtgaatctaataaactaaccattcgtgttttggtaccaatagtttgttgattttgaatcgtttaataaaagttgattttactaattgttcataccgttcttgactttcttgcggtcccttggcggttcacgcagttctttgatgatcagagaagcggccgatggaaccacgtctattttggcgacacgattctaaattgtaaaaaaaatattttggtaatactaccgattgtacaccctccgcccactttttgaaaaaaagttttatttttttacaaaaatttgttttataggttttcagcgaaggaaatatgattttcacatttatctctgatttttcattatcattaaaaaagaaaccgcagccaagcggagactcaaaccaaaacccctgtcttatatgacccttggagattaataattaaaaacttttcttcgaaatacattcaatagcttattcaaggcgatttttaagctcttaaatatcggtgtatgagtttttgcgcccgactaatttccctta

SEQ ID NO: 15890 - DNA, 2774 bp, Heterodera glycines
  unsure (1)..(2774): unsure at all n locations
cccctcccctttctctccgtccgcgctcaaatccacgcacacaaacaaacccatcccaacagattgtaaatgcttttcccactaacaaattcccattcgcgcgttctttgattccccatttgcgtaattataataatcgccaaaacgttttttgtattgagatttaaggcttagcttacaaatcacataacttgatcctttttactttcacttccattacattaaattgtccaataaatcaaatacattttaataaaacaaaataaagcaaagatacagcgagaattggtggatttacatttccgagcagtgaaaaacattgggaagcgcaatacatcgcaaattgatttgtgtgtgaatcaatgaggatttgcttacgcaattttatccctccgttacttatccgttggattaaagaaaaatgttactaaacagagacgagaattagaatcattgcattggtagtgagaaatcagcagccgatgatagaaaagggaggttaacaaacaattcaacaaaagagtgaaacacagaagatatgacagacgaaaatggaaatagaaatgtgcacaatcagcggagggggggggggacggaggtaaaatgagcattttattatgcgacgattttctgtcgttttgccctcgtcccacccgaattgcttaaaaaaactaattcaggaaaacaaataacagagcatatgttacaaatgttggcgctacttgcaaaaagcggacttttgcattttattaaaaaccaaaggggcaagggaccattccggtttgcaaaattttgtagtaataaatcgtgtaatttgttacacgggttttcgaaatcgctaatcacatatctggcataaattttaatcaattcctaatccttaacccttaaaaaaattcaattaaaaggaccccctcccttggtttttaataaattcaaaagtccgcgcgcccaaatgtttatttacaaaaattagaatcagtcagtcaaatgaccatctctcttcgcctcgtcttccatttgctcaataaatcaattgttgctacccgtacgtgtcgtcgatcgcgtgcttcgacgtggaagagtattcgactcaaatccggacaaaccgtttatctcgtcgttttttcgggaacgcgaccgactgcgccgtgaaacggagtccgagcgacgcggtttggaactgatggggtccttaaggaggcgagaaaaataggtggaaaagggcataaagtggtgaaaacaaaaacctcaatgacgacaagctcctcatcattgaccttttttacctgaaaattaactatttccgcaaatggacaaataaataatggagtttaaaaatgtgtgtgagatctgtcatgtaaactgcaaaaagtaacgatttctgtgccaccattttaccccctccccattttacgggcctttccgtcgacggttttgtccatgcctatggcttactaaccgtcgcctcattcgactcagccattgcgttctccacgatgttaccgtattcgtcatatgagccggtccatgtccgaacctgcgcctcgtcgtcgttgtctccgaggtgttcctcttcgatacttgttgttgctgcctgtttttgatagaccaccgttgttgtggtcgtcgtcctttttctctccccaccgccgccctttcccgcgttatttatatcgcccgtgctgtacgaacgttgcaaatcggtgagttggacatggctaaatgcggcgccacggagagccgcggtcgcgacaatgtcacgcgcacaagacaaaccacgagagccaagactgaccacctaaaaagcactaggacaaggaaaacggaaaggaaatccaatgcaaaattaacaaatttaaggtactttcctattttgaggccacacccaaaaatttaaaaaaattaataaaagggaacgaaaaataaacaaggcgagcgtaacactagtgatgaagcataaatgaaacaattgcagataaatttcgttaaattgatcagctcctctgtgtttgcagcgctccctttgttgatttttttttaaatttttggtgtggcctcataacaggaaagtaccatttacctaatttccaaatttcatttaaaaaagattgacctgtctgtaggactcattcttggcttgttcgaggaaattgtcaatttcttcctcgtgtttcataaacatcggatggacccaattgcggtataagattgaagcgccccttgtcctgaaaaatgcaatttattaattttatatatataaagataaacttaaataagtaccatggactgagcaaccaaaaaacaaaaataattttcaattcgtagtaaaatggaaacctgaatatatgtaatccaattaaataaattcaattaacagttaataaaaaaaaccaaaatgcgaggaaaatgtcggccaccgcctcacccgcacaaaaaatgccaaacacaatccaatacatcatccattttacctggaagaattatgaaaataaagtaaccaattgttaaaagttacatattccttaacgtctttgttcctgacggctttataacttcgatagaccgggtaaagagtgcctgcggtgagaatcacaattcgggaaagaagggtcgagatgaacatggaaangtcaattagcaagaatttatgatngaaatgatttgcaanatatgtattcaaaatgagcaaaataagcttnaaggcaantanattattatcagcagaaagaagaaaatgagaagaactacaaattaataaatcaatcatggca

SEQ ID NO: 15891 - DNA, 954 bp, Heterodera glycines
ggtaattgctgtttactggaaatgacgcggcagcaattaaaggtgattggcgggaaaaacaaaacgaaaagcgattggagactgactcactttggaattggatacataatagcctaaccgacaccacccactcattcattcagtctcaactttcttttatgctgtggtggtggtacgaatagactccgcctttgcttcccccgcccatcgaagaaatccctccgtccaccccagcagcagctgcaggaagacacaaatcatatgagattaactgctgatggagatgagagtaataaaatggatattcggattgcattgtaattagtattgtttaaacagctaacagatttcaagtgcaaaagtgccagtttaaggtccgaccggtggtactgaaggggccgccgccccgctttagaattttaaatttaattaacaaaaaattgatgaccgaccttcaacatttgatcttttccctgtgtgtgtactgcttcagctatggggtacggacaatccgtcagtggacaatacgtcagaggtctatccgtcagtggacaattcgtcagcaaatttttttaaaacaataatcaaaaattttacaaaataattattaaatttaataaatataatttttttataaattcttaacatttctagttactttatacttcaattatcatttaattctttaaaaatgattatttcataattgttaattttcacataattttaaataaatctgggtattttaaaaataaatttgcacaacatgtggattgttgagtttgtaaaatgagttaccgaatgcacaaaagcctttattccaagggacgaacgcgtgttgtgatcgatcacttccccgccctttccctccgtctgttcgtccgtccgtttgcttgctttttgtctcccagccatcccttccttcgctccttcctcatttgcttttccgtctct

SEQ ID NO: 15892 - DNA, 2018 bp, Heterodera glycines
  unsure (1)..(2018): unsure at all n locations
ggtttccaacccatcgaattgacgctgcaggaagaaaaccaacaaatgaaatatcaacaaaaacctcatcgattgcatcggcccatccgtctctctctgttgaccttcgccccttcacccacaaaaattaccaaaatcaaaaactaaacttgtccacttttgtaagttttttaaatttcaaccatcgactggcattactaagtgccccgtaaaccaccaccacacctgaaggattcccgcatcacgagcttccttgaagctcataattgaaccatccgcagcatttctcactccttttacatcgaagatggtgtgtcgaacacggctggtcaaaaggccccgttcgtgcgccatgaacaaattaattttctctcctctgtgtatgccaacttcacccagagtcaacacaatttctcctttcggcgtcaatcggcctcgcttcagcgcctctccgatggaaatcagctcatctcctggtcccagctttgatgtgcacacgacatccgtgcgtcgtattcattatcgatactataaacatggatcagagtgccagttatagcaacatttatgattctcacaatgtttccgtgtttttaaacaaagtttgaaccaaaaacgtgaaaatcgaaaatttgagttttccgctttttgtccggaattcggaattggtcgaaatgaatgccggattcgtgatcagcgaccccgaaaacccacagaaacgtgttttcatgacttttgaaaacaaaaaatttttctttaaaagggagggacaaactttactattaccgaaatgagcttaaatttaaagttttaattgataccaagaaagtaggcattgataagtgagagaaaagcagtagaaactggggatggtaagccttagacgataagaccgattttttatttccgcgttttttttttgttgtgttacaaatacatatgtatatacatatgcaaatagctattagtaacggaaccccgacatttgcgtctttgtccaaaagcggattcaaaataaccaaacatcactaaaattaagaaattgtagtattctagtttattaggagcttaattatgttgtttgaataattaattattttttcaaaatttttttgtgatcaaatgatcggatacaatcacattctaccgcttatttaaagctgttaaggctatcagggattgaaaaaacttaattttgaacccgattttggacaaaggcgcaaatgtcggaccacaaaagtcggggcgcaaatgtcgggacatgattaataactgatgagttttgtccttcatatttttgcactgttatttgtttagatatgcgatgacaatgatcagtcgcttcgcttggctaattttgattggttacattttgtaaagtcccaaaatgactgtgactctcagaaagaagaactacaaatcaatggaagtgaaatcgattcgtattcagaagaagacgacgatttcattgatgtttctgattgcgaagttggcaatacgaaagaaatggcggaagtgacgagaaattcgtcaaaacaacaacacattgaggatcgtatcggaagtggtgaagagacgacggaggacgaattggaagacgaagcgcattttgaaacacggaaaatgagaaatattgggctaaaaagcaaagaggaggacacttacgccgactgttatgtacactttattcaatttaacaatgagacttattaggcttaattcttcaatttaggatttattacggttaatgccagggacggtcccaggatgtcggcttggagcggggggtacctcccccgggcgacgaccttttttttcacaccactttttttgcagcggtttttccaaaaaaaattttgtggaacaggaaaccccgggcggntgccgataggccgcccgccgggaaaattagcaatttataatccgatttgttaacgaattttgtccaaaaatgacaaanttttgcgatttttagccttcttttagcagattntcatcaanaaattngtttatttttt

SEQ ID NO: 15893 - DNA, 817 bp, Heterodera glycines
catgacatgccttctttacccctgatatatttaaaaacggtgcagaatttttatttattgatttcacttaggtgttattaacgcttctcggaattccgtttatgaaagcgcccgcggaggcggaagctcaatgcgtggaattggaacggcttggccttgtcgacggaattgtcaccgatgatagcgatgtttggctttttggaggacggaaggtttatcggcacatgttcagtcggaaaaggcatttacaaaaatactgtgctgaggaaatcggcaagaaattgggttagttgtcactcttcaatccgatgactttgtctgaattggaaggattgagaagggccgagtttgtccaattgggaatgctggcgggcggcgattactctcgcggcttggaaaggatcggagttgtcgccgctcttgagttaatttccgaattccgtagccaaaatgctttgattgaggacgaattcgaaagggtttgaagcaaccgacgagtgaattctgcattcctcgcatttaggcattgagctccttaaaatgcatacgaaattggcttttgtcagacagaaatggacgcggattagccgaatcgaccggaaggctgagactgagaagagcgatagaatcgaagaacagcagagagacaattggtgggacaataagccagtgggagtgcataagctaactaatagacttgtaatgcaaaataaccacaaaatccccccccccccccaccattacgccaacccccgaaaatattgaaaaagcgttggcacgtgtgctaacgttttccaaaaccctcagagagtaagca

SEQ ID NO: 15894 - DNA, 3100 bp, Heterodera glycines
atccattttttgattacaaattttcgttgtttacttttaaggcccgatcccgattgatcactaaagttttgttttaatattccgctggtcctcgggtcgtttctcagtcgttgctctaacacttttgtaccaaccggtgatggagcattctcgggtgaccgtctcaatattcgctctaatgcttgattaacattactttttaaatatgccgttccattagctctaagtatgtgtcctttagcaccgataccaaatttctcagggtcatcatttataatcgacataattttttgttgtttcttgactacaaaagacttttgcttttgacgaaatttagttgttcctacacgcattggtcttatcagtggtctcgtctttggtgttgatgttgttgactcagcatcactctcttcagcagtagtgtaagggtcttcaagtgttggaatagagcctgtttcatccaatccttcgtcattaacaatttgagtaggaattttgctatctctttcacgctgttttggtttaaacaccattaatgagccatctgaaagctcaacctttaccggtttttcttcaacttccttcctaagtttcaagaaacgcctcaattcctggttgtaaagtaaattttttgaagtagcgtccaattttcgctgcttcaaaagtgatgacaatttatttttagcattttcaacattaatctcgccagactcaggttttaataaatttttgtacaagtctgaaggaacgagaataaatttattctccatattttagcgcggcaataagtactggtaataataaaggagtcaaattaacgaaaaaaccaccaccgttttgttgaaaaactttctttgcacccgtctcagttctaacttttgctaattttcttacaaaatttgcgtatggtaaaagtctatatttttgtctcttcgtgagcggaaagtacccctttaatatattataactaatttcaattaataatccaatttgctcactagtcgcttctttaaatatttgttgtctctttttaaaagactttgtttttaccaatttctttaaaaaatccaagttttgaataacatttttaggtaaattaatcattttgaatatacaatgctttttcttcatcttctttaaatatttttgtccgtattctcagtaaagggctcgatgctgggtgtaaatccaagaataaatatccatacggtgatgcggttgcatctttataggcacttaggaagaaggaaagcctcttagggaacaactgtacacccaaattacgtatttgtagcgcggcattcggcgccgacattataacaatatattgtgaattaattcgtgctaccttcacctttttttcaaataaattttgggttatgaaaatcacacccatattcaaatggtgggcttttttaatgaataattcggataggcttttctcatcaattattgttaaaaggtcatctagaattaataagagaggcttctttagagagctcagcaattcatctgtgggtgaccctctgtgcacatgtacacccattttttgtagtacaggaatactatcattaaattgaccataacaatagagcaccgattttgggtgtgggctaattaactcatctctttctctcaaaaattttagaaaaaatgttgttttaccgctactggaatggtccactaattaccatgccaaaaggcaattttaatttcaaatcgttcaagtgaaaaaatttttcatcaatcatctttattaattataaatataatgttaaattttaatcttaaatacaattagtgggggttctttgtgtgtttgttatagatatcagtctgcatcatattgtactttacgcaacccggacacatcacttgggtaaagtgaaactcatcttctcccatcaacttgaactggtccttgtgcttatagttgattcgacgacaccctgggcagagaaagttgatcactgcaaactttggccgggccaatttccaaaaggatcgttggtggtcaagtaagttatatacggtgtgggttgatttccgttcactcttttccaactcattctgttttagtggtttctcactgctttttatttctgcgtcttgttgaattacttgctccactacagattggagagtcttctttgaagaagtagaagacattctaatttctaaattgagttacaaaaccctgactatttctctccttaaatacctttttgtttggttaatttatattagtaatgacacattttttcaattttatttctgaataaatattcaaatgaaaaaacaagtgtaaaatagaaaataaagagaaatggtagaaatgaaagactcttttgatagatttgaaggcatatcagaattcatatagttcccttaaaagtgaaaaaacacacccagggaacggcttcacccttcggtccccaatccaaacactcacgcaccaggctgtgcattacaataatgaacagctcgtccaccttcatctcagatggatggcctggagtgttggagaggatcaaccaggggtcattccgtcccacatgagtgatataaacagagaaaaagaaaagaagggaacaataagaaaactaatatttagagaaaaattatacaatcatttgcgataaccaaattcgaggacttggaaggcgttattaataatgccttttgtgaatatgggttgataatgttttgtgagggaatgagtatacactttgccttggataaggttgggacgaataaaatggggataagttacaattatagggtcaggggggtcttcggagccatagcgtaagatttgatccttaacagtatcgtaatgaattttttgaacagtttgtgcatcaagggtgaccctcttattttcaaatcgtgttctatttcaccggtgtccttgcgttgcagcttcatcccataattcttgcagccagcactaatgaactccaagatattgtggtaggggttttcgtctgttagttctccaaggtgtccctttcctgttggtagtgggtcgttttcctcggggtgcacgtagatgacgctgtcggtgtcgtaataaaggatttcgcagtcgggggtgtcg

SEQ ID NO: 15895 - DNA, 2811 bp, Heterodera glycines
ccgctgttcggcttgccgttcagcgtcaaagccaacttttttctgagcactctgactgatcacatagggttttgttagagatgaagtcgatcgtgtgcccttgctgtgccgattataaaattaggtagacacaaaaagcgttggttataaacttttaaattaacgcatgatttgatttgacgtaatctattaatttgaatatttatttgaaaattttaattttcacaattacaattagagaccggacgggcccgggacgcccggtaaaacgggctttttttgaccgggcagcccgggcccggccaattgtcgaagcccgagcccggcattttcaaaattccggtctctaattacaattcacgaattcacctaaattttaaattaaacgaatagttttctctattcttttctcagatcgaaatgagctctcacaagaaaatgaatgggaaatttattgggaagaaaaagcgtaaaattgaaaagaagtggaaaaaggaagaaggaaccaataccaatgacagcaaagggaagaagccatcgtcaacagcaaaacattcgccattggtcggccatgaaagtgatcagaaatggtctgattttgacatacggattcagagtgatcatgcaaaacggggctcaaattccaaaaaacggagaaattttgaaaattttcttcccatcgccacttaatggctttatttagaaaccaagatttttgcattaaaatccctcattttctaaggtacgagagccaatttgatgaggtcagagcagagggcagtgccacgccttccgatgaattggtccaacgagcgcagaatcggggggaggaattgctgagccgtgacatcgcccgttttgcccaatgttcgaattttatgcaaaattccgatcatttttctaggcaaaatgtttcaaaaaattggtgccaagttgtcaaattccgttttgccccttctgtggtgatgacaaaacgggccataaacttgggaaattgtaatttgatttggtcggcgcttaaatatgggaataaacgcgcatttccatggccaattcccaccagatgcgccgccacattttgccaaaatttcccaaaaatctgtgaagcgcatttaaatttcttccccatttttagcctatcggagtcaaaaccgtgccgatgccgactggctggagatggtggccaaccgtggcacttttcccgaccgtttgtccgccctccaattgcgcatccgtcgctcggctgtccacgcgttgccccaattgcggcaatttgtccaactcgcccagcggaaaggggccaaaattcgccaagcgcacacattgaccagtacgggggggggggacaaattgacattttgaatttctgagcaagggcctgtaggactaattttcggactaaattgtgcaaatttgggcggggattttgacagttccatgggctttttggggtcgctgatcacagttgtgacattcattttggacatttccgaactcgaacaaaactagaaaattaaatttttttccatttcggaaaaatttgaaaatttttgttggctttttttcgaattttgggtttggaattcgaaattgtccgaaatgaatgtcatagtcagtcagcgaatccgaaaactccaaatatggtctaggcaccccttagtgtacaaaatttttttgccgaaagcgaggggtccatcggtactagtattaccaaggtttcaaaaaaatccacataattttatttttagaaatttggacccaacttttttccatcgctctaaaaatgccatcccccatttttagaggcgttgaaggacatttttctgcacgaacttttgcctccgaaacggaaactgctcacaatggcacaggtttttgagcaaaaaataaatttaaaaaatgtaaaaattgcataaatttcagaggccattggagcaatgggtcaatccgacggcaaataacaaatcggaggcggacaaacgacttttgatgtggcactttgaagcggagctgaagcagttgtaccaccaatttgttcagggacttcaggtgagcaacttccggcctagtctttaaaaatggaaattttggcacagcgaaatttttggtcgctttaaaccgttcaaatttacttccccccccccccccgagaattttttttgctaacttagaatttttcgagaaaaaaatcttagaaagttttttcatgagaaaattctaagaaaaaaatttttcgagaaatttttataatgaattactaagatttttcaaaaaaatttccaaaaaatcgctgagaatttctcgaaaaattttttattagaattttctcatgaaaaaactttgtaagatttctttttttaatttctcggcggggggggggaaagagctggggggggggcctcgtggacggtttctactacatactgatattgactgtacgacgagccaatatatcaatagaggaggttatagcatgtagtttaagtaagaaaatgtttcttccttatagcgtaagagaaacgatatttatcggagtagattatgaatattctaatggttgctttgacgttgatttgttatcagaaatagtaatagatttatgaattattgacttgcaagtcttattttaattcgaaatagaaagaacgaaacaacataggtatttatccatccttatgtggacggaaatggacgcttggggcgccttgtgatgaactggattctcctttagcggtgggcttccaaagatgaccctaccatagcgtgccagagatgagtacaacgcccaaattgcgctgacaaatggagcca

SEQ ID NO: 15896 - DNA, 1237 bp, Heterodera glycines
atatataccaatgacttgtaaaaatgctcaaatttttgcttttagtgtaatttgcgttcctctgacagaattctctttgacattttgaagaaaattggcgacggacgaaaggtttctttcacttgcgacagttcgcgtgtcgcagaaaacagtcgagtgatagtcagactcaatttggaatcgaacggtaattaagcaaaaaaagacactatttcaataaccccaattaagaaataagcattcttcaaaaggaccaaagcaaaatcgaaggtgaaattccggtttggaaattcatcggctctttggttggcacttattgtgcggatgatcaatcggttaatgagttgacggaccaatggcttgcgctggcctcgtctgtccgaattgatgaactttcaagacagatgagcgttcatttgggggcacacgatttcctcaggtggaaaagggatgggccaatagtgtcacagcaaaacgtgcaaaagatacacacagcaatccagaattttgggactcagaaaattccaaggtcccaccccccccccaccgaaatgaaaatttttaaagaatttccagcaaataatggaataatttttcgaattctttccaccaaacgaaaatttattttccttaaaacggccaaaatagggtcatttttacccagcagcggcaaaaaaagaagaagaaaaggctccccaggttgccccccccccccccccgaaatgttttcaagatacgcccctattgccccgtgcattgttttttaatttaagctctcaacacgccatttgcttgcccgatttggtgttacgttgttgtttttttgataccaaaacgacggctgatttgctgaattggtccagcataaaggcatccaacaatgtgcagctgtgggcgaaacgagtcgatgatgcatgtgcgaacatttgagaaatttgttgttttggtggtaatgctgcagaattgcggtctttgtgttacataaaccccagattttttgcattcttatctttgcttctttttgtgtgttcatttagtgttgtttaacttattttttgtgttaaatttttcattcgttttttacaattcaacacgtttaaagcgttccgttaacttaataccctatttttgttattattttagtaatttaatattaactttttgaaattctttgctcaagggaacaaacaatgactgaaaaacggaacatcaaaaaaatttgctgaatttcaaatgc

SEQ ID NO: 15897 - DNA, 2078 bp, Heterodera glycines
aatttttgttttttagtgtaatttgcgttcatctgacagaattctctttgacattttgaagaaaattggcgacggacgaaaggtttctttcacttgcgacagttcgagtgtcgcagaaaacactcgagtgatagtcagactcaatttggaatcgaacggtaattaagcaaaaaaagacactatttcaataaccccaattaagaaataagcattcttcaaaaggaccaaagcaaaatcgaaggtgaaatttcggtttggaaattcatcggctctttggttggcacttattgtgcggatgatcaatcggttaatgagttgacggaccaatggcttgcgctggcctcgtctgtccgaattgatgaactttcaagacagatgagcgttcatttgggggcacacgatttcctcaggtggaaaagggatgggtcaatagtgtcacagcaaaacgtgcaaaagatacacacagcaatccagaattttgggactcagaaaattccaaggtcccaccccccccccccccgaaatgaaaatttttaaagaatttccagcaaccaccaaacgaaaatttattttccttaaaacggccaaaatagggtcatttttacccagcagcggcaaaaaaaggaagaagaaaaggtctccaggttggccccccccccgaaatgttttcaagatacgcccctattgccccgtgcattattttttaatttaagctctcaacacgccatttgcttgcccgatttggtgttacgttgttgtttttttgataccaaaacgacggctgatttgctgaattggtccagcataaaggcatccaacaatgtgcagctgtgggcgaaacgagtcgatgatgcatgtgcgaacatttgagaaatttgttgttttggtggtaatgctggagaagtgcggacgttgtgatacttaaaccccagattgtttgcattcttatctttgcttctttttgagttgataattagctgatggttaacttattgttgtcgattaaattatcattcgatttttacaattcagcacgattaaagcgttccgttactttaatacctatttttgttattattttagtaatttaactattactttttgatattctttgctcaatggaacagacgatgactgaaaacggagcatcaaaacaaattgctgatttgcaaatgcacgaagttgagcaagggtcaagcagttcgacggaaaaccaagaggcgtacaaagagtgcgttttttttttgatattactgacggtgcttatgaatagatcatgaaccagacccataaccaggggcggcgatggggttgcagttgcccccacccgaaatgcaaaaactttttccttagctttttgaaattttaaccccaaaattaacctttttgggcgaaaggcggctacaaattccttcttttttttcctttttggcgctggaactttaaaaatttaaaaaacgctggaaaaaaaatttttgcctcgaagagcaaaaaaaaaaaaccctcggttgcccctcacgaaattttttctggttacgggcgcctgtcatgaacaatatgttgttttttcttatgtacctttgctatagtttcaatttacacatttaaatgtgcatattaataatttctaaacagaaacatggatgttttggacaaattgttggccgaaggacacaaattgatgttggctcagtcattttacgacgcgtcagttgtgctttgtaaggctgccgaattatcgtgaggctttttgcacgtcaatttattattttgtttcgaaatattttagctcaaaatttttcggcgattttgctcctcagtcattcttgcctcatttcaattacggcaaagcactcattgaggtgagcctatggagcagggatggtctcagggggaagtacgtacactctccacccccacccccaggcccgtatccagaaaaaatttcggggagggcacccgatgagcttttctttcttttttgctattcgagcggccaaaaatttttttttgattcaaaatctctagcaccagagccaaaaagcaggaattaatagagaatttgcgccgaaaaatca

SEQ ID NO: 15898 - DNA, 2040 bp, Heterodera glycines
  unsure (1)..(2040): unsure at all n locations
caacacacacacaaaaaagaaagaaaaactaactaatttctaaaattcaacaagatgccaaaatatgaagtgtaaaattggcgcgacaatcatgttttatggaaaagagtatttattgttggcaccccctccaagatctacccacccaaaattaatttttccgaaagtttttcttatctattgtatttatttagcgacttccctggtgttgaaccctttggtcatatcatcaaattgctttttgaatttaaattaagctgctgtgacgaatttgtatgacaaaaaatttttgataattttttccccaaaattttgcgcaagtctccgtccccgaatataccataaagaattacaactatctctttggaaagacctaaccatgctattaaaatcaattaaggtcaatacccggttgttttacaaaaaaaatcttttaatttacaaagaaatcagtttaaataagattaatacgtgtccgttcctttcagttaaaggctaaaatcaaaaaaacgcacaatgcggctttggccaaagtgacgcgggcgcagcagcgacgagcgatggactatcagcgcgagcaaagggcggcgaaggacaaaggcagcggcaacaaattgcgactgctctcattggacggaggcggcatcagaggattggtactcattcaggtgaggcacagacggaagggcaatacgcgtaatgatgggtactgaattacttcggtgtatacatgtgcaaggggtgtctcagcctaagggccatacataggaaataaaacaggcngggggggggtggtgtcgggaccgattttttcatccgaattctaaattttctctgttgtcaactttttcgattaaatttcgcggcgcgcattttctaaaaattttgggaaccagggaggggtgtggttcggcagtgccgacaggcgccgctgatgaaaattgagtgcaatttgttaacaattcgccaaaatggtcgatttttggaattttgagccaggcaacgaccatttatttcgggataggggtggccggcggtgcctattactgctattcttaacagttttctaccaaaaaaccattttgttttttaaattaatgtattttgaagtattactgctggacaaataaaatacaggattaccattctcattgtgtagttttttttattttttgcttttttcaggtaaccaactctgatggagccgcagtggaattagcaagaagaatttgccatgacaaaaaagttccatttttccggatcacgcctcaactgagagacgaaataaaaatcgacaccacagacaatgtgcaacttataaaaatgatgtggaaggcaaaggtgggagaatgaattttataaattgagttggaatttataaaattataataattcaaataatttttctgcaatttttcaattgatgagaaaaacacaaaaaatacattttaaaaataatttgcaactataacagttaataatcaattttttaaatatactagcggggtcagcgccttcggcgcatcccccgctaggtagtacgattgtagtgtaagattatgtttgataaaatcgactggctcggccgcttcgcggcctcgcatcctttttttgctttttctccaatcgtcggactcaactcaccagcatttcaatcaccgggactcaattctccaggagttcaatcactgggactcaattctcttgcatttcaatcactgggactcaattctcttgcattccaatcactgggacctaacctcacctggtccttcggcattccaatcactgggactcaattctcctgcatttcaatcactgggactcaaccctccagcatttcaatcactgggactcaattctcttgcatttcaatcactgggactcaattctcttgcatttcaatcaccgggactcaaccctccagcatttcaatcactgggactcaattctcttgcatttcaatcactgggactcaattctcttgcatttcaatcaccaggactcaaccctccagcatttcaatcaccgggactcaat

SEQ ID NO: 15899 - DNA, 3003 bp, Heterodera glycines
ctgagtctgagcaagtggaacttctttaaatttaaaaacttactgcaatttcttacccttccgtccaatttgctcggaagacgcgaatcggtgatgcaaaggtcgaaacatcgattgttcattttcaaaatctaaaagaaataataaaatggtaaacaaccgacgaaatcgacctgttcctgtaatccctgcttctgaatttctgcttggagttgctggacaaaatggttgagctgatggtcaccgccggtcatttccatgatgcgattaccaaataaatatgaactataaacgaaactgaaaaataaaatataaatcggaagcaattcacaaaaataaaacagaaatacgaaaacaaaaggaacgaaggattcattggagcaaaaacaatgtttattttttacgactttcaattgaaaaacaattcctgcgaaaattgaaaaacaattcctgcgaaattagacgagaaaagaatcgaatccaacataacgaagtgcgcgagtgcctaaattgagaaaataaaaatataaaaaataaaagagataaatgcacaccgatctccaagatgaagccacaagcgatgaacgtgaaaaagtcgtcacgggccttcctagaagcggaggcctggacctgttgttgaatgttgtggtccataggcataaacatttttagacttcgaatttaggtatttgctcagaagaaatgactaaaaagaaaagttatgttttcaatgtttctaagtaaaaaaaaaatgaaaattaagctgttttaacaaattctttaaaaaataaaattatttgccaacttttaaatttaaaaaaaaataaattatattgccaaactttttcttttgcaatttcaaaactaaattcccttgtttctgtgtaggtgtgttctttctagttttatgcgtttattttcgtaaacaccataccatacaaaaattaatttggatcactaattatcgatcaattagtgtatttatttttcgtcatttcctttccatgtcaatttcttaatgggaaaccaacaaagtcagcacaacaattctggccatgcgcaccatggcaaaaaacaacttgatccacggatagtgagtgccttcaattcgttgagcaacggaaaagataccatcggattggaacaaattaaggcaaatttaaaaaaagcgaattgccaaatgaaatgatcaaaaatttagccatcaatcggcgctaaattggccctgtccatttggccttcacttcaagacacccagcaaaggattacgttggaacagttcgttgaacgtgccgagacaattctgaattttacgccggacatagccgtcagaatgctaatgccagcacaaaaattggtcggtttctccagtggaaaatgcaattgactgaatttggtcccgcttttaatccactttatcttttgacttttccttctcaggtgaccgcttgccttgaggcggacggaatcgaagttcaaactgaggaggaaaaggcctttttgaattcgctggtggaacatatggtgatgaatcatagagagcacttctctttttttgaacggcacttttggtaggaatcgaatgcaaaaacggccgatgctttggttgattggaagaacacgaattgtgctcggatgtgccatccgttggtcgaacgggtgcaatcgcttctcactgccattccgtttaaagtgaattttttggttgccaaatggcaatttgtaaagcgattgacccaaaagcaaggcccaaaaatccattcggccattttgaacgacgtgcaaatgttcatccttcgccacgctcctcccaccactgtgttcttcccagacccatcgcgtcattcgtccgacgaggattggctgctgctgtactcaagcgcaagggatgggatgagcacgacgaggtgggacacatgggaaattcagagtgtattcaaaaccttgggattatgtcgacaaattctaggaattttagaacttttgaagaaaatttaataaactgaaaaataattatatgtttgggatttcttctttaattacggattcgacagatattttcttcttattcaagtcgattttccgccagaaaatttttttatgatagctaaataattggaaaagccacagtttaaacaaaaagttttgatgtataatttcaccgatatgctccaaatgtttctttatcattttgttgttttttaattcttgtagatttgaagcaaaagtgtttgactataagggcccttccgtgctgatccttcgccaaacttcaaacgatatttacgcaattgcgacagatgaagaatggaggtacaccaaacccaacggaaaaagggcgatcgatcggaaattggggggatttgcgaaacgatttgaatcggggagccattgtcccacttttttgcgtgccaaaacaatcaatggatggactttcccatcccattccattttttaaaggcacacctcaaaagcatttggtggtccctattccgtgctgttccaattttcgccccaattcgtccgtctccaattccctccgcccgccatttcttgcaatttcaaggcccgctcttcgccgcttggcctttcctatggcaaccgtttgctgatcgaagaggcgatggccaacgtcgggggaatggaagtgtggggctgtgcaggcgcagagacactgagggaacagagcaaaacgaagcaaaggcacgcacagcaggcggaacgaaatgcgaaagtgcgttttggggggaagggaagcgcagaaattgggacggtcgaaagaaatgcgattttaatgcatttaaaaatattttttaattaaaatttaatacccaattgccacttttccttttgcttgttttcccttcattcactttttgcttttcccattttaaggtgccattgccgggcaaatgggaggaggaaaaggcaattttggagatggccgggcacagattttccagcgaacgacgcgactgacaatgaacgatacatttggaacgg

SEQ ID NO: 15900 - DNA, 1365 bp, Heterodera glycines
taattgttatttaatttacagaaatattaatttataaccttttataaaataatataatagtatttaaagttgtttatatgttatacaattttcagtgccgagaatggcaacaaaaaaaacattttgacatattatcactagggctccaatttataggtgctaaaaactgccaaaatatgaaaactggaattataaatatcaaacaaatttaagaaagtcaattaaccaactctaaaaaagcaaaaattaattcacattaattataaaaggcatctatgtaaagctttagacaaaaattgtgtttgaattcatcgcgactgtcatgagatttaaataaaagcacaaaatttaataaaaataatttatgcaattacaattaattagaaaaataaatgataagaaaattctataattggtcagtaaaaatgaacttactgaatatatttaataggattttacaaataaatgcataatctttaactgatttattaacaaaaatattaatctttattttcattcaataaatccgagaaagcattaattttggaatttctaaaatttatttttacaaaaagtttcataaaaaatgcatttaacacaaacatgaaaaatcattattttaaagccaatatttgatgcattaaaaaaaaggaaaaataataaatttcaaaataaatcagtttgtttaaacgaatattgaaaactagaaattataaagtctaaaattcaaaaagatcgactaataaagtaggaaatttttttttaaacaataaaataattattgaaagaaaatgagcaaaatttaaaaaataatcaacaaatatataataaaaaaaattttctaaacacattttaaaatcaagatatcttttacattcagctaaattttatttatgtttgtcagctaaaaattttgactaggagttacttgacgtctacaatcatgccaatgttccagaggaccttatcagggatattgcgaatcgaaaaataaaatgcgaaatacgaaacacgaaaaatacgaaactcaaataaaatacgaaacacgaaacgccttaaaaacacgaaaagacgaaacacgaaatttttttactgaaaaaatttctatttttttttttgaattattttcaagatttgatcaaaaaattttctaaatcatttatcatcacatttttttatcataaattcataaacttttaaattatgattttttaaattttaattctcctaaattccttaatttaggtgtgatctgttacaaattttcaattttttttgccgcattaattcccaaaaattttttgcggagtagagggccggcggtgccgataggcgccgccgaggaaatttttttcaaatttgagt

SEQ ID NO: 15901 - DNA, 2060 bp, Heterodera glycines
ttttttcaaaaatttgagtgaaattgctaacagattttgttcaaaaaattttaaatttttgcatatttgagcagggcttagatcgaaagtttttcaaattaagaacattaaggaaaaaataagattttagggtccaaaataagaacaaaatggcttcaaatcagttatttttacaatttattcaatcaatataaattattatattttttgtctccaattatcgattttaataattaaaaattttttgcaattaaacccaagagacaaccttttgcattaaaaagcgcttttttttgcggcgcgatttttatggaaaattttgggagacatgggggggggggcgcggctgcgcctaaggcgccgccgggaaaattttgtaatttttaatgcaatttgttaacagatttttgtccaaaaattaccatattttgccataaatcttatttttttgatgaatagtgacattatgccataaaatttcaaaattatgagtatataatgaaataagaacaaattttggtcgatacccaaaaatcagaacatttcttataaataagaacaaatcgaagccctgtatttgagccaattttttatgaataagttttttgggctggcgttgccaattggcgccgccagggaaaatattgaaaattagagtgcaaattttaataaattatgtccaaaaataatcattttatggattttagattgaaaatttaaatattcgaaaagcacctccgggaaatttcggaaattgttacattttcaactatttataacggaaaaaaaaaatttttttttaactttttgtctatcttttaaaagaaaagaaatatttaaatagttttatttttggtggttgggaaatttttgtaattaaatttgaaaacagtcttaataaattatttaaaatataataaaaaaataattataacatgtgcggatcgaaccaagagtaagaccagcgaaaaacccgaagtttaaccacttgactatctgtttttcactatttataatttaaaaaagatagatatatttttctcaaataaatcaaacttttcacccaattattaaaaaatattttctttcaacccactaccccattcttaccagtgcttaatgtttttgtgtttcgtgccaaaatacgaaacacgaaacacgaacacgaaacagcccaaaaacacgaaaatacgaaacacgaaacgatcaacatccctgatacatgagatgtgtaaaaatagttaaattagtaaaacaattatttaattcaaaaacacaaatttataatgaaatgccaaatataatattttcaaaagaaaataaattaatcactattataatgattaaataattttatttcattttgtaaataatagtaaattttggtaagtaaaaagtactaataaacattattttggttatttatttttagttattattcaaataataaacttttcctaattattcgaaattgttgtgtatttgctacaacaataaaaatgtttggtcttcgaccaaaaccaatgttgtcaaataaataaataaataatttattaaacaaataaatatggaggacagcagggaataaataaataaaataatgaaatggtggaatgactgggagaatgcccggagtgggggaaagggagacatatttatggactggtcaaggggcggggatagagacaatgcgagagggaaagaaagggaaaatataatcaataatttgtgtgttcccttatccaacacctcccttctttggaaaagtccctcctgcgcgagatgtcatggccggatgatgtcgtacttcggcttcgacgggtccatgtccaatcgctgaggtgccctattggcgcgtgctgatgttcgcggcgcattttgacttcggccaattggagatttggctttttcaatctccttaatgggggtccgattcgtttggtccacagccaaatcatttccattttcttggccaagttgtgtctccatttccactgggaaacggcggcgaatttggttgacaaggcggtggactgcgcaacggagcgtcggaacgtcga

SEQ ID NO: 15902 - DNA, 2425 bp, Heterodera glycines
gtaaagaaagtttgggaaactgcttggattcaaaaccgcttcaaatttgggaaacacgtccaattcacacttttgatcaaattccaacaatttatgagaagaccaatttaaataaaagcacaattacaattaaaaatttcagaggagaggcgattccaaaattataaatagagaccgcattttgaagcatatgccttttttttttgcgcactagtttcgatatattaagcataaaaaacgctgtttccacttggtttgaggcttctacgttgacttttattatgccttttttgcctttttcaggattttcgtgccttaaatgccttttttggcatttttttcgaaaaattccattaaaaatgcaataaaatcgggaaaatacacccctaagaattgaaaattttttaattagttaatgtgcaaaaacagttagcacaattgtcatagtatttggcttatcctttcatgtccgtccgtttttctctttctttcctttaaaatttggtttcctctcgggcggcaatgtgctgaaggtgaaacttatgctattactataaaaaaaaatttttgtatttaaatcaatttgttgtttaatatttttaaatctctaaatattttgtggtaatttctcatggaaaatggcaaaaaccgctttaaattggccttgtgatttttcggattaattgtatttctaccgtacctccttgatgatgggctcattttgaacgcgagcgatcagtgatttaatttgagggtacgcctcgaggcagtctttttctccaaaatcaatgcattttgcgaaaaattcagcggcataaatatcggcccaagtgatctaagagaaatgtgcggttgattcagcactgattgtgatctgctgattttttagtcccactttgtctttgccaagcaaaatgccgtcgcctttctccaccaaatatttctcgactaaactcgcgcatccgtccaactgcgggcgtatcttttctcggaaaaaagccgcctaaaatagcgactaaaaaggacgacgaccaaaaaaaattatatggaattgaccgatggtacactgattgaatcttaactgattcaaatccgctgttccctgcccttccaatgttttcttgctaattaattaccttatctccgcacggcactaagtccaaacggaccattggccattctttgaaggcaccgctgttctgagtgtctgaaatttgatcgacgatcatattgagaagagcacgttccagcggatcattgaacgatagtccttttttgttcaaatacataaaacaacaatcaaaaaggaattactgtaaataccgtaagtttctccaaggtaacgggaaatggccagggattgggagaacttaacgccgttaacctccaaaacgggaagttggccaaggggcatttctgagaggagaaatgaatcaaaaaaggaaaagcaaactgccgaaaccttctttatatttgggccagtcttcaatgtttatgctcacttcctcaaatggcactttggcgaattttaaaatttggcgaatgtattcgcctcggcctcgaaccccagcaaaataatacaatttcggttgttgagaagacatttttcagtttattgcttatactattgatgttagtttataatttctggtttaaaattcttattttttacatttttaaaaattaattcaatttttcggcttttttttcattggaaggccaaaaaagcgaaaaatgaggattagtggggatgttatccccagaacattacgaaagaatattaaaaatgattaaaagtaaaggaaataaatgataggacaaagggaccgattgttgggtgcccaataattcgagtgtttacatgttgcatatcaatccacccagcttatttgagtgagcgtgcaaagaagaggaagagagatgagaagggatttgggggaggttccggagaaggggagaaggcgagaggaaggaggggcgtgagggaagggggtgaaagggtgagagggagagggggagagagagagggacgaagagggaaagggggtgaaagggtgagagggggagggggagagagagagggacggagacggaaagggggaagagatgggtgattgatgagatgatgagtggagagaactaaggacaaagaatgaagacggaagaccaaacaaaaacagtcaatgtcattatgtagtaaggcttaaatttacttaatcatttttatgcagcattattttgatgaaaatgcatgaaaaacgtcattttagcagaaaatattctcatatccaaaaatattttgggctttaaaaatgaaatttacgaaatattttaactttttatcaatatttgataaatatttttgcatttaatcttttcttaaatattttagcatttttttcttaaatacttattttatatttcg

SEQ ID NO: 15903 - DNA, 2953 bp, Heterodera glycines
tttatttgttatttaaagcaattctgacaataaaaaagaaaaaaaaaatttgaaaaaatttgacccaaaaggcggacccaaaccgaaagagtaccaaggagttaacccttttttatcagcttacgtaaatgttgtccggccaccacccgaatttttatttcttttacggttagttgaccacattttttcctttaacaaagcataattaatgttggtccgataaaaatcaaccaagatctgttccaattagctcgtatgacctttaagatttggcataatatgtcctttgtaactattcccaagaaaatgaattacggaccgcgggatcccacacaaaaacaaaatttgcgaatcccgctgtgggattatttgtttgtttcacatttttggactctgtttcaaggaaagcataaatttcaccaaaaaaccgaccctttttcttactttcaaaatattcgacatttgaagcgcacgcattttttagctttaagtaagtagggctcggatttttaagcgcgaaaaagtccaaaataagtgcttaaataagggcgaaaaaagcgcgaaataagtgcgaaaataagcatgaaaaaattccaaatgtagaggtgaaatttgttaaaattgctgttttctctatgtaaattagttaaaattaagtcaaacaattttatttactgattgcagttagaaatgaagtacatttagaaattttcaggatttaagggtcgattctcacaaatcaggggcgtatttttccgaaattttttgggtcgattcttaggagtgtattttttgaaaatttttaggtcaattctcaggggtgtatttttccgaaatttttttggccgattcttaggggtgtatttatcatttttattgcatctttgttaataaatttcccaaaaatcgcgaaataagaacgaaaataagcataaaacgctaaaataagtacaaaaacttattttatgggcgaacctctaaaataagcatttttaagcacgaaacgccaaaataagcatttctaagttcgaataagtgcgttaaaacacaaaattttcgaacaaaaaatgtgtttttcgtgcatttctcgtcgagttaaagccgcagaaaaaataagcaaaaacttagaaatccgttccctaattcgaatatacaaaatttatgtaaatttatttgcttcttttttaagtgagaatttcttggtaccaattgatctgctcaccaaatacaattactgccgccccaaaaaataaattggatattgttcaaaatggcatccgaattttcgcggtttctcctgtttcagtctcagcttttctttcgtccgtttgttcaccaattcaaatggttcaattggcattgtgtccacaagaaaaaacagttgaattgtgtaactgacagaagtggtggcatgcgagcacagtgtagtcaatccgccgcttaatgatcaggcaatacgaaggcttgttatcgcacatggtcccaatgaaaaccaaaatgatcaaggacattctcccatcatttatagggttaaataaatcagattttaaacaattttttttgcggcgcattttttcagaaaacttggggaacttgggtgggcccggcggtgccgataggcgccgctggggaaaattttgaaaattttagtgtaatttgttaacagatttagtaattaaaatagtaaattaaatgaaaaaaacggtaaaataaagtgtgggcatatgggattgaacccatattaaaaaaacaacaaaaatctgaagtgtgcactgggctttaccagtggcgatgctttggacaatttgcgtcgccgcacttcaccgacaattctcactgatcttgatcaattgcattcgatcgatttcgctcttatgtgctccggcatgattgacaatcaaattctgtccaaatggttgcacacgccgagcaaagatggacaaccaaagcgattgcgtttccgtgcttatgtggggcccacgaaatctcgaatggctcaacaatttccgagaggtgatcactgatcagccatattttcattaaacgacgactaattgatttaattgtccttgattttgacgagcagacaacggaaaatccacaaaattgccaccaatcgatacattgccatcgattagtaaagacattttctgttctggtccattatcgtttgcttttggtacttcgtccttgccaattctgatcatcctccaaattaccaaattggatttgtatgtgcctttatatatgaccgaaacttgggatgtttttgcccgtcacatttggccaatttttgtgacaagcattcgccatttgagctttgccgatggcgatgatttggataatttgcgtcgtttggtttcccctacaattctcactgattgcgaccaattcaaaatcaaatttctggccaggcattgtccaaatggttgcacactccgacaactgatggtcaaccgaagagattgtttgcagtgattatttggatccaccaaaaattgattggatcaacaacttcaaagagtgtctcgccatttttctcaattgtttttgtttttcccaattttgtttagacatttctccgtgccacctcttcggccagttacactgttcgaattatttttcgtgtgaaaacaatgccaattgcgccatttgaattgatgaacgaagtgacaaatgagaagctgacactgattaagggtggagcttttcgttggctgttgaaacggtgcccaattgttggggaggcggcggcggtggtttagaaacagcagaagaaccgtttgaacggagtctacttctgtctttatgatgccattttctcgactaatggtttatataattgaaacaaaagaattaacaaaaacatttctgagagaaaataagcacaacaaattgagatcgatcatttctcaaatacaattaattattctttcccgtaccacttaatcag

SEQ ID NO: 15904 - DNA, 1583 bp, Heterodera glycines
  unsure (1)..(1583): unsure at all n locations
caggcaaaataaaccaatttgctcatgatgnaatccccttattattgtatttattgtctctcactttttcaatttttgaaacaaaaacaaaaaaagggacacagacaaaatgacaaaattgaaaataaaaaattgacaaaatgtcaattgctttaatcatttttgttcttctcattggcttggttgattgattggaatttttgctgatcagtggaaaaatggtgggaattgaaaaggtgatcaaaccggtttatgagcccacagctcaacaatattgcagcagaagaaaagcactaaatatttcaccaaaacgccaatttatctattggtcaaataaatgggaaatttcaatgtttgaactcgaagaaaaataattttaaacatccattttttttaattttttgccggtaattagctaattatcgtgattaaacgaataattaatcatttggcaataccgtgcgataacagaaattatagagcattcatgaaaactagaaattagaaaaatttaattaaaatttaattagatttttacaaaaattaaattcaataagatgtcaagcggacttcacagcaattttttgaatcgctgtaagcaaacgattggcgttttgttttatcttggccttatgcttctgcagccgctcattctgctcgcagttgtcgtttcgttcgcctcgtccccaatattttggtcaaccaaaaaaataaaaaataaataaaagaaaaatattttaaatatttgtttgcttttcttcaggttttgcgcttctctttacctcatttggtatatttcggactttgaaacgccgcgcagtggcgcccgcttcagcgaaagcatttacaattggtcaatttggaccgatttggccaactttttcccaatcgaagtgattaaaacagcggaaatcccgcccgaccgaaattatatttttaggtaacttttgtgccaagaaaaaattataaaaaaattttagtgcccatccccacggcattctcggcacatcgagcgcaattttgttcagcacaaatggactcaactttagaggactttttcccggcatcaaaatgcatcccgtgactttgggaatgaatttttggatccctttccgacgcgaatttattttggcaatgcgtaagtccaatggttttttttaattctgtaattacttcatttagggattatctcaagcgatcgggagtccattaaatacgttctctctcttcccaaggaagggaatgccgtcggaatggcaccgggcggtgccgccgaggcattggaagcccatccgggaagtcaccggctgattttggccaacagaaaagtgaattctcgataatgaattaaaatttattttcgtaatttaagggattcatcaaattggccatccaaaatgggtaataaacaaaacctaaagaagggtaatcaaaaattgccaattagcgcgtcaattgtgcccgtttatcactttggtgagaccgatttgtacaaccaagtgaacaattcggacggaagtctgatcagaaaaattcaggtcataataattaaaaaatgaattaaataatttttggccttttag

SEQ ID NO: 15905 - DNA, 967 bp, Heterodera glycines
actcataaaggtcgattggactcataaagtgcattagagccaaatttacaagcatttcattcattattcatttgctttggggacagaaaaaacatttggccattacttttttgtatatcattataattttttttatcaaaattataatttttttaatttcgcatatttttaatttcagatatatggtcacgttgcatttgcatttttttagggaatgttttcttgctggctttatccgtgtacatttgcttgactttcgcccaaaatatatgtataatcatagggccataaatacaaagctaaattttttgtttatatgtaattataataaaaaaaattaatatttaaaactgaattttctttcattaattggtgtcttatttgtttgaatacattaaacctttttaaaaaaatatttatgaaatttttttttatacaaaattcgatttattatttcatttatgaaaatgtcttcatcattggtcctaattttgcttgtccatttttgtctcgctaccaatgaatcggaggataaaaacaatggcatgttttatttcaatgaagagggaatatcatttatatcgccattattaccatcattagcttcatcctcttcctcattagcttcatcctcatcatcttctaatttcaatcaaatgacattttatcaagcaattcaacaattgccatttgaagaaaacgaagaacttttgctgttgtgttcattttctgaagtgaacgaagacaaagtaccaaataaatttaaagattatttaaaaatgcatttaatatttaatttgggcacattttctaatttagtactattacaaaaccaacgatagttttgcagaaacatcgaatggtaaaacagcacaaaagcaaccacctccttcggcaaaaaataagggaagtaatttattgactccaaataccaaatatggaagattacggtaattttgttatgttt

SEQ ID NO: 15906 - DNA, 1455 bp, Heterodera glycines
atgggtaaatactgtattttatgaaaggttctttatcggaatggcaagtggtcgtaaatatatgaccatgactgtattttctgtgggttttgtgatctttttaatagttcaaatcgaataaactttcaaaaattctaaagttctatcgggttggggtcagttccatactgccatttccataccgccatttccataccgccgtttccataccggccgtttccataccggccatttccataccgccatttccatgccgccgtttccataccaaggtatttaggccatttccataccaaaagtttaagacattgaaattaaaaatccaagaaaaaataacattttatctgtttcaaatcacggtctcatttcataatttcgagaaattccgatcaaaaaagcaataataaaatgatgattaaaaggctgatgaactgggaaaatgttagtgtctacgttgttaagtggtaaataattttgaaccatcgtgagaattcggcggtctgcttcgcgatatttctttgccttttgcggtggttcttgtctagttgaacacttcgcgaagtcatcatcggataacttttgatcctttcgcagaaggtcaatggaatgccaaatcgatggatgtgaacaggcaaatgcgcattgcaggcgtctgttcgcggcttctgaatggttattcgtccggtcatcgccttgcagtgttcgagtgtaaacactccaaatgtttgggtcaaatcgcgggcgtgttcggcttccatcatcctaagacgatccgtgtaattcatgatgaacctaataaataattaaagaacaataaatagtaaacaatttgtgagattgtcaatttaccagtcaagtacgggagtaagttcgtcgggaagagccatgtccagagcaatgattccaggggtcaaatctccaattgggagaaacgcgagcgacgtgacacatcgtgccatttctgcgaatgtcgggtcattttgatagcgctaaaattttcgaaaattcgattttttttgtcatgaattcaacctgtttcagcccaaattcagaattttttttgtgaaaactttggacgaggtggaacagacatccgcgcacttcagtgaatgggaagactacattcagcgcagtgattgccgctgtctcgaagtccatcgaagtctggccacacagcaacgagcatacgaaacatacgctcgtatgtagtgtgcgttttgttggacagcatgcagtagcacactgggatgacccagcgattccgacttaataagttcaaaattgttaactgttaatttcataccgcgccaaaattgcgtacacttgttggaaaggcatcggtgtgatgctgaaggcgccatcggcgaagcactctttcatttcatgcgcccacagaccattcgattcacgtccacatatcagaattcaaaattgcacatataaataattaaaaag

SEQ ID NO: 15907 - DNA, 1968 bp, Heterodera glycines
tttttctggcaattgcgttgacggctgaaccaaatcgcgaggacgtcttgattggcctcgcacttgattttaaaacactaattccttttaataaacttgacttagtttcgggaaaaatttgtgcgtaattctgatagtgtgtccaacaaaccaactttatctggtgtttgtggttgaatgctctcagtgtaacgcttttattcgtccgtcccagtttacttacaatgagttgcactctgctctgctctgacatcggcttaccctcctgttcaacgattgaatttggaattaaactgccaagtgaattgtattttgaaaataaaagcctatgctgactgcgccaatttgttgtgtcgtttatcaacaagaataaatataatcaataaacaaatgaataaagtcagaggtgaagagagagacaaagtgtgtgtggggtgaaatgcaaatgataaatgagaatgaatgaagcccgaagcgaggaaggagggaatagagcagtatgggatgatggtgacgtacgtgtcaataacataatgccaagaaaatacgaaatggcaataatacaacaataataaaagaataaaataattttcaatgatgtgttttcatatttattttttttattttagttatttcaacaatattttgatctttaataagtgggaagacccaagacaagttgcgacaaaatgtgatggataccattgctttcttatgactgatcagaatgaagtaaacgttttggcagttcggtacttggacaatcagtacgaacgggcaaaacgtgctaacaactggtacaatgagaaagttgtcgaaattgcaaacgtcatagagtaaattattcaattataaattaaaaataattttttaaaccgctagcagtttgaacaaaagaaatagaagttttagttagcttaaagagaaaaaattgttttagttagcttaaagagctttaaattaaaacctttttgaaacattaggaaaattaaatcatatataaataattagggccgccatttataaaattctgcgccttgacacgcacaaataagcatggaaaatgggtttttagcttagtttgggatttctacgatgactttatatgaatttcggaaaaattcttaacaaaactgaaataaaaaacgaaaaatacacccctaagctttgatttgaaaaatattcttattcgaaaaaactaaaatataataatttcatttacgattgaaatataaaaaaattaaccttcttgattctttatgggttttgctgtaaaatatttaataattttatttacaactgaagtataaacttttgttaattttttatgagttttactactaaaaataggcaattaaaaatttatttgcctatttttacctatttaatgcctattctgcgattttttgtcactaaaaatggcagccctaaaaaaataaattggtgaagaaataaatttgaacccaattttgagaataatctcatatttccggtgcggaactgtctgcatcttcatacataaaatgaactcgtggctgttttaactgatactggcaaatttttaattttgataaatttgagcaaaatccaaccaatctaaaaattcttgatggttccttttgtaccggatgaggctcctgatataatcgttagggtaaataaaaaattaattaattgaccttaaatagtttggccttttaagctcagaataaaaatttattgccgtaaaagtgtttaacttcttgatgaaattctttcaaaaaatctttgacaaaaaatcgttgcctctattaatttcgagcttagaaacctgattaaaaggcatttttctttatctcttaaagtgatgtcttatcccgcaggcgcatatcggcatcgcaaaatattccttaatttttttaagattcaaaaatgtttttgaatttaataatattctattttccaaaaaaaaatgtttacgaatcagtt

SEQ ID NO: 15908 - DNA, 1285 bp, Heterodera glycines
  unsure (1)..(1285): unsure at all n locations
gaggcataaagcgaggcaaaaaatagcaaaaatggcaaattcagagctgtgaacgaatttttccaaaatttcgtcatttcnaataacaataagattttggaaaattttatacaacttgtttacagattttgtgcaaaataagcatttacaaaaaaacagtaaaaaaaaaaaatcaaaaaaccggttctagaggtgcattttttcaccgaaaggagttttttgtgactgaagaaatttattattttttgatagtattcattagggctccaatttaggtgctaaaaactgccaaaacagttaggttttaggttcaaaaaacccccaaaacaagaaaatatttaaaaaattctgcaaatgaatttttgagaaattttgatttcttaagggtgaattttttaaaaaattttcgggtcgattcttaggagtgtattttttggaaaaaaaaatttaggtcgatttagggggtgtgtttttcctttttattgcatttttgttaacaaattttgggcaaagcgtcagaataggtgaaaataaggtttttcaaaaaattttaggttttttaggtgctaaaaataaaaaccttgaaaattggttctaaaaacttgaaaagtagcttaacagcccaaaaaaaaacaacatgtttttgtgcattttagaccatagggagctcaggaaaaaatagttaaaaacctaaaaattggagccctagtatttattcattttaggaaaattttcaaatattgatcattaactttgattttatatatttatttcaagattataaaatatgaaaaaataggagcgaatcgacaaaacagagacaccattattttctagacgaaaccccaaattagggaatagcctttaaataccacaaattaccaagaataagtatatttttaatttctaaagaagtcgtaatacgggtaaccctttaaataaaaatagaaaaaattatttttataaaaaaaaatcttacgtaccaaaattattgaaaagcccaaaaatccgtaacccgtaatacatacgggtccaaaaacgccgtaatttctataatatgtaattgcgtgcagtcctgttatgcactacctcccgcgcccacaacaaagcgacccgcccattccgcgatgtgttaaaaagcttattagacaaaacaaaaaatctaaatcaaatattatctcagctctttataaaaaggctttaaagcctttctcaaatagtgtaaaataaaaatatttttaaattttatttanatttggaatgaattgcacttttttcgcctttt

SEQ ID NO: 15909 - DNA, 2579 bp, Heterodera glycines
cgttgtcggcttcagtcccacgaggagttggacagtgctcactccaaggcattgggtgagcatgggaaggaaatcttttgatttcaaattgtggtttaagaggcctccgaattctttttttaatcctagaaattttcaatttttcccctttctttttgcttttcgtcagccaaatttttttctcaccgcaaaattttgcgtcaatttttgtccttaattttcatggcatttcataatactatacaatacaatcagcaagaaaaaaaaacgatgggttcaaagactaatcgccccaaatccatcggcggttgttccattctttcgcggacaaaacgagcgttgcaattgcggcaaaacctgtttaagtgtcaaatgttgtgtgtttttttgcacacgccgacattttattcgttttattttgggagaaattttctttgcctcggcagccctttctttgttctcttttcttgcgcaacactttgaagggagtgaaagtgaacaatgatgaaaatgaatgggaagcaatggaaaattttaaaaaatcgccaaatttggttgcccaaattgttcattttttgcacacattttcccatctattcccccaaggcatttctggacgtctccaagtgttctacaagggccaatttatgctgacggacgcgccggagggcgctcgggacgaaacgccgggggcgacgccgcaacaacaacaatgaggactgaatggtgatgatgatgatgatggttgacctttgatcgatggtcgctttcatgttttttcttcatgggggaagcacggcatttgttttggggtcattgccgccctaattgtaattagacacatgcatttgtaattaattactctggagggtaattaatgaaaatattcttctctgatcagtgaatgaatgagtgatcactgctgctggcccaacaaaaatacaataattaaagaactgaattcaaatgggagaattccatttttggcactgttcaaattttgaagggtaattagacctaattatgtgcaattactcaggataaccaataatcatgttaaacattgccgcgcttcccttactatgcgctatataaatactaaattggccctttgtaattatttgttacatcaaccactgtgcctttttcgaactttcattgccattatattcctccaaatcgtgctgttcgtttagtacaaacttgataatataccaatcgattcttctcgaggagttaaacacgcaaaaataggtctccagctgggaaacgccataaaccggtctttgaaccggttaaaaactaaaatggaaccaggggataaagtctacccaaagcaatctgtgcggcgctatgtaatttcgacactgagtattttcgacactaagaaatttcgacactgaactatttcaaaaactttcactgttttcctgaattttcgacactggactatttcgacattgagtaaatttgacactattgcgaatttttaaaattaatatgaaattttgaaagtgttagtatttagttatggtaaattttcatatttcattttctaattcgtaatttttaaaagggtaggtggtacagtgtgttaacttaaaacaaagacaccctatttttacacggcgattcaattttgggctccaagtacaaataagtttattatttatttagtaatcagaacgccaaaactttgcaaaacttaaaaattttatgggattttcccttgtaaaaacggaagagccgatcttgagttaaaaagcattttgacaaaaaataaagcatcatcctataggttgggttaaaatatgtgtttaagcaaaatttcaagaaaaaataccaacaggaaaaaattttttccaagggcaaagttttttctttttctctcattttgacgcactatttccatgcctctaacatataaaataacacatggttcatttttttgtcaataaacaatttttttaaacttttgactaattaagaaatattcttcagaattttcccttcaaaatgagcataaaatggttttatttggtctattattgaaaaagttataagctaaaaaaatttcataaaatcaagggtaaaataaaatgtttaccttttattgtttgtatttgttcttttggcgttctgtttttattattttttttctgaaaatattaagattctaaaagtgagaaggcgaaatgacgagggaaaaaaaaacttacgaatttttttccgaatcgcgaaataggggtgaaaataggggcgaaaaagtttcaatgtagaggtaaaatttattaaaattgctgttttttctatgtaaataagttaaaattaaggcaaacaattttattcactgattttcgaaatttcgggatttaagggtcgattcttaggggtgtatttttccgaaattttttgtgtcgattcttaggggtgtatttttcgttcttaatgcattcttgttaataaatttcccaaaaatcgcgaaataagggccaaaataagggcaaaacgccaaataggggtaaaaacttattttaggggcgaacacccaaaatagggctagggtcggatagaggcgt

SEQ ID NO: 15910 - DNA, 2639 bp, Heterodera glycines
gaggagctcagcgacataccggcaagatttggtactttgagggggggggctcgcgaaaaaaataatttggcatgcctaaagtgaaaagattcatccctttttatacacagatagtcagtgctggacaacggaaaaattctaaaatccaaccaaagtgattagggtcggaaaaaccgattccggcatctattttcgcccaattcgaaccccgaacccggaattcgaacaaaaaagtcaaaatccgttttttaaaaaattcacattttacacacaaaatcgcttcacaatgccacgacgacgactcgtatgaccaaaaaatgccacgacgacgactcgtatgactaaaaaatgccacgacgacgactcgtatgactaaaaaatgccacgacgacgactcgtatgaccaaaaaatgccacgacgacgactgtatgactaaaaaatgccacgacgacgactcgtatgaccaaaaaatgccacgacgacgactgtatgactaaaaaatgccacgacgaccactcgtatgactaaaaaatgccacgacgatgactcgtatgactaaaaaatgccacgacgacgaccaatcgtatgaccaaaaaatgccacgacgacgaccaatcgtatgaccaaaaaatgccacgacgatgactcgtatgactaaaaaatgccacaacgatgactcgtatgactaaaaaatgccacgacgacgactcgtatgactaaaaaatgccacgacgacgactcgtatgaccaaaaaatgccacgacgacgactgtatgactaaaaaatgccacgacgacgactcgtatgaccaaaaaatgccacgacgacgactcgtatgaccaaaaaatgccacgacgacgactgtatgactaaaaaatgccacgacgaccaatcgtatgaccaaaaaatgccacgacgatgactcgtatgatatataaaccaacaaattatatacaatattgaaatggcacagtgccaacatatcatttcggtcatcataatcgccatcaatcaaccaattaattcattcatttcctgctgttgatcagtgatcactcggcccgggagaagcggcgtcgaaaagactgaaaaaaatggtgaatcccaaaaaaatttgtaacataacatttttggtacatttgaaagcgcactaagtcgaagcaattgttaattagcaaaaaaaaaaaaaaaattagatttcaaattattaaattattcacccttcgtcaaatgcgccgtctgtgatcaaaaagtgaactggattcggtgaatcattccatatttcatccttcgcatttttccaatttctccaatcccacgcaattggacaacgtttgagcaaaaaagcatttgctgattgtagaagaaacaattgctccccagtcgcttcgttgatccgatcaacaaatggcacaacagagtcaatcggagaagacagccgaaagtgaatgcggaaagtaaccggagaagaagcattggaaaatgcctaaaaatgtgacaaaaatcacaaaaaaacacacacaattaaatagggataattaccgttttcaactgttccaaggtggaagaccattgatccggtgaattaacagagcatctgagccacttcggcataccatccggactgggcgtgaacagccatttggccaccgcttggccatccgtcgccatggcactgtcatcgggcggaaaagcggggagaatggcatcattgaaagagacagcgcgaagtgatagacaattgctgagcagtgccggagccaattgacgcaaatgccgaaaagcgatggtgttcaaaattatggcacgaattgagtcgcggagcattggccaaatgttcaacaaaacaaactccgaaatgcgaacattttcagtgataatgatcaaatcgatggtacaaatggcgaaaatacggcgaaaacggcggaaaaattcgatgacattttgatcgatgtaactgaaaatgttataattataaatcaaatccaaaaatcaatttttacaggatttgaatgcgtttgaatccgatgagtttgttgggcaacggatttcgagggattggcaatggatttccagcagaattaacaatttgcattttcttcgtgccattttcttcaatgtcccattggattataaatggtttgttcagcatccatttgcgtgttttgaaatgttcgtccactcggaggtcaaaacgacggctgatcagtgcaatttcgaggcccagctgagaaggcgaaagaaagtcgaacacttcaagccaacaatcggcagagataaagctgaaaaattgaagaatttttcgaaatttttaaatttttgttttacatttctttttttgtagagaggagtcgttttttgacatgatcagaaaagaaccaaagaatgctgccacagccggccaacagaacagtcacggcacaccaactgaaaaatgaattgggcaaatgaatgaataatgaaagggtcaaagatcaaagagtaatagtaaagtttatcccccccccctttttttgaaaaaattttttgttttaaaaagtcatgtaaacatgtttccatgggttttcggggtcgctgatcacggatccggtatccatttcgaccaattccgaaacccgggcccgaactcgaacaaaaa

SEQ ID NO: 15911 - DNA, 3440 bp, Heterodera glycines
  unsure (1)..(3440): unsure at all n locations
gcgcttcgcgcctgttttttaattttttgggggacagtcgtgcgctatgcgtaatttattaattttaaaataaaaaaggaaatttaaattaattaatagaatcgaaaaaactaaaaaataaattaaaaaataataaacacggcctgggtccgaacatgcgccccacccctcagaatctccaatcacacagtgattctgaggtcttaaccatgtctaaagtaaaatctgattacatattcgtgatcagcagcccaaataacgtctaaagacatatttttggaagatttttggtgaaagaaattttcctctcaaaaatcatggtcacacccctgtggtcagaaattacaaaatcacttttatttctataacttttttcacaaaagtgataaaaagctaaataaaatttataagatagagcaaaaaattgcggattttttgagtatattatttttataaaatactttttcagaagggagttaggaatttttttctgaaaaatcgaaaatttccagaaattctggaataacttttattatttgcaagatagaaatcccaaataaatctcataaaattctcctaattttttgctatttttcaaactttattccactaaaattgagcaaaattgaagtgatttatgaatttttaaattttggcgtgaatttcggaagccaaaaaattgacgatttttcgaaaattttttatcaccatccaaaaaacccaaaacacaatataaagtgcatattcgtgttcagcacctcaaattaccccacgaaagtattttttggcaattttaaaagcaaaaaaattttttatgaaatgcaaaaccatagggtcccccctatggttttgaatttcaaaatcggtttttattttataactttttttaaactcgtgataaaaacatgggataaagcacattggatagagcttaaaattctctacaaaaaagctcttgcatgatttttcgctaaaatcaacccccggcgagttatgggcccgggactgaaatgtcccgctcaggccaaaaaatttttctatttccggtaaaaatggaaatttttctgaaaataccaccaatcgatgcagcacgaaaaactatgttttggaggtggtctcagttttcccaggaaaaatcggcaaaaaataataaaattcaaaaaccaaaaaaccgacttttaggcctagctcgaaaatttctgaaaatttcagaaatttaaaaaattgacaagatagagctcgccgagctgtacaaaaagttcagcggcgccaacacgctcagcgcaatgcccagcgagttattcccgaaaaacacaaaaaccggaaaattggaaaaaaatttttacaattttttgcaggccagggctttggtgctaggggctaggtcaagaagaaaaaaatttcccaaacattccaacttagtcgcctcccagcagaagttttttgctccaggttcccagaaaaaagttatggccccaaaactgcatgcatttttcctcaaaaagccgtttcagcgccgctggcgttcaactgtccgtcggatcgaaaaacctatagttttcccagatgcgcctcaaaaagttggttaagcaatgtcacacttaaaacccacccccggcgcccgttcccgagattttggttttagcaacgaaacacgatttgattttatagtatataaactagcgggtgcgtgaaccgtcggatctgggaatgggataaagcgcttcgcgctttgggagcttcgctacctaggctgtaaagcgattcaaatttatcgaattggttgggagaggtttttttgaatttttaaaaaattattaggggtttttagtccacatcgaggctcaagacgggcgcttcgcgcccgtttttttagttattaggccgcttcgcggcctcagtcgggcgcttcgcgcccgtttttcanaattttgttggccttggacgggcgcttcgcgcccgtttctaaattttgttgaacttggacgggcgcttcgcgcccgtatttaaatgttgttgagctcataagaggtacaaaaattgttggaagatgtgttggaagaggtacaaaagtgataaaagaggtacaaaagtgatgagaagaggtacaaaagtgattagaagaggtacaaaagtgattagaagaggtacaatggtgattagaagaggtacaaaagtgattataagaggtacaacagtgattagaagaggtacaatggtgattagaagaggtacaaaagtgattataagaggtacaacagtgattagaagaggtgcaactgtgattagaagtggtacaacagtgattagaagaggtaaacagtgatcagaagaggtagaacagtgatgagaagaggtacaactgtgattagaagtggtacaacattgttaggagaggtacaatattgtttaaaattaaataaataaggaaacgtttttattaaaagttaaaaatcgagtgcattttaatttaaaaattttttaataataaaatactcttttattaattaaaaacaaccttggaaattattaattgaatatttatttaatttgaaattaaatgaatttttttttacaaattcaaaaataaataatgaaattctttaatttaaaaaaaataaatttaaataatttaaaagaaatcttcaaaaattaattaaaaacattgtaaaataagccaaaaatacaaagaaaaataatgttacaccgtccggattcgaacctgctgcccccccccccctcagaacatgtcccagaatccccaatcacacagggattctgagggcttaacgatgtcaaacgtaaaatctgatcacgtattcgtgatcagcggcctaaataacccctaaagacatgtttttggaagatttttgtcgaaaaaattttttcactcaaaaatcctggtcacccccctttggtcccgaatcccaaaatcacttttatttttataaaaattcttaaaaaagtgataaaaatgccaaataaaatttaaataatagagcaaaaaactgcggatttttgtagtattttatttttccagaatatcttttcagaaccgagttatgaatttttttctgaaaattcgaatttttccagaaattctggaataacttttttccttttttagatagaaattccaaataaagtccataaaattctcctgatttttctctatttttaaggctttattcctgtaaaattgatcaacccttcgatttgttatgaattttcaaatattaagccaaaatcccgagggccaaaaaattgccaaaaaataaagaatttttaaaatattccaaaaaatctgaaacttaaaataaacatcatatttgtgctcaggaccctaatttaccccagaaaaatatttttcaccctctttttcaacccaaaaaaaatttttgaaaatttctagggggcctagctcgaaaatttttgaaatt

SEQ ID NO: 15912 - DNA, 1485 bp, Heterodera glycines
atgagccggagccgaagaagtcacggctggaagaaggaggagaacagcaggagcaagaaacggagcagcgaccagcttcgaccggcgcagaaaaagactccatcccaatggagcagtcatgactctgatcgtattacactaaccattcacattgaccaactgtctgtcaatgggtggcgggtgtaatttacgttccattccctcgctaattatttaatggtctcttttcgttgtgtttgtccgtttttccacttttttttattttttgtataagtaaaatgttttcattaatattattttttatgtcgattatcaattttcatacctttgtcaatttttgttaattctaaaaccttcaaaaagatttaaacagcaaaaatgacgacaacaaaagaagggagcatcaaacgcgagcagttttatgtgcgctattatgttggccacaaaggaaaggtgagaattgtgacgagtgttaattcgaagttggtcttttgggtcggagtcattttgagtttttggtaatatggtgcggatttgttcaccgggaaagcaaaataattttatttttagttcggtcatgaatttctcgagttcgaatttcgcccggacggcaagttgcgctacgcgaacaattccaattacaaaaacgacactttgatccgaaaggaatgctatgtgggcaagtcggttatggacgaattgaagcgtatcattgaagattctgagattatgaatgtgagttgttggcaaacatggtcataagaggattatgtgtcgaatggttgcaggaggatgatgccaattggcccgaacctgaccgagttggacgtcaggaactcgaaatattgagcgggaatgaccacgtgtcattcactaccagcaaaatcggttgtctcgtcgaagtgaacgacagcaaagatccggtgggactgcgctcgttttactatttggtccaggacttgaagtgtttggtgttctcactcatcggactgcacttcaaaatacgaccaattgcgcaatgatggactaattggtgacgttcttttaaacgacgaattccttttttgataagcgactttttggcataccaaaatggaaaacaaaaaaagaagacttttggtggtttcataacaagaaattttgcccattgtatgccaatttattttggacttttgatctttatttaacacgttatctcttcaattggtttgttgtttcaccaatttttaaaaatactggaaaaaacattatcatattcagtccaaattgcagggaaagatttggctttttagtgttttcctccaaaacagatcagcaaaaagttatatactataaagacgattgccgatgagacaaaaatccattaatattaaactattaataattttactagtagggtgagtaaattcaaaaggtcccgtgaaggacaattaaagcggcaaaaatcttggcgtaaaatttatatggcaattcattcatacaaaa

SEQ ID NO: 15913 - DNA, 1362 bp, Heterodera glycines
attcatttgcaaattcatttttttgttcgcccgttttctaaacatcaatcacgggaaatgccactgttcgtgtttcgcttatttttatgtaatggcggttcactggaatttgacgaaagactgcgcgatgttcgtcgaatgagcatttggatgtaagctgaagaatgaatagagggggcatgccaaaatggcaatcaaatgtaaaaaagattccccggggatatcctcggaaatgaaatgccggaacgatttgtttggtgatttaagccttacttctcatgcgatttgtgaatgcgatgaacacaaaggcattgacagaggcggaaaggaccgagaggattttgctgacgtgcgattggatgtaatcggcgcgggtgggacaatcgtcctgaacagaaaatggcaatgcgttgtaataaagccggcaaatcaaagtcatgtttgaaagaacccataaagtcggaaaatgcaattggatgtgttgaaatggtgcccacctgggcaagcagttgccatttccgagccaaaatgtacaattccatggaatggagcacgagataaagcaaaatgatcagaacgatggaaagagttgcccgatattctgaagaaaaggcaaatgacaatttgcaaagtaatgtcatttggccactataatcggcaaaaagcggcatattcttccgtcccaactcacaaacattgccttgtttttgccgtacgccgtcgattcgccttcgcaatggatggcttaaagtgaattgcctttcggtttaaaatatgtagcttttcccacgtatccttcctggttttttctaccatttctccccaattttcccaacatttctccgtttactcgccttgaactgctcgaccttcgccttttcacaattgcgccttgcgagtcgcatgagacactgaactgagcataggcgaattgtcgactcttcacaatttcacacagtgtgagcagcgaaaagacgcacatcagaacaaagggcagaaaatgcgaaacgatgggatcgatgacggaataaagccaaatgcgatagggagaaagcatctgacaagccaaagattaagcgatgagcatttgcaatggcatggccaataagggccaaaggaaagctcagccggcacagatttgacggtgcaaactcccccccccctgccttagcccatgatacggtatggcaccgtatgactacggttttccacaccggtcgcccctttaacttctgtggtttcgagtcgtttctgaatgcgaaacacgggctgccatttgatctgaagttcgaccatgaaggacggtaagcgatagaaggttatggcaataaacagaatggccatcagagagcgggctctact

SEQ ID NO: 15914 - DNA, 1828 bp, Heterodera glycines
cagttcggctgtctttccccgcctcccccttccttttcgcccttatctttttggcctttttgctcagctcggtgccttcctccgccttctgcttgtctttctccgcttctttcccccctttctcctccttctctttccctttttcacctccaaaactcttttcccgttgcaccaacaaaatgccattagtgaacaaaagtttggccaattcgacgttcgcttcttgcgattccaagcccaactcgcccacttccaaccaattcgggtaagagtcgaccaaagtcacgaatccgtcctcaaactgaaaggaacgggcaattaattattggaagccgacgactgtcagtcagtctcttcacctcaatgggaaaatcaattgttttttcgggatattcttcacaacttcgagaatttgccattctgtgaacaatgaatgccttttcagcgttttcaaaaagaagtctaaaagtaaatggaatcgattttcgggattgatttcagaggagtctcttaccgttgggtgtgctttcgcaccaatctgacctccgttttcttcccaatgtccaacgacgagtcaatagcaccgccaaaacaaatttttgtttcttcctcaggggtcaaaagcggaggtaaagcgaaacggaagaattcgcgggccatcaaatcgatgtaagagggaacgaaggcagcgaaattctcaccaaatttacgagagaaaacttcagcgacgggaataattctgagagaacaaaggaggaatattgaaatagcaaaacaaattgctaagaagtcccacttctcctcgagcgtttcttcgcccgggtaatcgtttccgctattcccggccatgtcgaacaaaagcggaggcaaattcttacgaagatgttttgagcccgaaaccattgtcttaacgaattcggcggaagccttctcaagaaagtcggtgaaagaatggccacgacaaatggacacttaaaaatgggaaaataaacaaaggaaaagaaggaaaaggcaccgaaaacacagagcgaatggacgtcaccggcactcgccttaataaagggacttttgttttgctaatatttaggtttcaccttgaaaatccaccccttcgggatgtacagagtgtcgccttgttccagccatccttcaaaagttggctcgcgtccatcaaaatctgattcactcattgtgccactcgaatccaacggcgaagtatccttatcacttgcgggggaataaactttaaaatatttccgtccttcgatttgaagcaaaaaggcatctaaaaagcattggttgtgaatataattaattaatcgtttattttcgaccgttgtcctcccaatgtggcgcaattgcggaagtgttcggaggagtcaaataactgaacgaaatgtccatttggtgagcagacaaaagaactgaccattttgcaccgacaaacgaacagaacaactcctgcagaacatcgcacagataccaaatgttgtcgttgtagcactgtggtcggtcgaattgtgccgcccgtccccgcccaaaatgtccccaaacggcggcggcagtcgctcgttcgccgtcggcacaattatggtccgttggcacatcattttcatatagagacaagttcacatccgtgccaatgtccaagtcaaactaagaaaaatgcaaatacaattggtattttaaaaagccatccaattccactttttgcagcattttgaacaaattgacagtcccaaagaaaccctcgaagtaatccttggccttccgatttaccatcaaaacacgtttattgaagaaatcgctaaatgaactgcttaaaaat

SEQ ID NO: 15915 - DNA, 1649 bp, Heterodera glycines
aatctctccacattccccctttctcttccttccttcgagcacttccctttctctctattcttcgatcccctcttcctctctgatcagcttcctcgttcatcctccgatcacttcccccttccttctctttctctgtatccttcggtcatccatcccctacccttctttctcttcctctttgatcaggcttcctcgttttttcctccaatcccttccctttcttccttcggtcagtctcctctttctctcccacattcctcctttctctttccttcctccgatcacttccattctctttccttagttccgttcgtccgccgttccatttcgtctgcccctctttctgctgaccgtccccaaagttcgctctctgccgatgatgttaattcgcgccatggctccgttgtgtcgtcacgcgtccttcccaatcggatcggctccccctgcgaggattccctcccttattgtgccgtatgggtggcctccaacgaacgaatttgtgtcgattcaaaagcgacgatggaaagagaatgccggaagagttgtctattttgttaattttttttatttgccattatatttttatatgaattattcaaattcaaacatttcttctcgcagtttaattgctcccttttctttctgtcttttcccttttccttttgtgttaattggccattcattattcaattgtaacgaaaacgggtgaaattcagatttttaccttcaaattgtccaattttacagaaaataaattaagtgtcacagtgagactaattgtaagcaataagggacgaaggaccaattggcatgggtttgaccaattaattggtcatgtgagtgtgtcgtcctccaacattttggcccctccgactgtcagtgtgttgtccgggtccatctccacgatggtctgatgggctcgcaattctctccgcccctccgtgccgcccgacacgacggacagtgccgaaccgacgcgctgctgtaaagacggcaccaaagagccggtggaggaacaccgctcgacggacaccgccgaatgactctgttcaatgaccttaattaatcaaatgcccttggagaatggaatcgcttaaaaatgcccacatttataaccgtgattcgcgtctgtctgtcaaagcaatagaattcctcctcggtgatcctttgcaagtccgtgtcgcatgaattgtccccgtcgaaaatgcgtttcatagtaaaattttgcccaaaattcttcaattccccgcgcaatttgtccatttctttattctcaaatctgttttgaatgatgcgtccaataattattaaaatgcttgttggaattgtactttttcagccgttgcctttgcttttcctccccccaaatgatggcaattctaagcgcaatttccctggccgagtcgggcgaattcgaagcgaccgattgggaagaagaaatcgaacattttgtgcccataaaacgggcttcgatcatctgaaatgccgattaaaaaagacattaattattgcttcattttcacttttattggtggttctggtaatccctcccaggacaacagcaaatcgtgcatattcacagcaatttcatgacgggccaattcgatgccattggggtagtaaaaaagaagactgacaaaggcggacct

SEQ ID NO: 15916 - DNA, 632 bp, Heterodera glycines
tagtaaaaaagaagactgacaaaggcggacctacgtaaaatgcggaagggtttccttttcaaaatttttacaaaaattgactcaccgtttgccaacgtttttcagccaaaaacgaaatttcgaaatggaccgtacaatcagttgaaattgaccgttcgtggagaagcacaagttcgcgcttcggtcctccatcgtcggctccaccacggcacgtccgccgtaaccatggaccaaaaactgacgaaggattaggtcagttccaaatatactcacaaatcagtttaaaatacagtcatttcaatcaggaatttatatactgaacaattcatttactagtatatctctataaccataaaatcatcattgaaaatcggatttttaatatttgttaagccccttttaagaatttctcaattgcgctgtataatattaaaacaaatcgaaaaatgtgtcctaattgcaaatgcctgacaatgtgccatttcccttacgtaatattcgcgcgtttcatcgcgcgatttgcactcaatgcgcaggaagttcttataataggcgcaatcggacggagtgaatccgatgaccactttggccgcttgttcactgcccaaaatttgcgtgtgttctctgctctg

SEQ ID NO: 15917 - DNA, 828 bp, Heterodera glycines
aggtcatcaaattttggcccaaaagggggggggcgatgggcgggtgaatttcaacagcgataaacttaacatttttttggcatttttgtattgcgtctgtaaaataaaaataatatgaaggcaaaattcttgtgcgttttcatgtttataatgaaaagtttcaatttttgcatccgaatttgagtgcatttccttaccattttcaggtgttcgtcgaggggtccttcaaacagccgggaattgggctgccgtttggctatttgaaggtaaaaatacccatggaactgtgattaataattgcctagttaattcaaatccctaatccgaaggtttcggttttttaaattactatagcttacaattaggtattaggcgtttaatgaatagagatgccagatttatggttttatgatcagagtgatcccaaaaactctccgagaacaaattttgatgaccggacctcatcataaaacaattattgcaaaccaaaagagtggatttaataatgattttcaaaaagcgcaaattttcaagtaatgtcaacttttttaaaaatttattcccggctgtgttatgtctcggctgtgttttgtcctattccgccatttcttaccgtcctcccattttttaaaaattcaattcccccgttttcaaggtgtcctcctcctccaccgtcaatctgttggtgatgccttacaattaccccgaccttctcacgctgttggcccaggccaaagaagggcccgaaatgatcgccagcgtccccttccaacaacgctttgacaaatatttgaacaccgtcccgccctattattacacggtgagtaa

SEQ ID NO: 15918 - DNA, 3384 bp, Heterodera glycines
agcgatgaagaaaccgatggacgcaggcacagattttgagcaccaaatgcggcggcgattttcggtcagtagcggataaactcccaaagcccccccccctccttcacaaagattgaactccttccgacccccttcagtccgatttgtaatatccatcgtccgtccgtccgtctctccattccgctgaccttgggggggagagatgctttaccaacagaacacaaatcgatgctggtcaaacacttaaaaagcattcaaacttaaaaagcatattctgttaaatatttgttggtgaccttttctctctcccatctctttaattattaatttttgttaaattttgttttatttaaatttttcaaataatcatttttatactttttgttatcgtttccaaacagaaaaaaagaagaatgaaacccacgaagagaatgccatcaggcaaaaatcgaatgtttggctgcttaaggaaatgccattggcactgactctcccccccccctttcccccgtcgcttctctccgctcggagtgtctttttgaaacccttcgccttttgttgttttttctccagtattttaaaattctctcccgggcattcttttctacatttttttttgttttgttgttttgccattccatcgatttgactcatttaattgtgacgaacgaaactcacgaaaatgaaaagcgggtgaaaacggggggggggggaaagtattttttatcgatagttgcttttatttcaccaacgaagcacttagggggcggggggggggcagtcacacggcaatttggccccgggggaacccccgccaaacggtccaacgccctctcccacttttccaagtgttccctcccctttccccattcccccggtgctcccccattttttccattcattcgcctccccccttttccacgtcagcttatcacacactttcgtagaaaaaaattcgaattttgactccaattctcttggcaccgatggctgccaccggcgggtcctttgtttgtcgtcggtatttgcttaatgacgacggtaagtgatttgaaatggagtcattttggaaggtgaaaagttcaaataagttggaaaattttaatcataattaggattaagagttggcaaattttgtaatgaactctaatgacccggttcttcttcagaagtgtccgacactttcgacatgttggacatggacaaagacggacgactgagtcgcgcggaaatcgccgcactgctgcgcactgcgaatgtggaaccaacgcgcaaggagtggacttccttttccagggagatggacaaggacagtaagtgccattgactgtttaagcaagttccattcatatgggagaatcctgtacagtatgataggcatttgacgttttgtgatgctcgagaccgagaattttcctcccgagactcaagaaaaaccgagacttttctcgagtcgtgactttcaagtgcttttccacttcccccttttttgctttttttatttccattcaagagtctggcaaaatcaacagagagtcttttggtaagtttttggcattttgtacgaaattctctcccccctccctttaccttgcgttacagtatcttatctgcgttgtcctcccatcaaccgaattactgtcaaagagttgcgcgaccatttttcgtcatacgatacaaatggaaacggtacaatcagcagaggtaaaaacagaagagaaaaataattaaaataataataaaacaaacaacaaaagtaaaaaacagacaaatgaatggaaaatgggcaaaaaaaaaatacaaaaacaatttgcaggagaattgaaaaatatgctggcgaatattgccaatttgcacgacgacgacacaattggccaaatgttcgaacattgcgacttggacaacgacggacggctcactttcgacgagtttttgcggatgattcggagagagtaaaaaatgaaaatttccaaatattttggaatttattctgttaattattgtatatgaatatatatttttgatttttgtcattataaaataattctttctttttttatttttatcttttccttcttttttctcttttttagttaatttttggcgctccgccgtttaaaaaaatgtaatgaccgatcagtcgactgatttcattgcccttaataaacaacaaaatgttttctgatcggtgtccttttttatcgttaccaaatcggtctccacggtcactgactttttgttgtcatttccattggactgagttgtgaaacgaatttcgaagaaatttgtgtcagaaactgaatatttggccatctcgacgatctttttttgaagacagtcattaattaatgaattattaattgataattaatttttaccccgtccaatgcaaattcggccaaaatatgatgcgttccgctggataaaactcgaagtccgaatttatttaccgccaacacacaattttccgcaagaatcgccgcccccggcgtcgaattggactcatttctcccttttgcgaatttcggatttaactttggtaattaaatgcgcttcattcgttcgtccgcttaccccaataaacgcgacgcacaaaataaaaggcggcgccgaacaaatgccatcgttcgatgagttcttttttttggcattatttccttcctttttttcatttcaaacccaaaaatcgttgccgcgctttcgccggggataaacacgcgaagttcgagcagctcagcctttggacacggccggaaatgcgcttaagccattggtcgtgtgaaagaattcgattggcactgttcaaaacattttttgggacgaaaagagacaaatcattcctaaaaatcactagaaataatttaaaacattttaaaattatttatgactttttcgcatcattttgatgagcacttaacacaagcaaagcaccaagaattgccatgtcctcctaaacaatgaaaatcaaaggaattttcgacaaatgcaccaaaagtgccgcagttgcggaaccatccgcacgaagagaaacggggagaccggcgaggtaattgggcaacagttggaagaacagtgcatcggtgcacaagtcactctcacggcgaatcggatgaagccaaaccttagataaagcgggaaaatgaaaagcgaaacggaaaaaaagtggaaatgcaatggaattgcaattgcaatagcatggcattatgtgaaaagcatggaatagaaactcaaggaatggatggcatagcattggtcgggatcgcgagggtggtcagagtcagtctcacttacactacgagtcagaatcagcacaaagtcatcgccgcgcgtctccaactccgtgcacacgtccatcacgtactcatcgttcagcagtgtgtgcat

SEQ ID NO: 15919 - DNA, 2006 bp, Heterodera glycines
caaattttgcgattttgggccattttcctaggatcttctagagttttgggggcacggcggtgccgataggcgccgtcggggaaaaatttggaaattttgaccatttttaaacaggtcttcattcgaattagccaatttataggttcaagtttgaaaaatttaagtgaatttatccctcatttttaggggtgtaatatccgagatacggccaaaaaaaaaatgagaaagcgaaagtccatccctggtgtttttgtctattatcagaaaaataaataaatttaaaagaaaacttcaacgggtatcgaactcataacaaaaagtacagctagttttgaagcactaaccactaatacacaaaatatcttatataataaagttattgtctgtatgtgtcactgtttgaattagtgtggcgtttggtgactggaatggagccgaagggcgcccccacaaagtgtccaagccacgaaatgtccaaaagagtaaaaacccacgaaatgtccaaaatttttcaaaatttataaaaacaaaatgagtctaatttaggatttttagggttttcggggtcgctgaatacgaatataacctttatattacccgttgcctaaccttaggcccatccgaataataaaaaactcaaattcgagacttggacatttcgtggcctggacattttgtgggtcagcgagccgaaggcccccgtacgaggccgcgaagcggccgagtgagtaccttgggcgcagaaaaattattaaggaggagggttcattatttatttatttttttacaaaattaattcataagtatttttacagaaactgctctgaaacgcaccaaaatttatttacaagttgaataaggcactctgactcttatattatcaaaaagggagatgaataaatattttaaaaatttttaattcctttttaaacatgccaaaaagtttaggcttaactttttttatataaactgatcagaagcgcaccagattttgcaagggcatcaaaaagacaaggaaaagcaccgctatgatgctaacaccagtaactcttaatttaaaaatttttattaatttttaaaacttcactattttatttttttaatagatttttaaatgtttggatttttttttggcttaccaaaacttcatcgaacctggttctttctattctctttcaaatcgccccaaattttttttacagcttaactaggccctattaagcttatttccagaaaatctcgcatgaattctcatttttaaattttttatagatttttaaatgtttgcattttttttggcttaccaaaacttcatcgaacctggttctttctattctctttcaaatcgccccaaattttttttacagcttaactaggccctattaagcttatttccagaaaatctcgcatgaattctcatttttaaattttttatagatttttaaatgtttggattttttttggcttaccaaaacttcatcgaacctggttctttctattctctttcaaatcgccccaaattttttttacagcttaactaggccctattaagcttcagaaaatctcgcatgaattctcatttttaaattttttatagatttttaaatgtttggattttttttggcttaccaaaacttcatcgaacctggttctttctcgccccaaattttttttacagcttaactaggccctattaagcttatttccagaaaatctcgcatgaattctcatttttaaatttttaatagatttttaaatgtttggatttttttttggcttaccaaaacttcatcgaacctggttctttctattctctttcaaatcgccccaaattttttttacagcttaacaaggccctattaagcttatttccagaaaatctcgcatgaattctcatttttaaattttttatagatttttaaatgtttggattttttttggcttaccaaaacttcatcgaacctgggtctttctattctctttcaaatcgccccaaattttttttt

SEQ ID NO: 15920 - DNA, 918 bp, Heterodera glycines
  unsure (1)..(918): unsure at all n locations
agtgattgaaatgcaggagaattgagtcncagtgattgaaatgcaggagaattgagtcccagtgattgaaatgctgttgggttgagtcacagtgattgaaatgctggagaattgagtcccagtgattagaatgctgttgggttgagtcccagtgattgaaatgctggtgggttgagtgccagtgattgaaatgcagagaattgagtcccagtgattagaatgctggtgggttgagtgccagtgattgaaatgctggtgagttgagtcccagtgattagaatgctgttgggttgagtcccagtgattgaaatgcaggagaattgagtcccagtgattagaatgctggtgggttgagtgccagtgattgaaatgctggtgagttgagtcccagtgattagaatgctgttgggttgagtcccagtgattgaaatgctggagaattgagtcccagtgattagaatgctgttgggttgagtcccagtgattgaaatgctggagaattgagtcccagtgattgaaatgctggtgggttgagtgccagtgattgaaatgcagagaattgagtcccagtgattagaatgctggtgggttgagtgccagtgattgaaatgctggagaattgagtcccagtgattagaatgctgttgggttgagtcccagtgattgaaatgctggtgggttgagtgccagtgattgaaatgcagagaattgagtcccagtgattagaatgctggtgggttgagtgccagtgattgaaatgcagagaattgagtcccagtgattagaatgctgttgggttgagtcccagtgattagaatgctgttgggttgaggaagcagtgattgaaatncagngagaattgagtcccggtctagtaagtgctggtgggttgagtgcctagtgatagaaatgctggtg

SEQ ID NO: 15921 - DNA, 3140 bp, Heterodera glycines
  unsure (1)..(3140): unsure at all n locations
aaacaattgaatataaagcaaaatatttttttaattaaatttttattgttttaatacctacaagcgtttaataaaaaaaaattgttgcctatttagtgcctattcgagatttttgtgcctattaatgcctattttgcgattttttctgcctattntaggtgcctatttcgcgattttttgtgcctaaaaaagaagccctactgatcatctattaaatagaatttataaattatttaattttttaatttttattttgctttttaaatcacttttttacaattttgaagaattaacactacgcctacgatcagcaatcgaagatcaaattttctcaaacgttaaataaacccaaaagttttttttgacaattaaaattcggaaaaagcacccataaagtactaccgaattaagtgaaattctgtcagtttccaacagtgtcttctccaaattgtttcttccattttaaaatgctttctcgactaattttcaacattttcgcaatttctttttcactcatttttggtttttctttttttatttgtcaataaattttcaattttaaattttcaatttttccattttttctttctccgttattcttttacagcgaattccaaattgtttcttccatttgttaattgtccctttatttcgacaaatgatttttgttgtagttttttctcttctgttttaattagactaattagggcaattataattgaaattaaacagaataataacaaaaataatttcatttttccgggattatattctcaaatataaatttattaatatttatttaaatgacaaaattattcattttagcccattaagagccgtttattcacatgaaaaatcacaactctcttctgatttccggtaaaaaattgatttgaaaaaaggaaaaaaagatgatattttcgaccatttaattaacaaaatttttttaattaaataatttatttattttttctattttattgattaaaaaagaaaagaattaatattttttttggaaaatatgtaaaaatgataattcgaaagtgagtgattaaaaaattgcaaatgatgaaaatgtgtggttaagcattctccccatccccttatggaaatttagttttaaaaaagtcaatttaatttttaattaaaaaatcatcaaaattttccacttgcacctgagtttaaatacatgttcgaaacatattttaaacaaaacaattatttattctgcccttgctggaaaatttggcgaattgtgccaatttttctacaaatttgcaccgtaatttggcaagaatttaatagaaaaaaaaattttaagcaaattttaaaaaattaatgcaacaaaataatttaaataaaatttgtcaatcaatgaaatttttgggaaatttgctagcaatgttttcataaaaattcaattgtcttctaaaattgcaaattttcttctccaaatttggctttccatatgcaaatattctttgccgaagtgtttatcatttttgcaattttctgatcacttatttttggattttcttttttaatttgccaataaattttgattttttccattttttctttctccgttatgctcttgctgcgaattccaaattgtttcttccatttctcaattattccttggctaactccaattttcttacaaatttcggcataattttgtttccattcttttgtcgaatattttcttcctttttgcttaaattcgtttttcatttcaatgaaatttcaaatatttcgtcaaatgttttctgttgtaatttttcatttgctgattcaatttgatcaattttggtgatcaaaaataaaataaaacacaaaaagaataatatgaataaattcattttgaattttaaattatattttttcaaatgttttctataaaaaattattcctttattaatatatagaaaaaataaagagtggaaaatgaaaagctaagcattaatgaaattcaattcttgtggaaatgatttttaataatttttttcttattgcaaataaataaattattaaaattatctttaattnattttatanttaaaaatttttatcaatttttntttcaattttactccattctttttttnaatatttttccaanaaaatccacctcatctacnaaaaaccaannttantaaaaaaaataaaataaattacacctnattccatnaaaaactaaancactaaatcattattntcaanntccaaatctaatttatattaaatagtgatgtataaaattttgatcagtaatttacagtttttccattttcgataattctcttattaaaatttaagcaaaatcgccactccgttgattttaaacaaacaattttattaaaatatataaaatatttatttctatgatgataggaatactggaatttaatttaattttaaatgtaattgccaattaataaatccataactagcacaaacattattatctcgattttaaaactcaataaattttatttgaaatttaaataatattagaaaatctttgtgttttccaatcctatcaaggttggtttcaattatttgaagtttaacaattttcatgcatttcagcaactttacatttttgtatgaccataaaaatatggatatatttaattcccaaccaattttaattttctttaaatacatagaacgcttaaagatttctctattattttgcaaattattttttattattaattttaaaaaagttatacacaaaattattgagccaaaattttcgggttttttttagttataacttttttctttgctagtttttctaaaatccattaaatagcagaggatacgttgaactatccccaaatacaaagtttctttaattttactaagttataattgctaaattatgatttattattctgcaaataaattttaaataataattaaatttaaaaattaaccatctttttgatattaagcgaccagaaattctaatataattaaaagacactaataaggcaagatcatactaatcctanaagcaggatcaataaatagtgaatttttatattttgttgaaaatttaatcgcaaatcatttcgtaaaaagtgatcagccagagcaaccgaatgatgatttttgatgaagaaatcaat

SEQ ID NO: 15922 - DNA, 2307 bp, Heterodera glycines
ggccgaacacaaacgtggtctcggaattccagccaatattgccatgcgaacatcccagattgaaaatgcgcgcaacgcacgtcggaatatggcatcaccggatgtgggactcatgcgtgttccactacatcacgcatgattcggcactggtgacttggcattgtggcgaatgcaacagacgttcttttcaaacttttgagtttgcaatgggcgacaagacagatcggtgagttaggttaaaaattttataatctttataaataaaattgactaataaagcgagttaaatttatttatttagttggggacgttatttgctgcaccaatcaaaggaacggcgccatgtcgtcaacatcgacgaagccgacgttcatcgggaattcatgctgatgcgcgggacgggacactacaaccttttttactacaactgcaagcactgggccgaagaatttgtgataaatagtgagtttaattgaaaacattttaaaaaattggaagttttttcttaaatggggcagtcgtcaatgcttagggcaatttctcgaattgaaacaaaaatgaaaagcacattttgttatcggaataattaaagaaaattaaaatttaattctatttaaattccccctccctttttctctcacttcttccttttccttctgttactcccctctctttatagacccgggactgaagtgtctaaattacaacgggactcaaatgaccaatgtattttcatgaattattattagtagggattctttttttatgtaagaaaaatcgcgaaatatgtaaataaaataagtataaaaaatgctaaaatatgtatgaaatatgtacaaaaactcccaaatatgtacgaaaatatgtaaataaaattttttttaacggttacttttttggaaaaattcttcgtaaagggtgaaataggcataaaatgcaataaaaatgacccaaataggcctagaatcacattttaatactttaaaattaatttttggtatctgtttttgcaaaaaaaaaattgattttttagaggtatatttctcagtagaaaaatcccaaaatatgtaaataaaagtcccacttttgttcacaaaaaagaaagtgtttttcttactaattgggctatggagaatccaggaaaaaatatgtatttacataaaaaaagaatccctaattattagggctatttttacacgcatagaattattttgaatttatagcgtgtccctaaatttgcggctcgacaaatgcggccccagccaaaaatcgacatttttggcccgatttttgcggttctacattttttaactgttggaaatcggaaattagcggcccacaccagaatcggatttttgcggccaacggaaaagggatgataatttggcattctgttagtcgcaaaatcagattttggcttgggccacaaatgatgggtttttggggccgcaaatgtcggggcctccgatttgctgtgcataatcaattttcatttaaaaatcgattataattatttaatttttagttacggggttctggtgatgatacaaactgagctttggggcccaatttcaaactcgatttggccagtcgctgaggaaggacatttgatcatgttatgttttctttgattttctctttcattattaaatttactttttattttatttcatatttaaccgatttcatcattttattgcatttttttttatattctcgacttgaatataaattttacttttttattttattttttaaaaattaaaaaaacttgttttttaattttttatttcggcgggtgagggggtaattaacttttcctacggtctgatgtaaagggtttccgagtttttcaattttatgccgttttatgcactgtttcatttttcttatgctgtgcccgtccgatcattgatctgctgatccctttcccatctgctaatgcactcgccccaattgttttctcaattttccaaaaatgcccaaatatgaacataaaatctgcatataacttgtatcattattgatcagacagcgccgatgtaataaatataggaaagataaatagcatttctcggacaaagggcagcagattttgaaacggagtgggaattaagtcaaatgaattgccatttcgtgcatttgaaccgttttggcccatacgtgtgaatattgcagaaaaataatattaatttgttcgcattcaccttctggtttggaattgatcgaaactgacgcctgcttcgcaatacagtggtctgatgcaatttgaatttatgaacagtggcatactgtagggtttgggcg

SEQ ID NO: 15923 - DNA, 2452 bp, Heterodera glycines
aaaaagagaaaaattaaattgttattaattaaagcaagttaaacaattaagacatcgaaagtcttgaactgtggcgtgtatcgtgtgcgggccgaaactgtagccgccgttgctttggattcgaagagtgggagaatcccgttttttgtgccgactccatcccgttttgtaccagcggagtggcatggccgatttggatgatcgcttcgtccgttgggctcaattttgtccttattgtccttgtccttgtccatttggctgtggtccgtgtccgccgagacttgctatttgcctcatttggggtctgtgatcaatgtcagcgccgtgttagtgttttgtccagtcgtattgtctcctcaatgtaatttcgggttaatcgttggcacggccttaacacatcacttgttaagatattttatttgttaatttaataaacaaatttattcaaatatttattattcaaagtttttcattaattattactatcaattttggttattggttaagtattttagtaatgataaataggaggcaaaaaaaaatggtgggagtgattaataaaagaagtttattttttggtactaattaaaatgaaaagaaaaatatataggaaaatcaaacaaaaaaaatgtaatttttaatgcgaaaaaatagaaattggggggggggaagtaaaaaattgcaaaattaaatcagaaatgtgatgggagaataaatggtataattgcaatgggaaattgaataatttttaattaaatttaattaattagtaatgaagggggagataaaaagaaaagcgccgctttgggaagtttaatttaattccccacaaggtccaccataaaatgggtgcgcgcgtgaatccgttgggccctgggccaatgccaggggcattggcccaaagcgcggattccccaattgaaagctccgattaattcaacaatcggtttatttagcgatgagtatatgtgtaaaagcaaaatccaagtgaagtctttcgcatggctgtgacgctggtacaattggacaaatgggttcagagctcatttggttccaaattattttccgtttttggcacgcgtcgcaggtcctcacaaatttttggatgtccttttccatgacatcccagtacagatttcgtctgattttgtcttttgttcgtttctcgcctaggtgtcctccttggaatgggtcggagtgatattccttcatcactctttgtctcagactgcttggcacataaattttccattctcctctgtccattgcacacaaaagatcttccgaagtttccattttccagagaattcatttggttcctctgaattttgatccttcttcaaagtttcccgtctcttttgtgtgtccgtctcttgtttttgagcctcgcgcatttcactttgtgaaatttttggttcaattttcagccaattaatttgtgtgtcgttgtcgtccaagtatcgtgaaagatggtcacaaaattggttccgctttccagggcgatgaatgatttcaacatcgaatgccatgatagccaattggtatcgactgagtcgcccttccaagtccttccgccggaataatgatgtcaaagccaaattgtccgtgatcactgtcgattttccagctccttccaaatatggtcgaaaattcttgagggaagcacaaattgctaaggcttctaattcgaccaccgaatagcgcttttcatgttttgttagcactcggctgaagtaacaaatcggatggacttcgccttcacggttttcttgtagaagacatccggcaattgcttttatgctggcatctgtttccacaacgaatggttgtccgaattttggtggagctaaaactggagccgtcatcagcttcgtcttcaattcctccaaggctttctcatgtggtggtccccattctgtcgtgctttcattttttgtcaactcgtagatgggttgatgtatttcggcaaatccgtagacaaattttcgaaaatatgacagcattccaatcaaggatcggagttcagtgatattcttgggcttcctcagtttgtgaattggctccaaatcctttggatcgattcgaacgccattggccgaaattaaatgtcccaaatagcgaatttctcccaacgcaaatctgcatttctccgctcagtctgaatccaacttcagtcatagttcttaggaaagtattgatgtcccgaagatgttcatcttctgtcattgatccgattatacagtcatccaaatacacgagaaatgttgctgaacacatttgtcggacttcttccatggctcgttggcctctgttagacaggtcgtgcgccatcggttaagtcgatgcggtgtatcgtttttcctttgaagagtccgacttctccgggtttcacgaaagcgctttcattctgtcggatgatgtttctcagcttctcaattccgtcttgactgag

SEQ ID NO: 15924 - DNA, 3917 bp, Heterodera glycines
cctttccttaacgggtcagaatcggagacttggcttttctttctaacggacccgaatttttaaaatccaataccctgtgcctgatccagtaggtacgggtccaaaatacactggaaagaatgggggggggagcctgggtcaaattgcttaaaatattttgggaaagaaaaaattaaaaaattatcttaatatttattttcaaatggaattatagagatttatctcttcagtttattgcagggttcccatcgtccatgctctgtttccaaggacgggtatattgatttccaaggacacaacaggaaaatttcataaaatccatgggcattaaaaatttttattatatgcaattaaaatgattaaattttatccaaatggcttgcatttttcaccggaatggatttttttcaacatttttttcttccaattccgaacacccgaacacaaactcgaacaaaactgtaacgtattttcaaaaaacctctttattatcctaaattcattcaaattcacgattaatcgccgctgccattcggtattttatttcatggaaaggagtgaaggaagtatcggtccataaactctagttttttttcccacaaaccccactctaattcccgaaaaaataacagatttatttccaaaaaccacatttttcctgaattaagcaagaaaatctttgatttcttaaaatgcagccgcacgacgaagccgcaagccgcgaacgacaacgcgcagcggcaatgcgaagatggccgtcctcgttatttttggcggacagcaactttttccacaaatttacaattgaggtgagtgatggaaagtgtgaagaagaagaaagatgacaaataggagagtgaggggaggagaggaaaggagagagtgacggaaaatgggggagcaagaagaaatgagagagattgaaactgagagtatcgcccaactctaatttaagcgtcttttgtctgcaaaggccaggttttgagttttggcccttaaaattctcttccttttaatcacaaaaaatgtttccttaaaatttgattttcaatgtgcgtttttagcctaaaaattattatttttttgtgttatacgttttcgaactttttgtgaggaagagatttgtcaaatgggagagggagttgaggagagatacggcaaaaggcggaggggaaagtgatggaaagagtgagtagagagagtggcaaatgggagaaggaggtgagaagaggaaaggagagagactgcaaaaagggggagggaaacgtgatggaaagtgtgaagaagagagaagtggcaaatggaagagggattgaagagaggaaaggagaacgacggcaaaggggggagggaaaagtgataggaagaggaagaaaaagcgtgtcatggcacttcttacaaaggcagttcgtacaataaagttcctacaaatttcttttcagttttcaattaaaactgtattttttcaaaaaaacatgaaatttttacatattgatttcaaattttttaaaaaaataacattttttattgaaaaagaaattcattctgattttaatttaaaaaatctgtctttattgaaaaatatttaaaaaaatttgtaagaaatgctattgtatgaactgccatgaccctgtcaaattggggggggggtgaaagaggggagtaaaatgatggcaaatgtgagggaaagggaagagtggcaaatgggagagggaggtgaagagaggaagggagaaagacggcaaaaaggggagggaaaatgatggaaagagtgaggaagagtgaagtggcaaatgggagaaggaggaaatggcaaatgggaaaaggaggtgaggagaggaaaggagaaagtcgacaaaagggggaggagaacgtcgtaggaagaggaagaagatgtgtgtcatggcacttcgtacaaaggcacttcgtgcatagagttcctacaaatttcttttcagttttcaattaaaactgtattttttcaaaaaaaacatgaaatttttccatattgatttcaaattttgaaaaaaaataacatttttttattaaaaaagaaattcagtctgattttaatttaaaaaatctgtctttattgaaaaatatttaaaaaaatttgtaagaaatgctattgtacgaactgccatgaccccgtcaaattggggggggggggagtgaaagaggggaggaaaatgatggcaaatgtgagggaaaggatttatcggtgtctttttacgctgtcggattttttaaaggggctcaagatgttcaaccataaatttatgtggagtcaaaacgaagaagaggcgggcaagatccgcgagcatggtcagatgttcgtcgggggctttgaagtgacgccgggaacaagaatcggcggctttgagatggtgccgggcccattggttcgcggtcaactattggcttttattaatgatctgaatgatcgatttgggaatgctaagaaggattgtgtgaagctggcggtgtgggcgcaccgcgaattggtttgatttttgggagatgagatgagagggagaagaggggaggagagaattatgcaaattggttgggggggaagagtgaatgaaaatgggatgagggagatggtgtcatggcgctttgtacaatttctaaggtgcgcattcatccgttttttgacgccaatggccgcacggcccggctgtttatgaatttgattttgcgccgcgggatgcgacgcgggccggtcacgcttgatgaggggtggcgacaggagtattaccgctgcttgaggcaaagggacctcgcaagctttgaggcaaaaatttgatcaatctgcagggcggaaataattaagaatttttaaaaattttaatgggaaaattgttaaaattatatatcatcccaccccttgatttatttaatttatgttcaaccatttcatttcacatattttgtattgttatttgtttcaataaatgactttctgatcattatattttaatcacacattgagaggaattgaatgattatataatttgtgaaattatgttggcagtttttcttaatttttcatatattatatcaaataaataataatacgcacatatttcgctgcacaaatacttttccttttttttgtccgctgttttattggttgtaggacatttgcggcccgacaaatgcggtcggacatttgcacctcggacatttgcggccacagccaaaaacgacatttttggctcaactttttcgactccaacaaaataaaaacctcagaaaattattttccatccaatttaaccgaatttaatgctctgctctttctaataagccgaatcaagttttttagaaaaaaaaatttcctaacccacacccaactggaagcaatgatgaggaggaaaacaatatcagagaaacaagtccaaaaatgatggagaaagaagtatgaacattattaggaaatctcagatctctacagtagttggtagactgactagcaacttttgagctctagtggggttttgacaagcccaatttttgaaaaagaattactacattgaagacttagacttagaagatgccatgaaaattttaaaaagactaattcaacaacaaaaaattggtgataaatgggagtccaggcggtgccgatgcgccgtcgaagcgaattttcgaaaaatttatttttttttcttgaaaatttttaatttttcatttcgatagtggaattccctgtcaaccatcgactggtttcgttaattgctgtttgtttttaaaagacaatttcggcagccgatgaacacgccgcaattccgcactatcgtctggacgaggtgtcgggcaaaaagttgatcgggccaaactcggtgtacctgttggactcgggtggccagtacaggtgggagcaggggcagtcggatggtatacgccgcaga

SEQ ID NO: 15925 - DNA, 797 bp, Heterodera glycines
gcttttgtgctttgcaccatccgccactgatcattcgccaagcttccttgaatttgctcaactcgtttagcttgagtaagagcttccatcaggttttggggttcctccatgtacatgaccctctcttttatctccgggagcatattcgctctgaaaaagtcgcgcgcaatttccgatcggaattgctgaatccgttttgcattttcttccttcacttcattctcgcgatcacccaaagctaaggtggccaagtccatctccaatgtgttgtccgggtaggcttttgccaccaaacttcgaatttcttgcgcaaattcatccaatgtttcgcccgcgaattgtcttctctgcgccaatttttgtcgtgccatcagcccggaagagactttctttaatttgtccgcaagaccgtcgaccaaatccttccagtttgtcttgacattttggtctaagccatcataaatggccttggccgaaccacgcaaatacaagggcaaaatttgaacgcagcgggcggggttccagccatgtgcagttgccacaagattgaaggatttcaaataattgtaaaaatccgttgttccgtcgaaagtgccgggaagtggaagaccagtgcgcgggttggcatgttcctgcaactgccgctcaagtgtcgtgacccttctcttgagcgcatctatgtccatgtttcggagctgccgtttttgtcggattagccaatgacgacgctccctctcgctttgttcggcacagttcgcttcctctgagcccgaagaatcaccctgaattacggcgct

SEQ ID NO: 15926 - DNA, 2822 bp, Heterodera glycines
gaagacaaaataggattttagaaataataaggaaaaaattttaaaccctttgcccggatttttaaaattataaatattattaaataattttcaattatttatttattgagttaatctatgtacttgatttaatttaaattatttttatttaattataagggaatgggagtaggccaggcttggctcggctgaagtgtcaaatgaagcactgaatgaaatgaacactgcattcagttcgtccacacgaccactgatcgttccgcctcttttcgtgcttttgcctcttttcgctcctccctctcattagtcttcctaccaaaatctcatctcgttggcttttggcccttcttttcgcttcgttccgttccgttcatcatctctgctttttcccttcttttgtgctttatttttggtgtatttgtttgttacacaattgtttgttacaccatttggtgccgttgttccctgcttttgatccccaaaatgttttggcctttaattaattattcgaatccaatccctgtccagtctgggcccgctgggggaaggactggggaagcaggacaactgattaattgtgtgcatcgccggcgatgcgatttgcattgagatggggagaaatgttacagcaaaattgggaagggaacgggaaggcgatgggctgatgggtgtcaaaagagagaaagagagaaccaatgagcgattggaaagcggggtcttgggacttaggactacggtagccaacacagcagcgagaggtgaatgaatgatcaaagattggaaggtgttaggaattaactacagttggattacacggcacacacacacacacacacttcaggtttaatgcgttttgaaccggtggaatgcgggacgctgaactgctcggcgatgtgttttgcacccgagggatgggaggagccgaaaatttgcgcttccgtcgctcccgtctgtgacgtgccaaaaacacccaaaatcgactggtctttgctcaccgacgcggtttcggctctcatgttgctcgccaacattttcttcacagtttggctcatttgccgcgtccaacgcttgccgaaggaagcgcctccaaaggacccggcttattgtaatcagtgccatcgtctcctgcttccgcgggtccttcctcatcgccgcgtcagcgtttttgaggacgtctcactggtgtccgccgtttaaaagcacaatcagaaataaaatcacttcaaacacaaacacacgtgcatttgatttttgttaattaattttatttgaataaataagcacttaaattgtccagtaaaacgagagagtgaggggaaaatatattagagaaaagctaaaaaatttgggtgaagtcttacggtaggaaattatggaaatgaatggtcaaagaatttaaattttaaacaaaatggtgaatggggaagcaaattttaagtgaggaaattaaataattaggaaatttaccaaattaatgaattataatggggagataacggggcagggttttgaaaattttaaggaaaatgaaggaaatttatggaaagaaattttaaatttgaagggggagaaatatgtaaaaacaatggggaattttgtttacgcagaattaataaacgaacggggaaataatggcagcgcaaaatggggcaaaataaaattgttaatttttaccaatgctggagaaatattaatgctaatatggggaaaagcaaatgtgaaatttaagggatgcattggggaaaacgagggaaagaagtgttcgtaaccacccaggagcgccatgacaaagccctactctgccagactgttgggactcggggacacccaaaatggggcccctcgtcgcagctccgggcgggccaaaatggccctaaacaccaagcccccaaatccgctgttcgatgtcccctttatttgttgagtaaaaaccaagccaagcgaacaaaattggataattaatagaatgaatgaacgaacgggccaggggaattgagggtggcagaaaggggaggggcagttggtcaattgaggagacaaaaagtgatgagaggggctgacacaaaggaagggggaagaactccaagccaaaggggaaccccggtcaatgaccatcttttcatcacattccccaccgacgacattgccgcgccctcgcggcaaaaataacaaagcgatgtggaaaaggggaaaaatcagagagaagaaggaagaaaaatgacgttaaagagagagagaaaatggagaaaatgaaatgattttgagacaaagagatgcagccccaaccgacgaccgaccgctccatcgttgttgtggtcgggtagcagaaaaagttagatgtggaaagatgataattcgacatgcaaaagtgttggtcatttgcaaaatatcttctggtggtgttcatttcaaacccctcttctcttttcatttcccctcagttttgtagctattccatttttagtgaattatttcggcgtaaaattttcaaatgcgtttggccttgttcaccgtcgtttcggctcttcttttgatggctctgatttggccctctgttttggcttcagcagaaattggtcagttagtggatttccgatcggtggggcggggggagaaagagagagagagatgagagagtgagggcgagaggggagtgcgcaattggaatggaaaaatggcataaggtagagaagtaaaggacaaattggggaacaattgggacataaaaaaaaaaggaaacaaaataattgtttaatgagtatgatgttatttggaaaagcgaaaagggttttttctatttttttgagtaaaaggggttaaat

SEQ ID NO: 15927 - DNA, 3001 bp, Heterodera glycines
  unsure (1)..(3001): unsure at all n locations
ccccctcccatcccctaattcgtttgaatcattcctctccgttcactgatcacccccttctgatcactcctttcgttctctctctctcttacggtgtgtcttgaatgttttttaaaaatttcgatccatctccgttccgttgatcaatcctctccctcccccccctctcgaactttcttccgccatcattcttccctcccattcattcattcttcgtccggccgttaaacacttcacttccccccccccccccttctctccttcccacatcgcccattgtttccgccttcttatcctctccttccatcattttctcccaaattattccccggggaatgcttttcgtccgccctattgagcggcaaagtgccaatgaatgccttttccatgccattggcaccccttccaaaattttactcctcccccccctccctcctcctctttttttgaattttctcgcccattcgaataactttttttttgtgcataatttttccgcttattgcgcacatttttcattactttttggcattatttactgcaacatattctatttttttattttttcgcatattttttctatgttttgaccaatgggacgaaagcgaagtgtttttgaacgggcggagagataagcgaacaaaatgccaagaatgggttggcattggccaatcgtcggcacagtttggccacttttgctgttgtcgattctctttctattgttgcccatttattctttcgatgttcccggcggtaagaaacactcaaagaaaattctgtttttaaatgaaataccgtatctcctacagtttttgccacttactctttgtacagtaacttttattcctttcccaaaaaagtaacaaatgcggacgaaaggggcgactgctgctcaaaactgctgaaaatttattcccatgggtttttttgagttggccgactgaaacgaaaataaaagtgacacttttgcacagaaatgggaaggaatttcgaataaaaatatttaattttttattttttgctgggaaattcactttttatggcatgcgtttttcttttccttattttcttctttgccccgtttcatttgttctcttttcgcttttgtgtgacttttcgccgtttggacggcaaaatttgcataaacaatgccaaaattggggggggggggatttgcaagggattaaagggatttgggctaaaaggaattaattaggggcgattaacgagggaaatggcgaggaataattcgacagggcaatttctaagagccaattagtgcaataattaattaattagtgaattaaattgggaataaaaatccaaaatattttggccacccacttttagatgaagagactgaagccaatctgctgattccgctcgagaatctggtcgacactgacccgagagtgtaccgcaccagcggattggacggattgccggccgtcggcataaaagtgccggagggggggggggggggtatggccaaaacaattcggtgtttaagcgtggcgttgaaattgtcgtgccctaccgcatttatttgccgcgcaaattttacaggcaaaatttggcaaaaaaaatgtattttttctcatttttctttaaggaatttcgccattctcgcttcgattcgaccagccgaccatttgggaggtctttccgtccgcttttcctctttggcactcgccactttctgtttaggctatttgttcgctgtgctgaacgcattcgacacggtggtcgaattgggtgttcaactgcagccggcgggtgggtcaaaaatgggacaaaatgccagaaaagagggaaaatgtggcaaaatgccaatttgggaaaacaatgatattgggtagaaaacaaatgggctgattgctttttactttgaaggaattcaatgtcaaaaataagcgatctttgattgaggctgtgccaaaattcttttgatattttttcaataaatttcaaaaaatgacatcattaagcactcaaccggtccctccgggacacaaaatcctctccttctcccctaatgctgctgaattagccgttccatccccttacccttcgccacaaaacctatacatattgaaaaattccttttgtcggcaaatattttaatagcctacaaaaagtgattggtgtgtcttttgcttggaaaatgaatcataagaattattcccctactgcaatctaaaagattaatgcttttttgagtttcagacaaaaaaaaacttaaaacatcatcaaaaaaaattcctttgtcggcaactattttaaaaccagaaaaaagtgattaatgtgccttttcattgtatctaatttacctttttaccgatgtttgatgatacttattgtcaaggcaaaaattaacatattgaaaatttctttgtaggtaattattttaaaatccaggaaaagagataaatgagttttttcatacgctacaaacctaaattacattttctagcattattactttaaaaaatattgattaaataagattagggtttttttagttgaaatctgttaacaaaatcaacacaattttataatttactggtggtgactaccaaaagatctaattcaatctcatctaaaatatcgtgaataattgatgaaaatatatttgatgtaacccaaaaattggaaaaatgcatcctggttgtgctttttaggccatttttgtgcattttttcgcgcggattaaccaaatttttaaaaaattcggaagagtcgccggcggcgactccgggaataaaattggatttttaatgctatttgattacaagatttgcgcaaaaattactatttttttgtagattaaataattgttttttttgtgtgagtaaatgagtacagggtgacaaataagttttgtgccacctattttatgctgtaactttttttcaaacccaatcaaaaaatacaaaaaatatgaccaanattgcagaaaagaatagagaataataatgatcaggaganttagacgtcatcc

SEQ ID NO: 15928 - DNA, 1950 bp, Heterodera glycines
cctgcataattgtttaatgcttttcatttgacttacactttaaaaattattttgaagcttttttcaagataaatcattttttgacgggatttgctaaaaattacttcacaactttaatatttttacaaaattcaaaaccgatgataaatattctttttagaataatgaaactctccctacaatttttcatttattagttgtggcattggcaccttcgttttcttctgacatgctattttttgcgcaagtttttcgtaaaaatgtgattaagaagtgtcacatggcgtagccgtattagctattttaagattagtttttttaaatgacccaaaatttatttttttaaaaataataaaatatgttcagatgaattgtcgcaagtttcattttattcattgaactcttccatatttattcttttttgataatttttcttttgatattttaatattatggaatatttttcaaagttttatgaatcttatcttttaaaatttaattttaatcaaaaaatttttaaatataagtattctctaaatttctttaaatatttttcaatttttcatcttgaacacttgacatttgattgtgtacaaaattctctatctgttgcacattgtgaaggtatttcttttgagaaaatctctccccacatttttgggtcatcattttgctgaaataaaaatcaatgggaatattgggggataagcaaaatccaattcaaatttgtttcttttttgggtcaccgttttgccgtgaattattattttatgtgctcgccgccgtccatcataaatataagtgaaccatcccatctttcttcatttaactcttctggtgcattttttacaaaataatacaataattattattttatgaattcataagattttctttgcactttccatgtctcggtctttctctctcttttctcttctctctgctgatctctctttttctctctttctccgcaaaaagtgtttttattgttagggatcatatttttaggctgaaaatgccaaaataggtaggatttaggccgtaaaacccgaaaataagcactaaaagatgccgcgtagtttcacgaaaaccgcaaatatccagcaaaagagacggggaccctaatcagtacgatgtctatatttgttaaattaaaaaataatttgattaatttaatcaatcttaccatgatgcttggaaaagtctcaaatttattgctttgctttgcttgattgcattggcttttgggtttgtggttaacggccgaaacacaattatttacgaattattttttaatttaacaaatagagacaccgtactaattagggcccccgtttggtatatcatttgacccttttttcacggggcgttcactacagtttatccaaaattttaaatcctaaataaacttttaaaaattccttgaaaataaggcttgatttgaattatacagctagaaattttattgattggtttagatgtttgcaattactaaaacagcgaaaggcgccgacgtgtttacttataatggctacaaatattatcgatcaaagaagaacaagcaaaaaaatacaacgtattggcgttgtgttaaagtacgaaactgtgttggcagcgtcaaaacgacactcgatgggattttgacagaagggaagacacacaatcacggggtggaggcagtcggacagcaagtaattatttatcattttttaaatgaaaatcctaccaattgagcttaataatcgcaaaaaccaacctttttttgttgaaaatctgttaacaaattgcacccaaatttttaaaatttcccccggctgcgcctatcggcaccgccggaccccttctttcccaaaagttttttgaaaaagggctccgaaaaaagtgatgtgaaaatcaaatcagcagggggagtaatattcgatgatttagtccaaaaaaatgattaattgt

SEQ ID NO: 15929 - DNA, 939 bp, Heterodera glycines
tttttgaaaaagcgctccgaaaaaaagtgatgtgaaaatcaaatctgaatttctattaatattcgatgatttagtccaaaaatgattaattgtttgaaataattgaagaaaatttgtttgaaaattttcattaatttaatttattaaataaaaaaccaaataattttgtattacatattttcacttgatataaattaaaatctgaattttttttttaatttttaaaatttttttgaatttttaaaatttcccggttggtcccggttcccggtttttcttgcggtcccggtcccggtcccgaaaaaaatcgaggtcccggtcgcggtcccggcttctcaggtcccggcaagtcccggtcccggttttggcaaaaattcccggtcccgtggcactctagtgtaaaatgctctaaatttcagtgaaaattttgttaaatggtcaacatttctatttttcctccggcggcgtctatcggcaccggccccactttcttccccaaaaagtctcttggaaaaagcgggccgcgaaagaaacactattattaagtttttcactttgaataaaatttttcaaaatgctgattttttgtcggccaaatgctgattttgaaaattttcagttggcagccctggtttttccgctaataaaatattgttttaagtcgatttttcatatttttattgcgtttccttcacgctctattggttttagaaaaatcttatttttggggtccgaattttagtttttgagccattttgtcttattttgaaaaaaaacatggaaactctgttttagcaagtcccggtcccggttttagcaaaaattcccggtcccgtggcactctaattaaatgaatttactcagaagtccatgcgctgccccaactgctgcagtatttgaagcagcgcccgcaaggccgctgatcagtgatcagaaaag

SEQ ID NO: 15930 - DNA, 1874 bp, Heterodera glycines
  unsure (1)..(1874): unsure at all n locations
ataaaaaatgtcttcttcaatgtatttntgtgaacaattcctcctaatttataaatttttttgaaaataatgcgaaaattacttatttatcagaattaaatgagaaattttttgcaattaatgaaaatattaaacaaaaaataataaccaatcaaaatttaaataaaaaagcattgaatgaagtttaataaagtagcagaaaaataaaaaaatatctcatttttttactaattatagtataaatctagctgtttttaaagatttgaatataatggatgttctaaaatttttaaattattattattttttaattatgaaaatgtttaattttcggtaacatctaaacaactgttataaaaaacgatttttattaacaataaatgttttataatttttttattaattaaaaaataaataaatatatgtattgtatagattatgctattgaggaggcaagtcaaaaacttttattctgttttcaacaaattaaatgtaaaaatttataaaattcattaaattttttatatttttaatttttctttgttttgataagttatatatttttttaaattaatttaatataatatgtatactttttatttttattatttcattctaaacgtttttgaaaataaatggttaatatttattaatctttcccccgcgtccaccggtttcttttttccgaggttggttttgtgtgtccgaccattctgctcatatttaaatttacttaaactaaatattaaaaaataaaatttatttttaataaataagaaaagttttcgtcacgtgcattatataagtaatttttgtgatttgcaaaaattgtgttttctaaaaattcgatttggaggcatttcatatttgcattaaatgatcttactttcttaaaattgagttaacaatttttatttatttccaaattattttatttatttattaggaatatgcatcaattatggaaaactaaaataaataatcatatttgtcgtttaatttagcttatattgtttgcatttgttttaattctttttccatttcatgttgaattttttcatttcaatttataaaatagaatatgttttatttatgatctaaaaagtactttttagataagatttttcttagtagaaaaaatgctaaataattgtttaatcaaaaatcattaaatttatatttcctaatattttagttttacgattttaaaatttcatttccataaaacattttctttgtagtttactattcgcttcgttcggaaaattattttaacttaggattttctattatttcttaaaataagttttgcagtttaatcatttaactattttttaataatttaatttttacagtgatttattattataaattaaaaaacattttttttgtctaatatttttattttaaattttctttgttttattttaaattttcatttctttgtttattttcatgagaatacaataaaacatgtagcatgtgtgatttatgaataaaacatttagcaaaaatttgtggtaaataattttatttatttataatttaatttaattaatattgaaaatttataaacatagaattgttttgatttgctgaattggtgctactatattcaaatttctttgttgttacagtataatttttatttaaaatgttcacatctattaatcctctcgttctttttcttctgttttttgtggctggcgacgtatgtttaatgaataatcttattttttaaacattaagcgagcattttataatagattaaaaaattttaagttaattcgtatataaaattaaaaaaaggttataaaaaaaccagaattttaatagttataccctggaactccacaaattataaataattaaaa

SEQ ID NO: 15931 - DNA, 3423 bp, Heterodera glycines
  unsure (1)..(3423): unsure at all n locations
atatttcaataaaaaataatttaaaaaatttaaaacctttatataaagtttttcaagggctattaaaaccacctattagttttataattaaaattattgtaaaaaaagattttttatataaatgagctgatatttattttatttaaataaagtatcttaattacatgcaaaattttcatctatctgctttctctaaagaaaacgatttttatgttattggtactttttctatttttgggtaagacaccgcaaaatgaatttagctttgcgctttataattgttaattatttaaataaagtttatttgtaaaaatatttctaaatagcaaatagttaaaagcacttcataagatcaagtagcaaatttattttttattaatgaatttaaataattattggttttcttattataatattcaaaaaacaggactattaatgcatatgtaaaaaaaaattaaaaacaattgccttaaatagtcagaaaatatattgattataaagatcaacaccagaaagtcttggtacctgcggcgaaataaaaaaaaaattatatttgaaatatctaagaaattaaattaacttttattaaggaaatttgtaaaaaatcctgatttattcattaaacattaaaaggtgatttaataatttctaacaaataaaaaattctcattaaatacattttctcaatatatcaatacttttataaaatttttgaaaagaaagaaattttttaatattattttgcattttaaatagagatatgactaaataaatattcactaaaaaatcaaaaaaaaattcatttagagctacaattacaaacatctcaactttaaaccaataaataaattctttaaaaatttacatattaatttaaaataaaatctattaattaataccatataattaaatgattattagtcaattttcaaacttgatcttttataaacatgaataagtcaacttaatataaatattacattattattattaagctattttcaagccaggaccacattcatcccagcataaaccaagcccttaacaagattggtactcaaaaatgatacttaaaatttaagaaaaaaaaaatcaaataattattaaaataaatagaaaatatattaatgactaaaaataattatttaaaaaattataattaagaaaatcaatttaatcaaaatgctaatattaacaaaaaattattattattcataaaccgtaaaaccgaaaaggtcgcaagaaaatattcatagttaaataaatagcaatttatattaatttgcacaagtcttttcataattatcaactatgtattttaatttgccgttattcgagaacaacccaatacacgggctgatcaacatttatagaacaaatattgaaaacttattttttaataaaagaaaaaaaatttaatttatgtatcacaaattaatttgtgctagaaaatttaaataatatatgatataaaaattagaataaaaattaaacttactcttaaaattataaaaacagaataataaaattgcaaacgcagaattaaagtacaggctatagggaagctattcccgaaggattcggtctccccataaatctgagcgcatcggttcggggggactgccccgaaaacaaaaaaatcgattttttcaagtgtccgtttggggtactcaaacaattatggggagcaaaaatccaacgcagaaaaactaaataattagttataatatttttaaatttaaatatatcattacatcttatacttataagattaaaaacccttttgaaaaaaagaatattcttctaataatcgtgtataaaaattaaaaaaacaattccttattagtatgacctaaatatgccaacaatattaatttataaaatttagaacgcaaacagagtttgtccaaaaatgaccaaatttcgcttttttcatccggtcccactacgggattgtcaattttatttgctccaaacaattttcaaatcgttattttttaaattttcgaaaataaatattcctctgtttaacgttctgttttttatttcctatttaattaattctagtaattattttttattaattttgtttaaagaaaaattaacaataaaactaattataattaatcaaataactaatgttaaataaatttaataaagttacaaaaattaatggtacatttttaaatttcggagggaaacagaaaaaaaaaatttaaattgtactatttttttagtctctattaatttaagattctttttatgaaacatgctcatataaatttacattcgaattttttaggtttaaatgcatttaatgaacaagcatctaaataggacaatcggtagaatttgcagaaggtttaccatgtttatatttaatgaaaaaattgaaagaaatttcaatatggaaatttgactaaaaattatttatttttttttattattcataacttttttaatcttaggatacgaattttaccaagtggccatgagataaattaagcaaaaattgaaaattacaaaacaattcttaagaaaaacaaaataaaagcaactgtaaataaattaaacaaatgatcatacaaaaaccaagctaactaataaacaggtcgtggtaaaaaatgtagaagaaactagacgagggatacctcgtctagtttcaaagctattatttttgctactttagaaataaaattaaattaaaaaaaaataatttaaaaaagtaaataatcggttaaaagattggaactttcttcaaaaattttcaatttatgataataataaaaaatattaaattataaatataaaattaaaatataatctcaagaacgagaattaaagaaatgaaaatacattttacattatataagaacaaatgaattataataattaatgcaaaagatttaaaaccaattcagataattagaaaataataatgtgccatattttttttgtaattaaatcaaatttttaaatatattcagcaattggaatatataattaattttttttcattaatttattagcaagaaataattactaataatttgcaacaatatatttaaaatagaaataattggaacaaaaatttataattactaaatgcccttaaatttgatgtattatcaattatgtagaaataaaatttcagtcattaagaaaagattgcatatcgttgggataaacaaaataataacaaatttcaaactattctgaaaatgatttgaataatttgagaagaattattanaatttatttgacagaaagacagccagactataaattcaatcattttgtttaatttattataggattaattttattcaaaaacatntatgtttaaagcaaatgaaatttaaatatnaaccanaaaaatcaaatatcagctatgaaaaataaaaaaatgagttttggaattaa

SEQ ID NO: 15932 - DNA, 2197 bp, Heterodera glycines
cctcttttccaatggctcccttcgcccatgtgacttttacagccccggggggagtgtcgcgatttgcgaaataatttgtatttcctctctcccgttcccccgacagataaatttcctttattttacatttatccccccccccccctcccccctcttcgcttcattacaccgcttcgttcccgacggccgactggccataaaagactttgattttcctgcggttcttgttcatgcctttcccattcttttcccgtgcggacttatcccccttttcttcgccgttcgctcgccattgctttcacttagcattttttcgcctttgattcattgcttttcccttggacgtaattggtggaaataaagagattttgaaagtggtcttttgtttggattcgtttgtcttttggttttgtcttaatttggttcattctcattcttcacttttttctgcattaacgcatttttttctgctcagctggagccttgtcattattatttcttatccaattccgacattaaaattccgactgtccttatttttaagaaatgttttgatttgtggagtccatttatatcattttgactaataaaggggacttaaatttaattaatatccaaataaaagccccccccctctctatggtctttcatcggggacacttaaactggaaaagtgcacgatttttgaagcccttgggaaaaggccgccaattctgttgtcatttctacagtgtcggggccaaatgtaaccctatttaacagcctttcaacagtttaatttacataaaatgtttaattacattttgctaattgctttccgtatttccatttaggcaaaattattatttttaatggcaccgcccgtcaaaaaaaagaaaaagttttcctccgacaatcgccgcctcatttcttctaccggaattggtgaacatgaacaacaatcgatgggttcacttacgacatcgtttggaaaacggcaaagtctttttcgacatgcaaagaaaatgaacaaccgaattttgaggaaaatgtgagaataattgggctaaagttatgaatttcaatttaaagtctctcaaaatatttttcccgcatttagctggatttgcactgatatttggatggacactttcccgttctttgaccatgcccaactcggcctcaaattggcactgatttcgccacgtttcgatgttttagtagacaaacatttcaattgccaatctgaattgacaatttggagagaaataacaattgtcaaggacacaggatcagaattaaatctaactgtacggattggtggcaaatctgtgcaatttcctttgcccgaccgttcgctgcccaacaaaattcgctttgataatcttaatattgagtaattaaaagtttcatggcattattaactggtaaaggaattcatcccgttttcagttacattgaccattccgtcctcgtgtttctccgtgccaataagcaaatttgggacaaaggcaccaatttgagtttgtatgtgtgctggtcacacaaccagaacgacaacaacaacaatttcctgccaatttgggatgtttttgtttgtaaaatttggcccatttttgcgccaaacattcgccgcttgagcctttcaaattcttatcatttggacaattttcgtcgtcttatttcgccgacaattctcaccgatctgaacctgaattcaatgtgctctggtgatctgttccccgatgggatcggtgatgatggaccaaatgcaactgctggccaagcgctatccaaatggttgcacactccaagaaaagatgggcagccaaagcgattggtttgctatgattacccgtcaaaaaacattgaatgggtcaacaatttcaaagaggtcagtccccatgttatcttaaactattgtggttaattacctaattatcttttggtttccaattgtttaggcttttcttagtgccaccacttccgccagctacaaaattcaacttgaactgcaccaatcaaagcctgagccatttgaattggtgaacgaacggaccaacgaaaagctaacaatggaggaagtgccgcgcgaagtttacaattgggtgatgaagcgatgcccaaatggggggacggaggcagcagctcagtgggaggaagaaaagacgaataatttgaacattgtcaacttttggctttataatgccgaaaattg

SEQ ID NO: 15933 - DNA, 1472 bp, Heterodera glycines
  unsure (1)..(1472): unsure at all n locations
ataacttttttatttgtcagttagctttagccaatctggcatcattgaaaagctctatgtgtgctctatatttacatgtaaaaatagaaatgaatgattcaaaaataaaaaagttatgccacgcggcgccgaaaaagccaagaaaaagttaatttttgaggttttttggccataacttttttgtaaactgacgaaattttttgaaattttacaggctaatagagaatctgaagagctatcgaatgataacaaaaatttttaatttggttgatcaggaaaaaagttgttagcaacggcgccaaaaaggccggcgccgaagtgggcggttcccacttcacaaataaactaaaaaaggagtcttaaaaaatcccaaagaaattcaatattttcgacatcagtgttcattttgagaccggcagagtaccgtatatgctctaattatagcccagtctctattaatcccgcagtctccaattatcccccagtctacgaggtgttttgaaaaataatccctctatcataatccccagtctctaattatccccccttttctgaggaggttgaaaaataatcccccatgggcgataattagagcatatacggtaggccatattttttattcccgacttttgttcgctgtcactaaatacattttttttaaagttgaaccgttgctctttacttgtgggttcagccttcatttttcattcctatcttcatgagcaagaaatggacaaaaaatgtatcacaacttcataagaacaattggaatcaaataaagaaaaaaacaatgccaacgctaactgtgagggaaaaaatgaatgccggatggctttgtaaagtgtgcaattagtgtaattaacacgccggtgctaattaaagcctgacggcatatgtaaagtgatcagaattaattaattacatgatacgcacattcctacacatataaacagagacagacaattcacaactaattatattaattaggattgttttattaggaattaatcaacgtaaaaatatgaaatggggggggggggaggtggaaactatgaaaagtaaacaattcaataagcgataattagaatatatgtattgtattgtgtttttgtgattgttttctccgcgttttcgttggtcacatccatcgcatcgatcacacaacaaattcatcaaaatcacagtcgcttctccagaaaatcaatgttcatcttgaagaacacatagggctgagcaaagaaaggaacaaataatggtggcaattaacggccgagttaaggcattgatttgtttatgaaaacccaaatttcaaagggtcgaaaaattgaaaagctttttagtagagatcggaccggtcggttttttttcggttttcaaccgaaaccgttcgaccgaaataattaaaaaaccgaaacaatcgaccgacttttttgacaaatcagttggccatttttttaacaaattcattanaa

SEQ ID NO: 15934 - DNA, 1509 bp, Heterodera glycines
ccggtcaaaccgggaccttggtactatgttgtccgcttccaggtcccggtcccgtggcactctaataaattccaaaaaaaaaaatctctgaaaaatttttctagaaactttcgtattaaaaaaacctaagattttttctcaaaaattttgtttaatttttttaaattttgtccttttcccgaatactcgggagggggggggggaactgttccctccatttgtcgaagctctttttcatcgggcccatcccgcagtgagaatgggtcccactttttgaccatttgtagaagttagggggaatgattcgtatgatttttattccatttttcccaataaatttcgttttcccatgccatttttgctcacttgttttcccgacacgcgcctttgtactcgtccaacaccttctggaacagtgtcactgtgtacagcgcgtggtccgcgtcctccacaattttgcgcgccgaccccgggacgaccattgtggcgaaagtgtggtatttggtctcccagtccttcgtcaaaagtctgaatgggaaaacggagccaaactttggtggtttaaacgacaaaatatacgcggaattaaatgagaaatgactagagctcgaaaactcaaaattttgtttttctacgccgcaggccataacattttgtgactttatggatggtctcaatttcaacaaataaatccggcggttgcttgtctctttttttgttgccaaaatggtcaattttattttttaaaacaaagtaaaatgtgaaaaacaaactttggcacgacaacacacacagtttggaggtattcggagccgagcacaaagtcgtccgccttcaccaaatcggacagatcgcgagtgatcagagaaccgctgaaacattttcgctttttaatgaatattttatgttcgttttttcgtaaatttcctcgactttttctctgacggaattaaaaatttgagttttctcttttcattttttgctcgcgtatgaatgaaacgattcctttaatcggcagctttttaaacttacgccgtttttcggtcgatggacgcgagggcatttttgagcgcattgtaagcggtcgccttcattttgaggtcgttgtcgatttggctgacttgctgaacaaaacgaaatgtgtgccaaatggaaatggactttctcagagaaaaaattcacaggaaaattatgggaaatttttttgttttgtttttttttctcggaaaatgccatcgtttttaacaattctcatgtaattaaaacatttaaaaagattgatgctatgtaatatttaaacggcttgtaaaagtaagtccgtattttatggtggccatttattttagtttcgcaatttccaaaaaatgggaaaaacctttccgattaattcgctgagtgccttcagcgactgtttgatcggatagcgcgcggcctcccactgaaatttggtcacataagtgcgcatgtccactgcaaaaggggaagaaacagatttgaaattagacaaaa

SEQ ID NO: 15935 - DNA, 1590 bp, Heterodera glycines
tctgttatatacgttctaggtcgattcaaaaaagagccttcttcaaaagatcgaatttcggcgctagttgcaaagttggcctttttgaatttcattaaaatcaaaaggggggggggaggagggactctttgttttgcaattttttttgtgataaaaacaattattttatgggttttaaggtcgcttatcacaaaaatataattaattttttattcgaaattcaaaaaactaatgtttattgataaaaaattcatatataaatatataattgcatttacttgatgcaaatgcttttaaatccaattaaattgctgggcagtggcaactggtcgagcggaaaactgtcggatttaaaattaaatttaaaaatcaataattgttaataaccctcctaagctaacaccgccgccgtagatactaattcttttaaatgcccatttccgcgtttttaagtgcgttgccacaagacaatcgaatcggacagaaagcagtgccaacttcagcccgacttttgcggggttaagccatgggaaaatgtgcagccaaatgtcgttgcacacgtagctaaaagccaagtaatcacatgatttgtcctcactttttgataattggcccaatcaggtaaaatgttttcagagtaaaaattaaaattgataaattttcatcaaaaaatatacttttaaattaaattccattttaaatacatatacatatttatttaaccacacatttttcgtgaacatttgcgcgctttcattgaaagccgtgcgcttcgccttaggccaccacatgtaaaggaacccaatgccaaaagtgaatgccgtcgttgggttgccgttggtgacattttggccaactttttgaattatggcaagatgaaaagccaattttttacggatttaacttgaagaaacaggaggagaaaaatagtttacctatttgtctttgtgaacaacaaaccaaacagaaaagcgaatgcaatcgatggaaaaggacgcacaagtgacggactgacagagagagtaaggcactggtagagaatggacaagaaaaaggaatggaacatcgttttgttggtcagagagtgaaatactcaaaacagagagagtgggcaaaaaaggattgacagaattttgggtccggctgggccttgtggtggtacattactccgcgcaccgccctccccttgggccgtcgcccccacgaaaaacgagcgggggcgtgagggggggggggcgtttttaaaaatgattaaattaattcatttaaatttcaaagtcaggtttgaccgcgatggtgtttgcagtgaacgaaggttctgccgaaatagtgaagttgttggttgagtcgggcgccaacgtgaacttgatggattacgacaaaaaaacctctccccttatcatggggtgccaggaggatcgctttgcttgtggtaagtctgtcgtcagttaaatgagtttgggttaatgcccgttaatttcaccatattcctttttctaattaaaacaaagggaaaaccagccacttaaaggcaattttttttgtaaatttaagtcaaatttcgttttggagtaaaatttcattttaatt

SEQ ID NO: 15936 - DNA, 860 bp, Heterodera glycines
ccacaaggcccagccggacccaaaattctttaaaaaaacatttttgctgaaaattttagattttcgctagtggtacccttcccagacctagcctcacccaaaatttccaaaaaatttcgctaaatttccaaaaaaagtcaacatttttgatgaaaaactgctaaaatggctcaaaattgcaaatttttttttgcaaaaaccgcctcacaaaattcaatgccaatggcctttattgagctgaagcaagagaatcgctgattaaaccgcaccggatttgtctcgcctgtcaatttgtgctcctttttcaataaggaactgagcaatttgtaattggttagaactcgcagcatgcattagcggcgttttgcgtctaaaatccccggactgaaaatcttcgccgctgtccacacgtgttttaactgaaaggcatgcaaatgtatacataacctattccatgccagtgatgttagaggttttgggtttttgatgaaaattagaaaaaaattgagtaatcgacataatattgcttcggtggtccttgaaattttttagaaatttctatgtttaccaatttgttaggggtgcaatacgcaaccccttcgccgcccctccccactggtttagggtctgttttattaacttacccgcttcaaaatcgccttcttttaccaaagttattaaatcggtttccattttgtgaagaaataagttttttgccttaacaatcggtgcttttcaattaaaacataatttgaatgtgagaaattaaagtccgtttgccctattgttaatggcttttgccaatttttagcagctcggacaatgttcttataaagaagctttacacaattttgtttata

SEQ ID NO: 15937 - DNA, 1968 bp, Heterodera glycines
tgtccaaatactttttgagctgcatgatgaccatatctttgccaatccgtcgcataactttttgaaaagaattttaaattttttggataaaattgacattggcaaaacaattactaaaagcacaaaattatgctttgggtcactttttgtcatgcatttattgacgaaagcagatgaagcagactatttgccaaagcttgaatttgtcgaattatttaaggcacaaacggacgaattatgcacagacgaaaggtggggaagaaagtaataacataatttgttaacattatctattttaatgaagtctgcttggagcaaaaaataatttttataataattacttgtagaactcgcatttgaagtataaattcactaaataataaatttaaagcattgaaattgccagaataaatgcaaatgcttaaaccccggccaatatatattactgggttttggtattaaaaaataagttgaaaaattcattacttattagcctaaggagaaagaaaaaacaatattcatttaactaatgattggtcatttagaacagaagaagaaattaacaaaagcatcggggagaattcgctaaatattgtcagaatgacaaagctcaatttcaatcttgacaaaggcatgtgcaatatttgtaaaaaagcattaaattttttaaattcaatttaagtagtgatttattagagtccgattagactgtcgcattgggggcaaaaaaaaaaaggtgaaaatctgatataaaaatgaagattccccggatgttaattgatcatatttaatcagaattggattatcctgagagagaagggtccgtagttcgggtgcacccaaaatgtcgctggttggactacactttgttcattgttaatcaaattaagcattcttggtattgttcgtgagctttgtgttatttgccaaatctcaaattccttaagttaaaaaatgttatgaccgaaataaattcaacttgccatgtttttgtacataataataaaaaaaaattaaaattttgctggctaatagagtttttcaagtgctttcaaacaatattaagatgtttaatttggttgagaaagaaaaatttatggtccaaaaatttgcccgttgacttttcggctggcgacgttttgtcctactccaccgtagttcagctggtagaacactgatccgcaaaagccagagacgccggttcaaattaggcccgtcgcaagttttttcctcaaatgcttccccaagtccttcctacataattcaacctaaacaaatgccataataagcttggcacttttaaatggcgcctatcagttttaatacttaatttcgaaaacttttttttaaataattctccataagatttaccgcaaataattcttcctgctcttcttaatgaattggaagaaatgcttaaaaatgagaattggaattactttaatttaaatcatgttaaaatggttgaatggcatttgttggcattggcacttcgcaaagatggacaatgccaaaaatgggaggaaatcgaagacaaatgggaagaatggaagagcgaatttaacctttcatttggaaatacgaatgaaagtcagaaatttcaaaaattaatggaagaaattaaagaaaaaatggaaaatttgaaaaaaataatggaaaagcgtgaaaaggaatgattaaatgactataatttattttatcggatcatcgcaaatgaaaacaaagattaataaattacaaaatttgagccgatttttggcgaaatttggtaagcccaagtaaaaaaagaaagaacattttgttcattttgttcattatgtatttattagttgttgaacaattttttcaaccaatgtcactatattcactgcattaattcatggtcttaaaattggaaattatatgtatccatctatgtattcgaaagaagtgttaatttttgttaaggtttggacaaaaaacgccaaa

SEQ ID NO: 15938 - DNA, 1563 bp, Heterodera glycines
agcgcttcaacagttgctcgagtctccccacattttccattacattttcgattgtttctccgcctctgatcaagtctcttccgatcatcacaatgacgactttcacttttgatgataaaatagcgctgtcaacttcttttatcacttcggtgatggagccttcttcagtgccaataaattgtattttggccaaatttttagcaattgcttggccgaagagtctcccacgatcacgcttgtgatttgttttgaagtgaagagggatttgcttttcccgttttccacacaaaaaaaattccgccttgttcgtctgctcctcgagtcgtttcccgggtttttgttcaccctttttgtcgacagtccgctgaaagttgggggatttgtttcccgtttacagaaatgtcacttgggctcgtctaatcgtgggttttactttacccgtttacaaaatttggctgtccacagtcacttgatccggctcttctcttgctggaaatttgttttccctttttccgatttttccacacttgtcgacacctctttctttcttattcggcgtcgtttttccctttttccctcatctgttgtgctttcaacattaaaaaaagtaccgaatgatttttgtcccccctttaaaaaaattcaaaaatgttaatgtaaaaagtttgctgaggtttggggcgtcgctgatcacgaatccggcatctttctgccaatttcgaaccccgggcccaaaatcgaacaaaaagtcaaaacttcaaatttttgaaattcgcattttcgactaaaaatggtttgaatataacggaaatattctctatgctctgtttcataattactggattcgtgaatacgacttgaaaactagagcccggaattttgaaatggccgggaccgggacttggaaaatggaccgggacttggaaaatggaccgggacgggatcccggggccgggactcccgtttttctgggactcccggtcccggtcgtttgtccaaaataaccgggaccaggagtcccggcaaaatcccggcgggctcccggtcccgtccgacgcattcaatgggagggaaaaattgtaattggggcgtttcagtaactcatcaagaattagaagataaatatattatgtaccacaattttaaaatgcatatttttaaaattctcggtattaaggtttaaaagcacaattaaaattcaggaagtggactcattggcaaaacaaattctatgtagtttggcgttatgtttctgctcactgatcaactcttctgttttctttgtaaacaaatttgttttctttttgttgccttttcatttttgttttcatttctgtttttaatttacaaatattttcgtaaattttcccaatttttagtaaaacaaaaccaaaaatgcgaatttggccctcccctttcgttcttccgtcccttcccctcgcacttttcctgcccatttgcttccgtgtcgttctgttgttgcgcttcggcgccggacgcgacgacgccgcggtcggcgaattgcaacacaaccgactgcacccgtccgacaccaaagagatt

SEQ ID NO: 15939 - DNA, 1858 bp, Heterodera glycines
tgttccccggaaattttttagaaaaagcgcgccgcaaaaaagtgcatatgcggtgaaatgaggaaaattaccaacagaaacaaaaaactattcgttaaaatttcatttcggcgaaaaatacaagtcatttgaataaatattaaccatttttcattgcatataataaaaattttaaatgtccttggatttcatgaattttccccgttatgtccttgaaaatcggcatacccgtccttggaaacggatcattgacgatgagagccctgctttaaatgttttttgatcgattcaacacttttgaaaatttccaacgtttattcctattcatgccggtaccgttctattctacaaattgaaaataaataaaataaaattatatggatcaatttttaaggcgcttttaaacttcgaacaaaattattgggacgccaacgcttgtcacactgacctagaaatcattggtgacaaaaatttgacggttcattataaggaaagagcatctggtaattttattccaaaaataaaattaatgggctaaatttaaaaatgtattttttacttcgaaatttaagcgaattgaacaatacgtttaataaatatgcgataaaaacataaacaatattgccacttcatgacttaaaattcattttatttcaagtgttctaagtatatttgttacagctccagcaattcttcaagaatttaaaaatttaagactttattaataggttttgttcaaaaatggcccagttttgttggaggctttgcacaaatttttgaatttaagtgaattttaatagaatttttactcaaatgatcttccgctctataaaagatttcttcaaaaggttggcgtttcgtcttcgcaaaacatccatttttgctgggcattggttcatcggacattttttactttgaaatttcagtaaaaaatgggggatggtaaacgtatctcaaggatgtataattttaaatttccatgaatttcagtggcgtctgcttcggatttggcgtaaaaaagcagccaaaatcggacgaaagaatgtatgatggcgagggcttctacacatatgattccaacggcattttttggattaacggttcatacaaaggaatgtttgagagaaatgcttacggtgttaatgacattgtcgggtgtggcgttaatttggcaactcgaaaaatatttttcaccaaaaatggtcatagaatgggtaaatttaattttacaaagtttttggatttattttaattattttcaggcgctttcgatttcgattcattttctgatatttaccaattgtttccattcgtttctttgccttactggagcgaaagaatagaggcgaattttggcccattttaaattcaatttaaatgtgaaaaaattcactaaaatgttcttttgtaatttttatgatcattggacttcaaattgtaaggatttttcgaagcatttctctcaatttattttaaacttcaatattattctttttttcgctttgatttatccaaccaacaaaaagcgattaaaattatatcttcagtcatttgattcgtttgggattttggggctcagtcaaagggcccatggctttccccgattccctcccaaattcaatccggaataaagggtgccgttcagggatttagttccgaggcactaaaaattttcggaagtcggaattccggggccccaaaaatttcggaagttgaaagtcggaattccgaccccaaaaatgtcggaagtcggaactcggaatttttcaaaaaaaataaaatataataaatttttttaaaatatttaataggctaaatttttaaatttttaaccatgtaaaaggtaatttcaaactgt

SEQ ID NO: 15940 - DNA, 1305 bp, Heterodera glycines
atcctcaaaataacaacaaaaatataaattcaaaataaaattcatattttccccggcggcgccttagagagttcacagtaaaataatatttcttaattaattaataaagttgctttttacgaatgccaatgccgaagaagagaatcataaagtgaaaaatgataaagaaatgatggacaaattggtgcagcaaatggacaaagaaatagatgaggtgagcttgaaatgtgcttaaggaatttataaattaaatttaagctgtctttaaacatcggtgctggtcacaatgacaacaaaatcattggtgaaagaatttactgttaaataaattataaaaatatttaataattacctatattttaataagcatagaaatatttaataacattttttcaaagcatatatttcattttaaaggaaaaacaaaatgtcaacaagagtccgccattatgccaaggaaaggcaaaaaagtgaacaatgtcagtgatttgctacgtgggcgagaaatccaccgccaaacttccaccgtttgggtaaaactttgatgccattacgttttataaatatgccaatggtcagcaaatctaaaaacaaaaataaattcacatattatttaaagtattaatttttttgtccattttaaacttattattttttttcgaaaattaattaaactattaagagaatacttttttatctaataatagaaataaattaacattaacattcatatattaaaaaaagaatatgggatattttttattgatactttttcaaaagattttgagattttttaaataacatattctattgtacaacacttaaaaatacgaatatcaataatataaatttttgatgtttttaactagtgttattaattttattaatggactaccgtatcttaaggcgtttagtagagttcgacctggacctaggtgcaagcccggattttccctggttcaaggtccaggctattttcctggacatggatttttgttcacaaatttagcccctgttgaaattggataaatcattacatgctttttctcatgaataaaggcaaaatgtgcctctaatttgcttttttccctttaaatcagggctctcattcgtccttgaatggcaaggacgtccttgaaattgggcctttccgtttgaaaatttaaaagtatccttgaattcaagaagtccttgaaaatgagcatttggaaaagttttaaaaaattcaaagatatttgataaatttttgaatttataacatatttgaattaaattatggcattatgtcataaaatgtaaattttt

SEQ ID NO: 15941 - DNA, 1994 bp, Heterodera glycines
aaggcaagcaccccgagtacgagcgacgactccatgagcagatgggctcgtcggttggcagcggcggcggcggcggcaacaatagcacaaaacagcgccaaccaccgccaccactgcagcaacagaacagttttggcagcggacgcgagttggccgcgatgcgccacaaagcgacgatgggcggaggaggaggggcaggacggaaacaaacgtaaagcatatattggattgaaggggggggggtgagagcagggaaagtgccaatttgtgggatgtggattatgtcttcggttgagatgcataacacggaaaaaattaattggatcgaggcaaaagcagcgatttatttatgcttttgtagttatcttttttcattttttgtcatttagtgacaagaaacgtggtgccacgggcagtggttcgttggagaatttgcctgcaattgccagcaatcgaggccgaagtgggacgacgccaattccgatgacaaagagcagcaaaaacagcagcggcggcagcattcactcggccgctgaacaaagcagtgacatcgctttcggctcgtttgcttcgtccaactcgtccaagggaaaccagcggaagcaaaagtaaaaataagggggagagttggcacttacaattagcatcatggcatatttttattttcctcaaatgcgaattaatccgaaaaattgtccatgtttttaccgtagtattcctgtttgctcattttcattttactccgttttagtgatgtaacccatagagtcggaggcgattcgtcggacagtttgtccgcagttaccagcgaacggagcagaagtgtcgtgacaacgcctgttccgacagcgggcaaagggagcaacagtgccaactgcacaagtgacgacggtggtgaacacgatgacgaccttgggtttgatccatttgcaggtaaagaaaggggagtgtttttcaattaaaaaatcttaaaaatttccggcaaggaattcctctggttagggcttggacatcattcccgacatttatttaaccgtttttgttttgttcagagtcatcaaaggcgttggaagagatcattgaggaggagaagaactgtaccccaccggcaccgattggcacatgtaacagtcggttgcgcaacggaacaattaacacggacggcggccatcattcctcggcaactcagtgagtttggaaaatatttcatatgagagaagaaacggacatggaattttcaattttgcctcaaatcgggttccaattctgaccgaaatttaatttacatcccttcatttccagcttttttcccggttccaccaattttttcggccacgactcctccaaccatttgctttcggcagcagcgcgtaacggaccgccaccactgcccccgcccggaattcaccaccaatcgcctttctctgcacaaacccagcagcagcagcaacaggcgaacgccttcagcagcttttactcgccgggcggtggtggccccgccagcaatgtcccccctccgtcagcagcagcggcagcacattttcaccacaaccataacggacccggttcgatgatggcatccgcttttcaccaggcaacgctatcctcattccctacttcagcacagcagcagcagatgtacaacaactcaaacttcgctgccaacaacaccagcagtagcaacagtctccagcagcacaaccatcatacgcagcagcaccagcaacaacactcccaccatccctttggcggtggcattggcatgggacacaattcgttgggcgaccttcgcgaaacgttcaaggcaaccttcgccaccaatccgcagcatcaccatccctttggcggcggtggcattgggcacaattcgttgagtgacttgcgcgagagtttcaaggcgttgttgcccaatgtgaacgtgcggttcgtgtctgacgcggctgcgtcaagtatggtggtggattggccgaccagtactacttatccctgactgc

SEQ ID NO: 15942 - DNA, 1787 bp, Heterodera glycines
atcgctgcggctgccttcggagcaggaattgtaatgctgcgctttcttcattttttttcaaaatgcaattcaaacatttttgtcccttttcagtactgttggaagacgtacctcggcccgttgctcgaacaaccgaagagcgacgatgaggagaagcccaagccggaaggaggcgaagaagcgacgaccgccggcgacaaggaggagaagaaggctggcagcaagggcgacaagcacaagaagtctggcagcaagggcgacaagcacaagaaggacaagaagtctggcagcaagagcgacaaggacaacggccccgctgacgaaaacaaacagccgcaaacgagtgcttatgtaagtttatcgcgtcttaaattaccgcacataattaattttttatcaggcaactcccacctaagaacttcaccaatgacgcattcgactgaatagaagacaacagatgaaaacaaattcagtaaccacaacaacagccaaaagcaaaccaacggaggaaaaagaatgggaagcgatggaaacggattcgaaatgatatttaatgccacaaaatatttgtatgtgtattatacataggtatatccggtcaataaatacctatctaatttgaagacaggtctgttttacgctacgagtttcctttccaattgttttatgttggtattttggtaatcctgtattttattggtcccataaaaaaaagagattaaggttgtttttatgcaattcggagtagtacccgggggttttcgggggctctgatcacgaatgtgacattaattttaacctatttcgaatcccgaacccgaattcgaacatttttttataaaaaatttttaaaaaattgttgaaacgcatttcctatgggttttggggtcgctaatcacgaatctaacttcagttttatctatgccgaactccggacccgaaatcgaacaaaaggagaaaattaatttttcaccaagaatcacatttattgtcccaaacttattcaaatgaacggaatataatagaaaataaagattcaaggccatttagtgaatttgaatcgattttggacaatacatgtgaattttggtgaaaaattaatttccgacttgtgttcgagttcgggattcgaaataggtcaaaattgatatcatattcgtgatcagcgcccccgaaaacccccgagtattactccgaaatgcataaaaacagctttttaatctcttttttttatgggaccaataaaatacaggattaccgacaaaaatccaggaaaatccgggtccaggaaaaatccaggttgccgaaaaatgacctggacctggatccaggaaaaatccaggcctggatccaggtccaggccgatctctaataaaaaacgcatgattctagtcggttttatgcatcccatggcagattatgcgtcccatgaatgaccatacccagtttcttaggccataacttttttcttatttggtcaatacccatattcttggtaccaagcgaaagataaaaatctcgagattttataaatgcaaaactttcttttcaatgaatttggggtagaaaaaaagctgatcacgaatatgaactcagcttggttcttatcccttttgtgaccccccctgaaaatttttttaaataattttttctagggcatttatgcgctgaacacgaatatgacgttcatttttagctatcatgagttttgcgtgagttacgtggaattttacgtgaaaaaatttaaaaaatgtaaagttcaaacatcaggcgggcggcatgaaatc

SEQ ID NO: 15943 - DNA, 1880 bp, Heterodera glycines
  unsure (1)..(1880): unsure at all n locations
tttgctttggttttggcttcggcttttaagcctactatcacacccgcggcgagaacgcaccaaagcatgggtgtcaaaggagccgaggggttctgtgatagttagagggacaatagggtcccgccctatcacacaccacacccccctcattaatgtggcgattaacttaccttaaaagctccttttcaatttcaattttccaaatattttattattaattgtttttcgtattttcatgtttaataaaattataaaatttccttccatacaatgttatcaatttttgcatttagattttcatgtgataattgaactttaatttgttgccatgaaccaacacgcgataaagctacatatgtctgaccatgagaaaaactttgtctcgtccaatcaactccaatttttttatatgttgcaccttgtccttttataaaagttgcagcaaaagctaagcgaaccggaaattgatgtctttttaatggaacaggaaattcgctttcagttattagagaaattctatgaatataagcttcagaaccatctttatcaccaccaagtattatacattttaatacattgttttttaattctttaacttgtaaaattgttccattacaaagtccgttttcaatgctaatattccttagaagcattatcttacagtttagcttcaattttaattcatgaacagggaatcccggggcattaaatgaattcattatttctggtgtaactggaaaattattagttgtttcaacttcatctatgcttaggtaagtcacgcattcaccaggaaatttttctaaagcagctgtgttatgttgatcaaccaaatcattgtatggtgaaagtatcaaacgattttttaattcattaaaattacgttctttaaaaacatcatcataaatttcatctattaaatttgaatcgttggctatgatacaattattaggtaattgaatagaatcgccaaaagttccattaccaatttcaagtatctgttcagcgaaaatttggtctttagcccgattatttattgttaatttcatctgctcaaatttactccaaaatattgacttttttattgtcaggtcaataatttcgcttcttactgcaaatttttttacaggtaacgtttgtctaaaatcacctgcaagaattattgttttgccaccaaataattgtttacagttagttaattcacgcaattttttctcgatagcatcaagtgcaaatcgtggtgtcatcggcgcttcgtctataacaaaaaaatcactttttattatttcttcggcagctttagtgccttgaacaactccagaaataatatgagcattaagattaagcggaaatttaaatcgattatgtattgttctaccattttttaataatgtagcagcaattcctgaaaatgccatgtttgtcatatgtagggctgggaatttgaaaaatttatgtacatattttgacatttttgccatttatttccatattttgagatttttgccattttatgtccatattttgcgatttttggtccatattttatggccatatttcgcgattttatatccatatttttaccagccctagtcatatgttttttataactacgtactaaatgatataatgcattcaatgtaaatgatttgcctgtgccacccgggccatcaatgtaaattaatttaggattaagtttgcctgatgctatttgttttattttcgtaaataattttttggtcagcgttcatagacttatacaaattttctgcgattttcttttcttcttcatagtttatattttcgttntcttctgnntaaagagttttctggggtaaatttttaaatctttcaaagatttcccctcctgttataaattt

SEQ ID NO: 15944 - DNA, 2913 bp, Heterodera glycines
aaccccccccccctcacctccgccggtccgtccccttcctcctccacccatttcctttccacttcttttcctgcaccttcgtcacatcgatcttcatttcttacttcaaaaatttcagaaatttttcgtcataatttttgcataaatcggacatggcttttggcatcagtcaaaccattctttcaatttcggtggccctttgtttatttccccgaattctcgtgccttcgtcggcagagcattctttgctttctcgtcctaacctcagcccttcctccctccatctctgtccacttccgtccaaacccaaacattcgtcaaattttggcactttttaataaataaatacctctaacgaaaagaattttttttcttgataaattttttatttttgagcctatttgaggatttttaactatttttgctatttaaattttttgcgcctaaaattccatcccttaaattatagatttttctttcactccatttattcttcagtattatctggtttattaatatacaaatattattcttaatgcccttctaccattgttccaaccctttcgatgatttggccgccgtagggtaaccaaaaagggcattgtctctctccgccaccatgtcgctgtcccccctctccgtaattggcgattctttcaacgataaaccgcctgaaaagcctcctcgccaattccattatcaatcggtggaggtaatgttctgtcattcaatcgtactgctgatttttaaatattgaataaaataataaataataataaaattaataatctttcccccgtccccttaaaaagggaaaattaaggccaaaaatacaccaccattcactggaaaaatacgcatgcatattatatcatacaaatgacaccgagctgagtagaagcactttctcgggacggggattagtttacctgttccattgactgatgactgtccccacccctccgcttttcacattttttaaactctctccatttctcattctatctctccccctttatttccctttcaatctctccctccccctcctttctctcaatctctccctccccctccattactcatctctctctttgattcccaaatcttcctttttctccatcctcctacatatctccctccctctttctctctcttccttctctctttttacatctctctccccctttctctatctctttctctctttatttctcgttctatttccctcattatttatctcgctttctctctttattactcctctctctatcattcccaatctccctttttctccatcctcccacctatctctctccctctctctctttctgtttctcttcatcttccttccccttgaatcgatcgctccttcgtccacctttgtttggatgacccacccacccttcattttcccccattaacattcttcgtatcccacaaatatcctctcccttctctccccttcttctcatttcaacaaatcattcgtttccacttttccctcttccctttctcctccgttttctttcgctattccctctccaaattggatgcattttgcacttttccttttcccctcccttacacttcctttttcaaaccttcttctagcagttggtggcccctgccatgcctttgcttccgtcctccgccgttggcacttcgcctgcgtctgcttcgtcatcggcagcctctccttccgctcgtcctttacgtgttgcgcaaccccctcccttggctaccgccttcccctcctgttcttccaccatccctcagccaccaaattccgtcgatgcttcttcgtcctttttgccaaattccatctccgtgccctccctgcccaaacccgccattcagtttcatcgttcagttgcgtccgtctcctcagagattggaagtcggaccggaacaacgaataaacaacagaatgccccggggggactgaatgggcggggggacagggggagaagcagatttgtgcagaagaggtaaagaggggtggaaggtaaagagaagagtgaacagagagagagagagagggacccgttcagctacgaagaactgctcgaactcgcccggaaccaacagcggcagatcgaggcaaatgaggacgagttggacgagaggagaaaggcggtggcacttttcggggtggccaaaaggaccgcagccagtcaaagcgaactgcaacaaaacgccagaatgtataacggaatattttttttcaaatttttattcaaattcttgtaaaataataaaaactcctggctttatctgtttaaaatgcaaaaagggggcgaaatccatcaaaaccagacacatattaacgattcttcatcagacttatggctaacctccgtgctcaaatctctcacgacgaaatggaaatggttcatttgggaaaacgccaaaaagaggcaaaaaaattgagggagcataacgaaaaacagagcagagaattggcacaattggaaaacgaatatggccatggtgagagaggaaaagcaaaggacaataagagaaatgataattggacattaagacgatgaacagctgaggagggccgtggccaaggtggacgcgttgaggagacaggtgaatcccttgtccgaaccaactccaaaaagggacactgtttcagctggaaatgctttatcagcatagggccatggccgctgatgcggcaacttttcaacagagacagataaatgctgaagaaaatgccgagaaaggcagcggacgtgtcgaaaagcggcctaaggcatcggttgtgccgtttaaagtgactgagtggcgggtgagaaggaaaagggatggaagaagggaattgtggtggattaagcaagggaacggtgaagagacttgcggataaacgaacgaagcggactttgaggggggcgacggacagtgccg

SEQ ID NO: 15945 - DNA, 2108 bp, Heterodera glycines
  unsure (1)..(2108): unsure at all n locations
caattaaaacgtcaaaaatgatgaaaaaaaatgcaaattaatagcgcacactgnctatagtaaatgtcggacggctcagtccctgttaaaagtggacacttaagtcncactttttacacgaaaaatggcaagtgcgcncntaattaacatttttctcatcgctttaggtaggccactttaaatcaattccgaccgtttttgagcaattttgagttttggatctcagattaatattttcctacaatcttttttgtttcgaatttgcgacaatttttattaaccatggattcaagaattgaaacccatgtaaaattttttattaaaaatcattttaaaccaatgaagtcgaagcgtgtgaaggaaggcggacaaaccctccattagcaccaaaattgaaaaggtcagaacagcaaaagcgaaaaatatgaagtaaagcacaaagtatccggcgacaccgaggtgaaaggcaaaagcatttttgaggacctgaaaattaaacaatttttaatgcaaaaaaacaatttaaaaaataaactgtaaaattactgtattttatttaccatagtccaaagcacttcagagagttgcgcatgggcaagtgaaagggcccaaagacgaaggtatgaagctgtgtgggacacacagccgagcacatattcaatggtgtgaattgactggtggaccataatgtcgccgaaagactaaaaaaaataatcggaattcatttgattattcgtgatttataaagagaccttaccaataagcacctattttgagaaatttagggattagggggacctaattgatatggctgggacaaatatttattaaaaataccgaaatatttaaatttttaaataaatatttacgaaaaaatgccgaaatattgacaaaaatattgaaaaaagtcagaaatattggccaaatttaagaaaaataaaaaaatttgtcgtgtaaaaaataattaactgctcataacattataaaaaattattcatggattacaattgcaaataatgatattttttcgattttttgaatgcatttttccaaaataattaaaattacaaaaattaaaatttgggtcaagaaaaaataaataacaaaaatggaaaaactttttaaaaacaattaaaatgaaaaagttttagggaaaatttttgaaaaagcgcaaaaaaatgaaatatttttttccaaaaatcaacaataaatttattgacgaaaaatgacacccaaatgaaaaaatttaatttgtcccagcccgactaattaaaatcaactcatatcatttccgttttttttaattgagagtttatatgtggccaatttttttatatttaaataataattaatttgacttaaaaatgccaaaatttctattaaatattttatttgtttcattctaaatattaattgacatctgaaaataaaatcataaaatagatggtcattttacattatcaattatttttcttttttttctttttggattttattcgtccatttttcaaattccatgaattccatcgccataataataattaatttacttcatcatgatgcgcaccgccacctgcaccactgacatggtcatgtgcctcgtcaacggagtgcacttcgtcatgttttgtcgcattgcgtccatttcgtatcacatgcatctcctccttttgcatattaatacgaacactctaaaaaataatttaataaaaaaaaaattatttaaataaatttatattatagccatcaaaatgagtacctaagtccaggttttggcctgttttgaccgggaccgggaaaagtcccggtttcccagccaaaaagtcccggttttaacccgaaaagtcccggtcccgttctactctagttgaaatgtatgctttgcatatttgatttaattaacattttgattttacgtgacattttattattattaggttataaattttatggactaaaaaagcccgaaatatggacgaaaaagctcaaaatggccaaatatggtgaacccaaatcgatacttaggtggtgtatttttcgctttttttttctttttcctatgaaaatttgccaaaaccccccaaaatatggctttatatggattaaaa

SEQ ID NO: 15946 - DNA, 2048 bp, Heterodera glycines
  unsure (1)..(2048): unsure at all n locations
aaaataaaaattctttaaaaatcgcaaccaaaaatgccaaaatgaaaacgaatgttaacattaattagacccccaaatgnaccaccactatatgatcacattagcctgggaaaagttaatttttatttctttaatgttccctaccatattatcggagactgcacgttttgcacgtcgctgatgcattaaaatgtggaacggcttgccaaacagcataatcgggatgcataggaccgcaataatgacaagaatagcctcgacaaatgactaagaaattttaaaaattttaaattttaatttttataaaattcacacctggccagggtaccattggtttaggtaacaaccaggcaattccttcccgttgtcgtcttgaaaaccagcatcgcgagacttgaacatgaacctgatttgggcaatttaatgcaattttaaaagatttttttatagaaaaaacgttacatgttgatgagaccaatctaaaaaaataaataaaaatatttattatattatatatttggtaaaataaatgagagatgcattttttggtaaattatgcaaataaattcccaatgctatttttaattgttcttaaaaaatttgattcaaatggtgcaaaaattttagtgatttggacgaaataatagatagtaccaatagagtggaaacgtcgcgcgaagaaatttatgaaaatcttatttttggggtctaggtcttagaagtggtcgtttgtgccaataaaaatttacgacctctgaatattattataaatgtcgtttttgtgaatataaataatctaaattatcaaaattcatttaatagtttttttttataatgcatctcttgttttcgcttaagttcattaaaaaaaattttcttaccaaaagtgaaggggcacagtgcggtccgggataatcttgagctaaaatgggaaaatattattttattccaataaaagacaaaataattaataaaaaatattaaattattttaaaatagatgctttttacttaaaattgttgtcggctccacccaaaagaacagccatttggcaattatttgaaggcacagataaatgaaaattgaggacatgaaaaccaattgaggaatgaacacggtgaacacttcaattggcgattcgaaaaatctaaaattaattgaaaaataaaatagaatttccaaaaaaatcatattgatggaagaaatattacttataattacgatatgaaagtgccactccgaaggtcatttgtgtgatgccaacaatcacactgagcttcattttcattgaattcaaaaagtttagcttattattatccgccaaattccacacgggatccattccaaactaaattgatcattaattaattcgtgctaattttattggcaattttttaattattaaaaatgtaatttaccggatatggtcctctagcccggtcataagcagtcatcggattcaaatggacctccatttccttccccgcttcttcgggtttactcagccatgaatcaatttcggtgtcactgcaaatttcattattatatattttttaattttatttatgattatttattttttatgaaattttaaattaattttttctcttgttttacttaaagaattttattttaaagttatttactttttttctaatatattgtatttaataaacattttaaatgtttttcttttttatttttctaatttagctcatgatttttaatatttattttttctaaataaatttacgatttgaagttttatttttgttattttattttttattaattttctaattcttttttttttaattttattttattatttttcaatttttattcgttttactatttaagttttttttttattaatatttcttttcttttacttatatggaatgttcgcccatgcgctgccaaaaatttggaacgatttggcaaacgcgtcgttgtacagcagaccggcatggatggagaacagtcccatcagcaaaatgatgtaacgaacgccaaaaaacatatgaaaatctaaaaataaaataaaa

SEQ ID NO: 15947 - DNA, 3047 bp, Heterodera glycines
gtaaatttcctttgctttttgtggcgcaattattgcgagtgccgccatcgcatttgccacgagtgtgggccgtgacgcgtgatctttggacaaacaatcgacgagagcatccaaaacgtcggctgagaccaattcgtcgatcagctgttcgtccgcgttaccttttagtagtgatgttcgagaccgaaaatttcccgagactcgagactcgagaccgagaccgagacttgaccccgagaccgagacccgaccccgagactgaaaaccccgagaccgagacccaaaaaacccgagactcgagacttttttcaaaaaattttcctattcgcttaaaaatcgtttaaaaattttttttgactctattcttaactaatttttggtttttttttattttgattcaatttggtacaatatttatcatttcaaaaaagcacaaagcaaaaaattagtttgtttttttcgcagtttttgtgtcaatttaaaaaaataaagggtattttggagctccggcggtgccgataggcgccgccggggaaaatttttaaaatttgagtgcaatttgtgaacaaatttagtactaaaaatgacaatattttatgattttaatttgattagattcacttaaaaaggaataattttgaaaaattggaagaaaaaataactacttggagggatactgatccaacgctaaaatgaagacatgagcaagaatacaacccactgagccacgcacactaaggtaatgaagcaaaaatataccaaaagtatatttatttctaacttacaaaaagccgatcattaggggtgtaaaaaaagtctcggtctcgagtctcgaaagtctcaaagaccgagactgaaaacccgagaccgagactcgagaccgagaccaaaaaaaaccgagacttttctcgagtcgagactcgagaccgagactctcgaacatcactaccttttagactgtcctcgagcatttcccgaattttagagattgcttcaagtctctcttctatatctctgctttttgcattcgcaataagctaaaatttttgaataatttgccgtatttgctgaattagagctcccactaatgaataagaaccacgtcccccacccctcaaaaaaacctctttagacgagcgttaaaaataaagtctcccccaccaaaaaatatatttttaaaattaaaattctttaaaattcagttgcagttttctctaaataatttttttgtctttaaaagtgaatttgaaaaaattagcccctccctgatttagaatttagagttctcccatggaaatacccccccccccttttcaaggagaccaaattcagtaaatactctatctcatatcccagccaaaatccgaacattgggcatgattttcttcagaattgagacagcatttttcttcacttcgtcgtccgtcgaattcattagccaataattcaaataatccataacattttgtatttcaaaaacaagcttttcttttcgtgtcacaatgattgcgagtgccgccatggcatttgccatgagtgtgggccgtgacgcgtggtctttggacaaacaatcgacgagagcatccaaaacgtcggctgagaccaattcgtcgatcagctgttcgtccgcgttaccttttagactgtcctcgagcatttcccgaattttagagattgcttcaagtatctcatccttatcctcgcttttcgcttttttgacaagctaaacattgcaattatcattttctttttttaaattgtattctaatcacttgagcggggtccgcttcttccatttgcttaaaggaagagatcattaagtgattaataatggtaattatttgattatatcactttttgttgttgactcatccgatttgttggaattgcaatctaaagaaacaaaaatcactgtaagctaaaaatatttttcatttgttttactcttaagttacttgagtacggccaccagcgttttccactatgaaaactctcttaaaagaatatgtaagaatatattttttaacagttaaatacaccaagaaaaaatttttcggaaaattattcttttaaattgggcattaaactagagatgtgattattggtcaatgaattaaaaaaattctcatttggctcaaaaaaccttaaagaaatgtgaactggcaagaaatccgggttgatcggtaatcctcaaatcttcattttgaatttttttatcaacctaccaaaaaaccacaatatatttatctaagtcatcttaaatcacatctctatagtgaaccctttttattttaaaagtttaaccgatttatccttttttggagccgaaaatactgtgggaataatgaacgcaacacaaagcaaagttagcagtcgcatgtcaagaatttaagattgatcctaaatagagaccaaaaattagtaacacaaattaagcacttttcgaataaaattcataattcacttaaattagtaatttggttccaactgattagcacttttccaccaaaattcaaattacacttacttttatattgaaaaatttttttaaattctttattctgttgaaatttgggacctgcaaagtgttttttctattcaatatactgatgttcctctttttctgaaataataaaaggatgaccatggtcaatgccattcataaaaatttaccaattacctcggattcggataagattagtcttaaatagggtgctgagtcgttaataaaaaccatgaaaaagggcgttgtataaaaaaccatcaaataaagttatgactagagaccgacttttgaggcatatgccttttttctgcgcactagttccgatatattaagcataaaaaacgcattttccacttcgtttgaggcttctacgttgacttttattatgcctttttttgcctttttcgggattttcgtgccttaaatgccttttttggcattttgcctttttggtgcctttttgggcgttgtttccgaaaaattccattaaaaatgcaataaaatcgggaaaccacaccccctaaaaatgacctgaaaaaat

SEQ ID NO: 15948 - DNA, 1038 bp, Heterodera glycines
  unsure (1)..(1038): unsure at all n locations
aaaaaaaaaaaaaaaaaaaaaaaaaaagcggctttttttttttttgggggggggggggggggggggtgggaaaaatttttttttttttttttttttttttttttttttttttttttttttttttttttttttttttttttttttttttttttttttttttttttttttttttttttttttttttttttttttttttttttttttttttttttttttttttattttttttttatttttttttttttttttttttttttttttttttttttttttttttttttttttttttgatttcattttttttttttaattttttttttttttttttttttttttttttttttttttttcatttttttgttttttcttttttttttttttatctttttttgcttttttttgttttttttctgatattttttgatttagttttttttttttccttttctttgctatttattttttttcatttttttttcttttttatgttgttttatttatttatttttttttttttttttttttttttttttggaattatttttttttttttttttttttatttattttttcttttttttttttttttttttttttttctttcatttttttaatttttttttttttttttttttttttttatttttttttttttttttttttttttttttttttttccccttttttttttttttttttttttttcttttttttttttttatttttttttttttatcatttttttttttttttttttttttttttttttatttaaattgttttttttttttttttttggcttttttttttatttttttttttttttttaaaaaatttttattttttgtttttttttttttttttttttttgatataataaaatttttattattttttatgattgtattacgatttgcttttttttacgattttcttgtctgtacgtatanattctttccatagttttttttttttttttttttttttttttttttttttttttttttttttttttttttttttttttttttttttttt

SEQ ID NO: 15949 - DNA, 960 bp, Heterodera glycines
aggcgtcccgcggaattcaaatgaaattggtggacagtccaaagggaatcagcggaggaggaggaaaaagggtccaaaaagtataaaatgtcggagtaaagagagtcagcaaaggccaaatctgaaaaggaggaaagaaaagacaaaaggaaggacaaaaggaaggacaaaaggaaggacaaaaggaaggaaaaaggaaggacaaaaggaaggacaaaaggaaggacaaagggaaggacaaaaggaaggacaaaaggaaggaaaaaggaaggacaaaaggaaggacaaaaggaaggacaaaaggaaggacaaaaggaaggacaaaaggaaggacaaaaggaaggacaaaaggaaggacaaaaggaaggacaaaaggaaggacaaaaggaaggacaaaaggaaggacaaaaggaaggaaaaaggaaggacaaaaggaaggacaaaaggaaggacaaaaggaaggacaaaaggaaggacaaaaggaaggacaaaaggaaggacaaaaggaaggacaaaaggaaggacaaaaggaaggacaaaaggaaggacttactcggattgagagtcaaaagtgaggacgaattggaggaatgacaaagggcgaagtgacggagggcatttcgcaacgaatacctaaggaagaagaaggcaaaagtcaacaggggaagaagaagaaaagaggaagggaaaaaataaaatttaaaaaaatggaaataataaaattaaaatgcgatggaatggaaatgccctctttttgctttgcctgaacagttccgtgctgtgagcgatcaccgaaaatggcacttcgattgggagaaggcaaagtttgtgggccctttgttggagcagcagcagagaggggacgcgcgagttcaaagaccacagcaaattaattcgcgagggcgcacaatcggagacggacgaagagacggagagagaaggcaactgagacggacagac

SEQ ID NO: 15950 - DNA, 2879 bp, Heterodera glycines
taattagcggagattggcgacggcggcggccgcggtgggaggggggaggggggagtgatggatgagagtggacaacgcgagaaaaatgaatggatgaatgacaaggactcatcacccaatggaaactgacaaaaaccacaacaaactcttctttgaatgtgatgccactcactcatcatagggccaataatgcccttggggaaaagcaaagagcgaccattgccggggggggggcggaaaccaaacaaatcccaccggcggaaaagggactaaaatgggacgtaatgcaaatacttttgggggaaaatgacggaaattcaatttttaaacgggctaattttatataaaaaccgaaggatcaaagcggcaaaaccgacgcattcagcggaatttggcaaaaaattttgaatattttttaaatttaaagaatgccaacaaatttgtttatttttcagttattagcacattcacacccttcattaagttcttttcttaaaatattttttggaatgtttggaattttggagatttgaaaagcgtctaaggaaggggggatataatatggcactcagctgttgtgtatcccctggggaaagggggcaaaaagtcggattttgacacccgccgaaaagagaaagtgcaaaaatgtgcacaaaaagacgaaaagcgaaacaaaggcaaaaaacatctcaattggaatttaaaaattgaaaataaaaggaaaacaatttattgatttggttgttaaatgacacgcgaaaagtgatgacattccaaggaaaatccgcaacatttttttgcggatttgccaaattgcattttggggagggggaggaaaagcgactttccttttttggttgggaaagaaatgcccaagaaatgacggcttatttcggcatatttatatattaaacaaaagtgattttattaatttgaaaggcgcgttgaaaattttatataaattaaaattataattatggcaattaaattttaaatttctctctctctttttgtcaattagttctcattttcacactgccaccagcatcgccttcagcaccgggtcgggtcccttggccgttgtcattgatttggccaatttggcacagctttggggcatccgcagttcgttgcccgtcagaatgtgccagtccagcagatcagccgaatgccattgcacataagtgcgtaccaattcggcagccagcgtggctgggcccggagggcaaatttgggctgaaattaatgggtaaagtttcgaccgtttttatttttttggccacaaattggccattgtgccgtggtttcccttcgctttgtttactcgcaatttgctcctggcattggctgtagcagtgctgaaatgcgcacactctgcccagctccctctcgtacccgtccatttcgtcccccgagtaaactttgcccatttcagcgcccttttccctttccctttccttcgccgcattttcagtcccttccttcggcggatggcatttctgatcacagcgcagaaaggaaatgggctcactgtcctcgagacaagaacgagcgcggaggaaatgttgtcgtttgaaagtgcacaaaaagttggacggggaaaagacgcggtcggcactctatgggaaaggggggggggaaagatagaacaaatttaaaattaaaaaagtggggaaaaatcaaatggcactctcttggaaaaaataagaatttaaaaataaaatataaaaattggtgaaaatggtcggcactccatgggaaaaagggaaaacaaaaatatttgtggggaaaaagcaattagcattttgctggaagaaaaaagacaaaacagaagaatgtaagagaaattgggagacaaaaagagggaaagtcggaaattaaaattatttattaataaaatttaatttttaaactaaatccattaatcttttaatcccccccccctcctccacctgatcccacctgatccccacagcgttcgatgaaacattgcgtctgtcggtcggccaatcgacagtaggccaagaattggccgtagtccaacactttgggatggaacggaaagtcgtaaaagtcggaggcattcatggcgaactccttctcaaaatcgccactccattctcgattgcacgccttggggggcaattagcaaattatgtaattggaaatgcaatttcaatttcaaaatgtcgaaaatgtcatttccaatgactttttctttttcccttttcccatttccatggcaacaaaatgcaaaatttcttttgtaaaaaagcacacatattataaaatgctttttggaattttctgttcaattttattcactttttccgacatttcttcagccaaaggtaattaaagaataaaatccaataaaatcccaattaaattaaatcattggcattttcactttttgtttctcagatgcgattttgtcccattgtgattcgcaattgcaaattttgctgaacgcaacgccaaactttgcttttggcgctgaacaaaggaagtatacggtgttttgccaattaccgtacataattagaaattcaaaaatattttccaatttttctcatttagacatttcgtcgtactttcgtcccattggccatttgatttgttgggaagtttcagcgacattttgccaaattgtgccacattttgcgtgggatgttccgtcatatcaaaaccaatttcggttccgttacgataccatacgatagtccctcatttttttccattttcgctttttagacaatttcctctgatggccattcgctcacttttggctgtctcaattccgaccaatcgtcctttaccgtactatccgtttccctaccaaagccctatttggttgttttgtccctctaccgtaaacc

SEQ ID NO: 15951 - DNA, 3262 bp, Heterodera glycines
agcagaggaatgagtgtcgccgctgccgttcccgcgcgggtcccccgggctcggtcggggtgctgccatgcctgtgccatcgctcgggctcttcggctgagttgtaggcgtcgctgaatctcccgcacctctgcacgtgcgactctcgctcccttccgcactttactctcgatttggttcgccgttggccttgggaggtgtcgtcctgtcgcccagttgatgaaagtgatggggtagctgactccccatgcgattgctcgggagaaaagtgtcgctcccgaccagaatcgtgaggcaattgagcaacagcagcccagcgctgccagcattagtgctgcgccgaacccgaagagggtagacgcccacctcggattgcacgtcgggttggctagctgttcccagcagaaggcgcagctgatcaattcgcactctgccctcgctgggcatcgctgtgtgacgttgaccggggggcccaacccccgccagcattggccgctgcaggagtagccgtggatgagcatttcgtccggtagttcgtagttgatcactgtcgacgtcggtatggtcgtccagcaaccgtccgggcagcatatttcgatcttctccattagttgtccgctgactgtcctcacaccgcgcctcgtgcactgcatgtggcatggcagcatcgtagttgacattcctggctccgctggttcttgcggcgctgctcgtagggtgggctgacacgcccatgatggagctgggcagagcagcgtcagcagcactgccaaggcgaccaggggggaccggcgccccctttttcgtggtacatgacgctccggggaccaaactgctcggtttctccgagtcctggtcgatttcctgggttcaacttcaggtactgcttgaactccttgggtgtcttgttcgtcgtgtacttcctcctctgggttgttgggagttctttcgaattcgttttgttgctgttcgaccgctgttgcttcgggaaattcgtccccgctttcggctgtctgaactgcttgaggtccgtctgcaccaaacctatctccgccttcagatctcgtcggattcggctgaaactttgtaggaacattgaggagacctggggccgtcgaactatctcccaaatattttttctcatgtctcggagccgaatgcgggtgtgccaaaaatcccgtttctcctggtgctgccgaaggcacttctgccgctgtttcgaaaactgccattttctccgtcgccgttgcgtcgtcgcatttctcgtccggatcgtcggggccattccccagagaattgtcgttccgaatttctcgattgacccttccgtcgggctgtacagcttcaacttctcgtcctcgcttttcggcactttcttcgctcacatttccttcattttcttcttcttttgttgctgccgagagttcgttccgactcctctcttcgctctgagtctcaactgcccgtgcgtcgtctccgcatggttcatgtactgcttgatcagcttggtcgtgcatttttggcggtgcttcttccaatgggcaaattttattcactggtctcccccaaattcttccgttcgccattctgatcagcacgctccgaacgtgcccgtccgatcctctgagttcctcgattcggcccatggcccataggttccgcgggtgaaatttatcctccaccaaaaccatgtctccgaccttcggtgtcccgggtgcgttcaccctccgctgagcatggttccatccggctttttctcgcaatgtcattaggtactcgcgatgccatcgtcgccaaaaatgttcgagtcgttgctgtgactcccgccattgcctggctagctgcttgtgcggcgggtcccgccgttcgtcctgtgcctgaccagtcgtgtcgggtgggtccacccaaagccgcccattctcttggatgaagtcgattgggcggagcgggagaggctctcccgccgtgctgttgacgtaagtgattggtcgggagttgaccgttgcctccacttcagcgagtaacgtggcgaagctgtcatagccgagcacagcactgcccagcgtcttctgcaaagctcgttttacgagctggaccgctcgctcaaatatccctccggcccacggtgtgtgctggggagtgaaacgccactgaatgccacgggagtccgaaaaatgccgcggatcatctcccgccatgccgaagtcggacagcgtttttcccatcactgtgaaggtcggggcattgtcgctgagaatccgactcggggcaccccggcgcgcgatgaatctccgcaggacggagatgaagctttgtgccgataagtctcgtgttgcgtcgacgtaaatggctcgcgtcgtcaggcacgtgatcagcaagacccacgtcttttgtcgttgtccgttcgcgtcgagggtcacagtcgggccgaggtagtcaaggcccaccgattcgaatggaatgcgccgccgaactctgtccataggtagctgcggcatagtcggtagggggtagggcatcccccggagtcgtcggcactgcctgcattggccgagtacctttcgcacctgctgccgtgcgctcggggaccaccagtccctcaaaaattcggccagcgttccgtctacgccgagatgatgaagccgcccatggatgtcgccaatgatgagtgctcccgcccttgagtgtttcgggagtatgactggcctactgacttcggcctccgcgcaccagccgatccgactgatcagcctggttactccgtggccgtccacctcggtccgcatgccttcccgtgtttggcattcgctctgtgctgaacggaggagctgccattttgctcgcgccaattcttcgttgcttaggacgggcgggcatcgcccgtgactcgcgctttggcaccgcgggtcgcccgtgccatcattaattttgcgatgtgtccttgcgatgaaccgtcgcatccacgccatgacccgcactgccttcgtccatcgccggaccgattgagtagccagtcagtccgttctgtcgacgcttcgggggtttcctcccgccgggcaacgaatgtggtcagccctcgttcacccagcgagggcccctcgtcttccgagtccaatgtaaaagtaagttccttgggccaatgctcggacggcttgatcagccatgccggcccgttccaccagagcttggcttgctgaagctgtgcgggggagaacccccgaaggacgcgtcggcgggattgtctcctgtcggaacatgtccg

SEQ ID NO: 15952 - DNA, 1088 bp, Heterodera glycines
  unsure (1)..(1088): unsure at all n locations
cttatctcttcgcctgtcccttatctttcgctttctctatccctctttgtatctccctctctgcctctctctccttctcacgcactattttctcactgatcaaatacctttttttgcttttaagctttttcatgtgcccgttctctcccatccaattgatgagtgggcgtttttgtggtgctataggattagagggagaagcatcttctgttcccatggctttggaatttttaagcatggataagcaaagcattatttgatcggcaccgcggggtaagccgatttgcttcataatcgaaggaagaggaaaagcatttgtcattcatggtcaggggctttaagccgctcgatcacatttcacgaagaacaaaaacattcggcggcttaacatttgcggtttgatttcggatgaaaattgatatgccccctaggcatatcacagagtccgccaaattgagattaaagctttatcaaaagcaattcaaatacatcatattatttgtatgtatatgtgtgtgatttataatacggcaacgatataagtttaaaacttaaattgcaaaaaaatatatatagaatacggtatatatgtaaaaaacaaaaattctggcatacggtaatcgaatttttttgtaatgggattaaatatagtgacgatgctcgagaattgcaagcctggaatggaattgagctaatcgcgtgcataattaggaagacttctggccttaatactaaaataaggaagtttgatatagattccaaaaatcccacaaaatttggcattcttgcgcgaaaaaatcttaaatagtaataaaataattgagaaatgagtatgaaaagaaagacgaaaaatgaacaaaaagtaatgttttgtgatcgggaacggcacccgtttgttttgcatgcagagaattttttttaaatacatttgaaatttaaattaagtttcgaatacaaataatattattaagtcttaatgtgccttcgaagtaaaaaaaatgaaaatgtgattaaagttatttaaaaaaattctctgtgaataattanggtaattagcgccatccattaaggtcaaatagtttagggga

SEQ ID NO: 15953 - DNA, 1222 bp, Heterodera glycines
aattagggtaattagcgccatccattaaggtcaaaacattttaggggaataattagcgccaaaattcgagtgtcccaaaaaaaagttggtccatttgtcacaccacactggtcgcaaatcgttctgtgccgtcgccgtccaattgcggcggcacacccattttgtctccggccatatcagtaccgctgtgtttgccttgcaccggcaatggcaccgccataagatcgcgcccattgcgccggcgccattcatccgcctaaaacgtatgtataaattgtatttagaaagatcgaaataaattacttatatttacaaataaaggtcccaattagagattaaaaaacgggtattaattagttttctacaagtctaaaagaaaattaattaagaaacctattaagcgggattatcaatttctagctcaagtgactgccaagctgtattaattatgcaattaaaattaatgaaaaaggtaattaagcgtaattatctatctaagcccaaatagaattttcattcatactaattatgcatttaaaattaatttaaaatttcaattaagcgtaattagcgatctctagccataataggcattttatttatactaatttacatttaattgaacaattaataaaaatattaatgtttagtctgataaaatagtacatcattaatatttactactgctggtaaccaatgaataatattattacagccataattagcgcataattatacatattaaacaaattttgtggggctgacaataccaattaattactattagccacacaattattacccttattacccctttccgtgtcaatgtggcacaatctgttgtggtcgccgatggcataccaccgttgctgccgacgtcattcattagtgtaccaatgtctccaccataagcagttgaagcagcagcagatgatgacgcgttgctggccgcactggccacccgactgtcaccgccgatggtcacctacggtaagaaaatgcggaaatgttagggttacggtatgttttcctatttctatggggaggggggctttatttcaggagggggggggggtgggctctaattcggggggggggaaagctggattgagtcaattgactgaccgaactgctcggcgtcgatgtgccaccaccgttcagactgctgcttgtgccggcgccaccattttcaaccggagccgtcgtcatatttgtcgtcgac

SEQ ID NO: 15954 - DNA, 2026 bp, Heterodera glycines
  unsure (1)..(2026): unsure at all n locations
gttactgcttaccacaaatgccgcatagtcattgttggcattcccattaattgtgttgccatttgtggcactgttgccactaccaccacaaatcatcggcatcccattttgatgctgttgctgaacagtatgatgatgatgatggtacagttgatatgggcgctgtgagtttggtaaaatatttggaaaatcaatgattttttttcaatttttacacagtaaatcagggaaaatgggattttgggtaaaccccggaaagggtttcgggattttagagaccagtacagggattgtcgggccaaaaatatatttactagggattgtcggggcaaaatcccgtttactgatcaatgagttgattgaaaactcgtgccgtcttcgcccgcgcggagttctcccgttacacccggttttaattcttcacacttttggcacatttacttgctgctgttgctgaatggtggtgccaaaactgatgccgccaccaccgccgccgccgccagctggcatttgtgccactgatgatgaatggccggatggcagcaccggtggcagtgatgccatccgctggtaaggcggtgcggccaatggcacgtccatcgactcaggcggtgactcatcggtgatattattgatgttgttagtgttggcaccgccgccaaaattttgttgggtttgacgatggccaagctccggagtacggtatgcgtccgacgtatggtagccaatgtccgaaatctattcaaaatgaaaaaatatatattccaatagcgttaacccggttaacccggggaaagcctccggcgcccaactgagtacaaatcgcgtgtaacccaccccaactgctgcaggggcatagtccgccgcgcgtacaaaacgccgctgtggcgaatgtgtgttcggcactgagttttgcaccggcacggcaccgcgcagccatgccggaaggtcctcggcgggcaagcagcttttcagcacttggcgcatgatcgctggcttggccaccgggtcgtccgtgacgaacagcttaaaatgcgccatgttagtctggcacaggcacagccactgccccgccgccggtggctccgctgcttacatcggcgccatggaccagcagcagtgcgcccttcaactcgccgggcgcacggccgcgcaccgcgtgcccgccgtccgccgttttatgcgcgtcctgcagtccgatcagctcgtgcgcgtcgtaatggacgcggaaatcccagcggcatttcaccgtacaaagaagccaaagcaaaatccagctgaacaggtagaccaggtcggcaaccaggcaccacagcagcaacggacgctcctccttctggcaaacaaaaagggtggcttttatacggaatttggaaaaaaattgggagccctgaaaatttcgaaaaaaattccgggttacctacccgtccttcacccgaggggcaggcaattaattgttatgaaaaatgaatgcaaaattgggtttatccagtttggtgtccatatccaaagccaaaaccggtcatgaggggggaggggagggaggggaggatttttgtgagtctcggaaaatcgggggcataaaaattgaactacgtgcctttgccagaggggtaattaatttttgaattttttcttttccaatctttggtacatttccagaaaattgcctgataaatcaatccgatggcataaaaggcgggtgctttgatggccgcgattgttagcagaaggacaatggccaacacgtggggtgtatatccgtcacagatgatctcacgcccataggaccaaccaatcgaaaaattaaaataataataattaattaattaattatcctaactaatagagtgctgatagagtgatgaattgaaaaacaagtattccatcaattagttaattcagtaattactattagatgctataatagagtggtcactagaaaatagtttcaattcaataacttgaacctaaaccatgggagggatgattaatttttaaatttaattattattttcgantttat

SEQ ID NO: 15955 - DNA, 3099 bp, Heterodera glycines
attattagggacgtgaattttaggttttaactattttttttgctcaattgatttgaagaaaggagctcaaaaaacgcatttccgcataaaaatttttcgattatgatgtcattatcggtcactagaaatcactattttgggattttgtcactaaaatagtgaaaattcactattttggagttttgtcactattttttcactattttgacatttttgggcaaaattccttaacaaaaatgcaataaaaccaaaaaatacacccctaagaatcgacaaaaaaaatttcaaaaagcactcctaagaaatgaaaaaaattttctcaaaaaggtattttcgtggcaagaattttaattttaaaaattattttttttatgtacctattttgtttttttgcccttaaaaatcccagccctactcatttgcaatgcaatcagtgaataaaaattatttttgctcaatttttggctgaaaattatgtcactattcgtcactatttcggactttttgacactattttgtcactattttggcatttttactcactattttagggaccaggtcgttttggcgccgacgttttggcgccagggtcgttttggcgccgacgttttggcgccaagccaaaaatgaaaaaaaaaaggcaggaagaaattgtaaaaattataaaaaatgaaatttttcgttaaatataataattaacaaaatgaagaaatggaaacaatttatttggtagaacattgaaggtgccaatgagaatgtgccgtctccgaaacattctttcattcgatcagcccaccggccgaagctgtccttcatgcgttattttaggcttttgttttttcgtatcaatttgacgattcattacctaaatacaaaattaagagaacataagccaaagcgaaaaagagtaaatgaagaattaaatccggctctttgatagacttcgtcagaaaaattataacgatttcatcatttctacctcctctctacatgccgccaaatcgtcggcgccaaaacgttttggttgttttaatatattttagaaaatatattttagaaacaaaaagagaattttgaaattttttattttcgattttttgttcgaatttcggctcgggttccgaattggtcgaaatggatgcctggttagtaagcagcgaccctgaaaaccattggaaacatgttttcatgacttttgaaaacaaaaaaattttcttcaaaaaaggggggcaaccaaccatcagcagtattaccttcgcgaaaaatacgttttttttttgttgttttacaaaatttttaaatttgggtgtttttcttttttttattatagcttggcgccaaaacgtcggcgccaaaatgtcggcgccaaaacgtcggcgccaaaacgatacggacccctgtattcgcccagacatttacaaacaccccttttcccaaatttgctgacccatttttatatgactcacgtaagactaaatctaagaaagtttaaaataatattataaattttatataccgttgataaaaattaaaggagcaatgtttttatgatcagaaacacttaaatttattttcaataaaaacaaaataagataatactaattatttaataaattttacatataaaatttaaaaataaaaagcatataataaaataaaaaaataaaatttttatacgacattttcaaaagcaaattacacttttaatttaagaaaaaatgaatcataatatatttagatgaatatgaaaaccaaaaaattgattaattcaaggctaaggaaggatatgtcattttcgttaatctagaaaacaaaaatgtccaaaattggtcataggaaaaagaaaattttttttaaacaattaattatttatttctagaaaaaaagtaataaggaaatttaatttaatttcacaagtgctactataatacgcaaaaaataaaaagtaataaaattaaaaagttaaaatcaataaataacataaaatcaattacttaaaaatcagtcaaggctataacgataaaaaataaaaccaatgagcgcatttaggtagatatatgaacaacaaatttaaaaataagcgacttcagaaattaaatattcgatttatttttgtattcattttaattataatatatgttaattttttaaaaagggacacaaaaatttcattacagcatttacaaaaaccaatttttgacagctaaaaagaacttaaaataaaaaaacgaagtctcggctatcaaaaagaatatcagggaagaaccggttcaaaatattgccgcccgtgataattagaattaaaataatttaacacaaaataattgtatataagagtaattaataaaaattaggaaatcataaataagagtaattaactaaataattagcataaaataatcgtaataaaaataattaataaaaaaattgcataaaataacgtaataagagtgattataaaataattagcctctgattaataaaaataattttgcattcaattttatcaatcaccgcagtaacaaagttattcacaatgaaaattcctataaaaagcaaactgcattataataattaatatgaaaaagttaaacataatggattaaaaaatcttgctatattcaaaattgaaaatgtcgcaatgtatcgtgatggtgattcagtaaacaattattattttattttaatagtaaattttaatcatttatctaatttatatttaacggccaatgaatgaaaagatttattaatataataaaaaaaacatttcataacgaaatttttttttatttatttttaattatgtattcatttaacgtggctgaaatattcgacatattaccagcaggcggttaattgagtatttggttattcattaaaattatcataatctgtaaatatataataataaatagaaaaattttcaaaataaaattcacaaagagaatcgatttcagaaattcattaaatacgctttttataatcttcattctttgtgcttttttttattacatacttaaggaaatattgcgttttggggggttttattcgccaggaatgttagcttttaccggcattaaaccttataagatttgcttg

SEQ ID NO: 15956 - DNA, 2325 bp, Heterodera glycines
aaaatgggcgtttcgcgaaaagttcaatttcaacaacatttagcggccttatcagtacggttcttgtgatcaaataatttttaattatttatttctcggttcgatattaaataaagtatgcttcataattgagttcggctattaaataattcaaaattaatctttatttactataaaatgaggaaatttcctgatgatcacatatagaccacccaaaaatcaaaataatactaaacgaattctttaaataattaatggttaataaagaataaaaaattttatcttttgtaccgtgcgcgggtcaacggttgggcaaaagtaaattatttgaagttttcttttcttctttataatttgctaaaaaaatttaaaataattttcacaagaaccgtattgctgaggccgctgctcgccgattaactgcccgctcaactgactcccttatccagagaatgctcccaattaaatagttggacttatgggacggaatgggaaaaagcggggataattggtgtgataaagagatttaaagatggatgtgataaacagcgctttacaggtgttatgcttgaatatgaaaatgagcatgacctcgagccatttattatgacatgcgaatggcaccgtgaaagcaaaagctgctcaccttcggaagaaacaaaacaattttacattcaaaatagcggaaggaatgatgatgatgatgattaggaaaacctttcagttttgagcgcttcacggttcagcgcccaaatcgaagttagggcacaaaaaaatcttcggtaatacgccggtttggtccccccccccccccccctctaaatttagcttctttaagtcaggtcaatataggaacaaaagtgagaattttcaaaatgttgaattttcgactttttgttcgaatccgggccaggattcgaaattgatcagaataaatgtcatattcgtgatcagccatcctcaaaacccttaaactgacaaatctatggtttttttttgtaaaaaaactaaccatttttgaaacacgagaattcgctgaacttttgagcgtccaattgatttatgcgtgatattttagactgatttgttagttcggaatgagattagtatttatacaaaactcagatttttgtaataaaatttaggtccgcaaaaatttggaaattttgattaaagttccgattgttgtcactttattcattagttttgtgtattttgttatacctatttatttgttctattcagttaaagttttctatttcggcaattatgctcagaattttattttgcacttacacattttctcgagttgaatcaggcagaaaacggtgctggaaaaattttaaacttaaaatgtaaaaaaaaatcaagtcttacagatttttgaggtcctctcatcattatataatgtatagggttgggaaatttaggtaagaaaaatcgcgaaataggtatttaattagttacaaaaaaaaagctaaaatagttattaaataggtacaaaaatccagaaataggtaaataaaattttttattaacgattttttagtagaaaaagcaaacaaaaggtaaaatggttctatttctttataaaagaataattaaatattaatatttacattttaaattaaaaattttgtcaataaaaaaataaaaattttggtggataaatttttgagcaaattttccaattcttagggatgaatttttgaaaaatttttggtcgattcttagggggtgtattttttttcttacagatttgtgagctcctctcagcaggtcccggttgggcaccgggaaaagaatgagagtcttaatgaggctttttgtcagaaaattagtgaccgaaagtcggtaattttccagaaaaaattaaatttaaattattgtgttccacggtcccggttttgcccaaaattctcggtctccccaaattttccaattcttagggatgaatttttgaaaaatttttggtcgattcttagggggtgtattttttttcttacagatttgtgagctcctctcagcaggtcccggttgggcaccgggaaaagaatgagagtcttaatgaggctttttgtcagaaaattagtgaccgaaagtcggtaattttccagaaaaaattaaatttaaattattgtgttccacggtcccggttttgcccaaaattctcggtctcccacaaacctatctattaatattaatgtattgtataacattaaatcatcaatatgtaggatataaaagattcatatgcttattaaacaattccaacgaaaacagtgaggaaaaatttatttttaaaatttaatttaatttttttct

SEQ ID NO: 15957 - DNA, 1968 bp, Heterodera glycines
tgcggctgccgctgctgtggccgcaaccggctggcaagcagtcccaccactggccattgtcggcggcggcagaagcgcacgcaggcaccgcggccggggcgcagccgtgaaatagggccagctgccgatgccatcatttttgggtccggaaaaatggacagtgcgcggaacgcggacggagttgcgcagtgtcgtaatggtgggctggcggcgatgaagccctgctgggggcgtggtgccgacgataccgccggagttacggtagttgccggaggcgtcatgccagcgtcggcgagttttgcgtcaagcaagctgttgttgccaaatgcacaggtcggctgtcgaaaggctgcttaaaaaaagagttttgctgtcaagttaaaatttatggcatatttgcagccctaataactctatacagaaaataataagcattccactcgttatggcaatgcaatgattattttcacatactgtaagccaaatattacggtaattaaacgtatgtctgcgatgttaccgtacttcgattgctcatcatgttgttgccgttcaacagtgcaaatgaatgcagcgatgcagcagcgggcatcatgaacggcatcattggcaaggacggcacggccactgacagcggggagaaatgggactgagatgatggcggttgtccggtgccattttgttgctgcaacattgtcggcggacatctcagtaactgcggttggcgtgccgcggtcaagaaaaaatttggatgcacaaagtgtggcggtggcggcgcggatttgaagatgccattccggtgctggacttgctgctgttgttgggcggccttcttcagctgtcccatcatggcatccaattccaaattggaacgcaattttcgcggcacatgttggccttaaaatttaaaattttcgattttttatttaaaaggttattaacattattatttttaaactattttttaaaaatttattttaattattcaaagcatttaaaaattatttaaaatatttctgcaaattaattttttattttaaaagatttctaaaaattaaattatctaaaattattcaaaggcttttatatttaaatatattttttaaaatttcttgtacatagaaaataaaattttccgtgaaaataaattcaaaaatatcaattatttttcgagattctcgacggtatcgaagaaattaaataaacaccgcaccgtttaaatggtatttaaccgaggcattgcgcgagtctctgggtccatccacggtcactttgacggcatttggcacaatagcgacctgaacagggtgagggtgagggggtatatataattttaattttcgattttccgtaaaaatgtttgattttttttgcctgtgccaacggatgcgtgtgcagagtgatggtcaaattgaaatttttgccgcgaccacttttgccgacaaagcgcaggtcgctgaagcgtgccatttggccacacacttccgcttggccattcttcacctcgcccagccaattctcatcattgccagcattgacggtcacacgagtgccgtccggcatcggaaaaagtgccaaaacaacgaaaggagttggcaacgacttgttggagcttaacaacagagaagggggcacatgtattgtggaaaaatatatttttgccgaaaattttcgattttccttgttggtaccctatcgaagagatacctcacccaaatttttccgaaaatctaaaatttaccaattttctggacaaaatctgttaataaatttcactctaattctcaaaaaaagtcgacaccacaggacccctctatttcccaaaagttgtttgtaaaaagggccgcaaaaaaaattcgtcgcccggggggggggggtgggtaccactcaaaccgaaaccctgggaccgtcactggttattggcagtgtaaagggtggttcgagaatctcgtctccaacgcccaaggt

SEQ ID NO: 15958 - DNA, 1183 bp, Heterodera glycines
ccctccccccctccactaccgtacaccaaccaaccactcaaccaccgccaaaaccacccctcccattcattgcacccgccccgaaaatgccgcaggcaccgcctcaatttgtattttgcgggacgcttctttttgctgtgccgcgccatcgcgcgctgctcgcgggacgcgtttctttgcatgcgaataaaaacggggaatgcggggtcaccggacggggaaaacaattagaaattcccgtttttgccttacatatgatgtgaaaattgaagagcacaaatcgcgttaatattatttgttatttcgtgaagcgcttgaaaattagggttttaattgcctgctgctggaggagagagtcgctaattagtgttaattatttttaaaatttaatataattactctttgtgtcattgatcaacccccgttctgcttattctccatctaattagggtggtgtgtgtttaagaatttatgcaaaattccccccaaatttcgtccagcccatccccccccccgcttttgatgtgtcagtgtgctgcctgctgcgcccgcgagacaacaaagaaatgagcaaaaacggaacaactttttcgtcggcgtcgtcgattgggggctgtggacaacgcgacacgacaactggcgggcgggcggggggggggggaatgtggtggcggtggtggccgcggagcggagatgggacacggcgataagcagcaacgaaacagcgcgagcaaatggcgaaaagaccaaaatgatggtgatgatgatgatgctcatgatcatgatcatcgccggaggggagcgactatcattgaattggacacacattttgtggggcgcaatttgagcgggggggggggtgggcccaaattccaccctgggcctattgagttcccgaaaaattggtaatccagcaggaaattaggaaggaacatcttcaaaaatttaaaaaattaagattttgaagccagccgactcaaaatttggcgctaaatttgctatttgtgtgctgcgcaaatgggcgccgatagtcggcggtagaggggcggtacaacaaccaccgccgcaaatatcgccgcgatctgatcgcgcccgccaaagagggcggggggggggggacttgttggattggttaaccgtggtccgaagaccaaccaaccaaccaaccaaccaaccaacaacc

SEQ ID NO: 15959 - DNA, 1866 bp, Heterodera glycines
aaaaattaaatcatagtaatgaattattttaaattaataaagtagattattaaatataaaaaatataaaaataatattcttaaaattattataatttttcttttatttacccaaaggtcatgcaccgggttgaagctgaacggcaccttcaatacgagaggaagtccagcatggcgagcccgtggcaaaatttcgtgcatcaaatactcacttcaaaaaaaaagaaagtattttcaaattttttttttttgccataattttgttggcgaaatgctttacatattttgtcggccttcatcactcaactccaaatacatgcgcgaacgctggatatggccttgcgaaatgtacacatcggatgcgaatttgtgaaattgtttagcgggcaggaaggcatgcgtgagaagaggcaaaattgagtcctgattttttaaatatttaattcaaaaaaaaatagtaaatttacttttttataaaaatttttagtgcaagttttaatattttgtttaaatgagagttcgcaaatgtgctgatttttcttcagtttagtgctgagtttgaaggtcggagaggaatacttttaaaaagttaggctttttttgtaaaaatcttattaaaaattttcaattttttccctcacggcgcctattggaatctctggcttcttacttcctctgaattgttttgaaaaatagcgctcagcaaaaatgtattacgaaaaaattaagacaaaaatgaataataaaaaaaaaattgaatttttgggcgcataattaaaaaacttgcaaaccctgatttaaatgaattaataaataattttttcttgtcatgcttttaacctcatcaattcgatattcaacattctttttgtatttgtcaaattcggccaaccaactgacagctttgttggccaatccggcctcctaaattaatcaattaaattaatagataatgcccaaaaatgaatttaataaaatattttaaattttagttacataaattcaccaatggccatctgagtagagcaaatatttgctctttacgctcctcataatcaagtggtccatcaaaatccaattctaaaaaaattatataggttcccgactttgcgctcggaccattacttccgctacatttgataaatttagttttcttctattctatatagcataatcagacttcaaattaagaaatcaacgtctctaggcaaggcgcaaacggcggtccctctggcaaaattcaaaaatacacttaatcccaatcggttaaatttgaattagagttcctccccgaccctcggtggggagaaaagtcgaggatcggagaagaaattcaccaaccaaataccggggatggctggaaaaaattaaaaaatgtcggggaggatcaaaacacccttgtcggggaataaattctcataaaaagtcgaaaaacgaagcaaaaaccgctggaatatggacactatatctaataaatcaaaaggcttgatatttgatgatttctagtaaattaattttttccctaattttgattttatattttaaaaataaataaaattttgtatcaatttttatgagtccaatttaccagggtatccaattttttgatgtccaattttctggccacctacacacaaaactgacccaaatagttctcatatttggggaatgccgttcggtaacggtgcagaaatgcgcgactgctgccaatgccatcgccggcggtcggcacaaaatgtgccatgccaagctcagcggtcggcttgctccacataaattgccgcaaacatgccaccgtgaaggcggcgaagctgaccatgcgaaagtgttggctgcacgacagtgcgccaacccgtcgcgcaaacga

SEQ ID NO: 15960 - DNA, 1271 bp, Heterodera glycines
ttcaatgaaatgcattcacataaaatattttctttacaattattttttgaatagtaaaatgaatttgtggcattttatatttataattgtattttttttcataatttatggaaatgaatccggcaaactccgagcaaatttcgatgaaatattcggcggcggatgggacaaaaatgaaaatgaagaaaaagaaatggacaaaaagtcactaaaaattgaacaaaatgaattctcaacggttgatcatatgtgtgaagaaaatggaacagacccaattgatcaacaaaaatgagaattgattaaaaaatttgacctaattaaagaaaagctgaaggaaaaaggaaaatgccaacataaaaacaggccaaaattgagaggaaaattgcaaaattattaggcgcaaatcgccacaaaatatacaaatggaaaacagaattaaatttaaataagattaaaacgaacaaaatgaaaaaaagtttttatgagcagaaaaagaaagaatttattgaacgatttgatgaatttaaaagtttatatagccaaggcaaacagaatgaatttgtgaaggaattgggaatttctgaatttacatttgtaaaatggaaaaaagaattgattccaaattaccacaaaagtaaaattatgattaattaaattaaattatgaatttcgtttaagagcataataccaatgaggacaaattgaaaaagatgaagcaatattttgaaattaaagaaagaaatccaaaaatgagcgacgaaatagtcgctaagaaattgggaatttcacaagacacgctgagaatatggaaaaagaaatttgcttccacttgatcaccgattttaatttagtaaaaatgattttcgatgaaaaaaaaagttttgattttgaagagagattttaaaattttttgacgaaaatgttttcatgcaaataaatactatttattgcattagaggagccgctcctccactccaaaatacaaaatccctttcggtgggagggggttgaaaaataaaacccctgggctataattcacgaaataaggataccgtattttctctaatggtatgcccgtctccattgatctagccgtctctaattatctcctcccctttcgaagtaagttgaaaaatgatctcttcgtcttaatctccccgtctccaattatctcccctttctgaggaggtagaaaaataatatatacgcgggcatataattatagaaatacagtaattgaaattctttaggcctttttatttattatttct

SEQ ID NO: 15961 - DNA, 3022 bp, Heterodera glycines
  unsure (1)..(3022): unsure at all n locations
ttttgttatttttttagctgtaaagctcggccgaaaggctgattctgaatggtaaaggcattagaaatcatcaggctgaatcttgcttggattttgtcgggaaaaaacaagaaaattcggtccgttttcacccttcaaaacccaacgctagaagacatgaaatggaactcgcgatgagctcgagattagacaaagtcgggatcaaattaaaacattaatatctgttgaatgcgcaaaagtttggcacaccaactcggtttaaattttggaaaatttgatgaaaaacaaaagactgacgaatctgatggcactcgtagtcccagtattcacgcggtttgtttacatttacatcggcatacacccgggcacggcttggcgttggcattccaatggacaaatggcgaaaacaattgagatgaaaatgataaagatgatagcaacaaagagtgtgttttacgagcgattggatggatgatggcttaataatttgtttatcaaattgaataatatttctctaaaatggcaaatttaaaaattaggtgacaaatgtacaacaaacttagtaacattcaacaggacaggttggacataaattaaattgaatttaggagtcaaaatttttaaaaaatccataaaccattaagtttttcaaaaggcacaaaaccgcattttatttttcagcgctatttttactaattacctaataatttaacaaaagctatttggaaattgctttcgcctgctaaatatgtatttaggtatggtttcagtttattttttgtgtaacaaagataccaaacaagagaatttcctgctgtactacataatttggaattttgtatttgtgattttttttttgaaaattaagaaacattacgcaaaagccaaacactgccatttaaaatttaaagcattttccgggtggtggcttatttttgccattgccattggcctttcttcgattcctttcatccttagaatttttcgaatcttttttcaaaaaaaacattgaaattttgtaaaaaaaaaatatttcgcaaattttcgccattttcaatttccttttgtttcccttataaaagtgtcctcttctcccaactttgcctatttaagcagctctcttttctcgctttcccctgtgtccaggccattcattattcattctctttaacgaagtaccacaacaacttctgcatcccagaacattcgttcattcattcatcagtcagtttttgcatgcttttatctttatttcgctaaactgttgtttatgtgttcaattcaattttttggtttattcatctgcgcttttttgttttgagataactttaaagccttaaactgaaagtgctgccaaaaagtggctctaataatttaagcaaaatgccttttttggttatttgtttagtgcataaataaaattgtttcctgaacgcataaatttcagtagagcaacaaacacttaattatattcatttcactgataaaagcctaatcccttcaaaaatttcagttcataatggccagaccaagaggcggtggaagaaacccagcaaaagcacgcggtgccagggcaaagcgtcgcatcggcaacaaaagaaaagcggccgcagggactgctgcaaacgtgggttttattctgctgctgttctatgcaatacatccatcatttttttctgtttcattttttggcactcagagtgaaagccgaaatttcatcattgcttcattttgtaatgaattttgcctcccttttcaggttcaagctgccgacaggcgccccatttgtccgatctgcttgaagaagatgaccggagtccgtcaggtgcgcaccatctgtgaccacgtgttccactacgtctgcttccaccgttggctcaaatatcgcctgttttgtcccgtctgtgagcgcaactttcgcacggaattgtatcatgcgggaaacgccgtggttgagggagcgtacgccgacggacacgttgtgctccgaactgatggtgaacagagcaacagtggctaattgatcattgatcggcactcacctccaattgtgatcggacaaaaatgatattaattgtatatgtacatatatatcaacactcggacaataaagtataatgtgtgtttttttacttggcatggattttctgaattttgggcaggacaacgtccaattcggcgcacctttgttttatggttttcatgccgcaatcgaaaaaatgacttgccatgataaaatcatatgacaattctgatgtcagattcgtggtaatactggagaattggtgtcccggcgaaaaataaatttaaaaattttagtttaaaaatctggttccttgtgtacttttgatcataattttgttcaaacattaacgaaattttataaaattttgcaggctaatagagaactcatagggttatcgaataacctcaagaatttaaaaaaataattaatttataattaaattttttaattagaaacaaaataattttggtcatctaaaattctaattaaaactttcttagaaccaacagaattaagtgtcttgatattattcgatagccctaagtgttttctactagatttccatttgatagttttttttatataaaatgccctttttgaatgtttttatataacgggtcaccaccgacaaaatacagtatacgggcgaaataggcataaagtagataacatatttgctgtgaaaaaatgaagaaaaaaaaaattatttaggccgaatgtcagccgacaaaagtgacgagctgtgccaaactgttgcagaaatacgacagggaatcgatagaaaaggtaaaaattatcgactaattaatgagcataattaaaacatttgacacaataattaatccattcaggacgctgcttgtttaattcaatgcgcagaagtgttagggccggaaagaaaagatgaattttgagaaaaaaattaatattanattattggaagaaattattttataacaaattatgaaaaataaaatatcgaaaattttcctaatt

SEQ ID NO: 15962 - DNA, 1292 bp, Heterodera glycines
tttttttgtacatacattccttcgcttttgtctgtcatgagcttatatttcaacattatgcttgtactgcttgttatgctcgtccatttattcagaaggtaatttgttggcctccttttttgaaaagggttttttcttctgacaaaagcagttttgtcgcatcaatatgaaattgaaattcataaaacaaaagattctattgttccaatgtgtcggaaaggtttttagaattatattccagccataaaatccctaaatcaactttcttgaagtattctctcgttttacacaccttttttcatttttattggactgcgaccggacaggcgaaccggtccggttattttagaacacccggttctgcccgggtccgtttcggtatggatgggccaaaaagaagtcagcatatctggtactggaccctaatttttattttcgtttttatcccatagccatcgtctttggcatgccaaatcccctcctctttttcagatattccggtcgtctggtggcggcggtgttgcagcgactgttacacgcccgcgttgcgcacattgatggcctcggctggttcgcgttgcgccatggtgagctgttgctggccaacggactgcacttggaggtgcgcgagttgcgcgtccattcgctgttcaattggtggtggacaacgacggcaccgactgtggacggcgcggccaacgacggcggaggcggcagtggtcatcgcatggcactgaacgtgcatgtgtccgtcggcacaattcgtgttggcaaaccggtgtgtgaaacaagagcttgtttataccgcaaaatttttttcaattgtttagttgacagacgaagaaaacggcagcaataaaaaggacatttgtgatggtcatcatcctgaaaaagttagcgattttttaattgaaccgagtggggccattatgtttttttcatagctaaaaagctcaaaattttcaaaaaaaaaaattttttttttgcaaaaagtttatttttaatacccctcttgttatatgtgattgggttggtaaatatgatgtacaaaaagcaaaaaactcaaaaaaaagtaattacggaccgtaaaggaaatagaaattttttccagtgcggtgttctcgactcggtgtcaattcatttgtccaggcccgtgccagaccaactccatctccaagttcagctgcagcaaccggtcgagttggtctggtcaccggtgctgcatttgatggtcaacgacgtggtcaggtcagccgctgctgtttctctcaaatcaaatgcgacaccagccc

SEQ ID NO: 15963 - DNA, 2326 bp, Heterodera glycines
aaattttaaaaatgatgaatttctatttagtttttcgtctgttcaaaaaatattcaattttaggtggtcaacagcatcaaatggataaaattggtccatggcattgtgccaaaaacgttcaccaaggacagtgtgttgcctgctgatgttcgaattcgactgaatgtaagttgctagtacgacatttttatcgtaaaaatctgtttccctttaaatacttttaggatttttgcattagttttttttagtttcactttatttaggccgattttcttttgccagaatcaactttttcatggaatctattgtcgtggacaaccctagttttttcggaggctattggtccccttccaaaaaaaaattttttttcctacaatttgggttggtttaccattggttcatttattttacagcgcctgtctcttcgccttgacgacgacccatttgaaattcagctccaaaacatttacgagctgcaaatggacgaagtgttcgagagggaaagacgcaaacaacttttggactgcaaagtggcacagctgaaggaggaaaacccgttcttcccgggtcaatcggaaatcaaaaaaaaaaaaaatttcgagggttccccccccccttcctcaaaagttggactttcaatcaaataaatgcaaattaacaatttaatttaaaatttctaagattttttgtgaataattggcctaaattttcaaaaaaaattttatattaaaaaaagtttaaggaaaaaccaaaacattgtttaaaaattttcttgaaattttctttgaacacataacaaattgtataaataaataaatgataataattcaggtgagtttcgcaaccaacatgaccaccattcggtgcagccgtgtgcaccggacaaactgcccgaatactccagcaacattgtgagttgttttacacgtaaaactttttctttgtcaaaatgtctagaatttcacaatttttaaaattttgctatgggaaggctcctgaaaaaaacaggagaattcaaaattggcgatattttttttttgtttcattaaatttttgtgtcaacaaataaatggttataatcaaaccattgaactattgcgcgcagattggttggcatgtcttgggaaaattttgaatttttacaaactttttataaaattgctcaaaattttcacaatttttcatttttcccattttccaagggccatgactcctaccgcgccttccgttccgcttacgtcaattcggaggtgcgttttgaaaccaactcgtgggaacagctgaaccggcagtgtccacaaattttgctgtacgccaacacgttcaaatgcctggactttctgatgcgcactctgatgactgtcaatcggccggttaagcggggcccactgttcaaaagtacgcaggccaaacgctatcagctgagcagacacttcaggttgacaaaaagcgtagaaaaaactcaggggttggatttaagcaaaaatttaaatttccggtactccgaaaaaataagcggatgcgccgccaactttcaatttaattttttttttctaaatttacaaccgggcatttttcatttgtaaattttgacttgactaacggttcgaaccctgtttaaaaaaatgttttataataatatggacaaccaggcctgggctgcgggaattacctccctccaaaaagactcttatttattatattcaatacttttttttcaggaatgtccaattgatggcgtcgatgccccgctttctgatctcttattggatgtcattttcctcttcccatggatttcgtgtgatcagcgactcgttgcaatttgcttgcgattttttgctgcaaattcatcctgatcagtcaaatgtttggcacagggaggggggaagaaaaaccaaaattttataaatgtttaaattttaggacggcctcatccgcagggtcaggacagcgtggaaaattctgcacacatcggccgagttggacaatgcccaaattcatctgtacggggaccagcgaccgccgggcgtggaggaggacctgatgaacagctccacctcgacggacagcgcgaattcgtcctttttcgtcggactgtcccgcctcatctacatccgaaagttgcagaacgagatggtcagtgagtgtgcgtacaatgacaaaaatccttcccccaacggtcggtcccagggatttgtttcaaaaaaagttcggaaacccgattgctttttgaaattgtaagctaatagagaacacataaggctgtcgatgctattaaataagttctattaggctaaatatggacggaattatacccaaaaaactt

SEQ ID NO: 15964 - DNA, 818 bp, Heterodera glycines
attcggtgatctttagcttctccaatccattttttccgccgggggattttccactcattttattaaagcccaaagtcagtggcaccgaatgttcttcaaaaattacttactgatcagaaattggcgtgctctttccttctgcaggtttttgtttgccattcgtaatggattgtccatcagcagcggcgactgcgtttccttcagtcgctgctcctcccttctgaactcctccaaagggtcgcctccccgcggcgcctcgtagacggaggtcgacttatgcttcaattccttcaatttttatggaattaattatccatttttataaatgtgtcggctttcccccccctcgtcaattatcgcagaattggggacccggcgtattatcccatggaggtacaacagacaaggcaacaatttaattaaaacacttttaggtttgctttgttttggatggtcaacgcgtcaaaagttctcaacaaaatcctgagcaaattcgtgtaggtgtttagcgatttcatttttaatcgtcattctattcccaacattaacaataagtgtttaggaaatgatcaaagagactgccattccgcccaccgttttgcgagtgcacaacgaacgggtgaaggagtcgcttcagttggtcaacaacgaatacttgacaaaagcgtcccgttcattttgacacaacgccactccatgtcgattaccgtgttcttggaccgtcagcaaactctctatcggaacaaaccatcgtgtccctcctgccacgtcaaactgggaatggcgtccgggcgaccctttgaagaaatgcacaaatt

SEQ ID NO: 15965 - DNA, 2257 bp, Heterodera glycines
agtttcgcgtgcggaattcgtcgtactgaattggcggtgcggcacccaatcgcggctgattccgtcccaaatgttgcggtgtctgtgagcggcgcggggccgccccgcacaattggcgatgttccgctaacaaatcgcgtacgtcgtcccgcatcagttcgcttaagaatcgctttgcgtttcccttcactttttggctctttgccaattcacttttgtgccattcgattgaatatccgttcgtttggtatcgatttggacaacaaatcctcgccctgaggtggcggctgcttcgttggctctttggcgttctgtgtcgaatatgacaggtaaaagttcgggtcgcacagtgtgtccatctcccgacgaccggtggaacgcggcgacagcttcgacggtgccggcacggaagaagacagacggaggcccaacggaggcggcagtggtgccggcgattggtggcccaattgagaggagaagtgcacgggagtggcacgctttgcctgctccaatacctttgcggagaaggtcaattgctaaattgtggcatttccacgaccccccccccccgcccaccctttcgtctgcttacggtcggtctttccgcgtgcgcgtgttgtgtcgagattgggtcgcgcggtgtctgtgcccgcggcactgtgtgcgcttctcgcgctcgcgtgccgatgtcgcgctgcagttgatctgtcctgcttatgaattgtgcgtctctttttcccctgtccgcattgaaccggcgttcatagcactcattcagtgcggcttccaatggttcagtgcgtctctgctgggggaggtgctgccgcagccgccactcctcctgcggagagcgcacctgggcggacggagaacgcacatagtcccgctgaagttggcccacgggcgtgaacgacgcggacgagcgacgcggtcgccgctccggcaaaggctccgtccttccggcggctttgtcaatttccgcctcccatttgggcgtttccgccctccttcgcacatcgccatttgaagctttgtgctggcccaaattttggagggccaattgcgcctccgttggagtggccggcatttccaagtcgtccaccaccgaaacgcgccgctttagtgccggaatgggtttcttcggtgccgaatagtgttctttcaatgctttgaccggaacataggaaaaacagcgcgagttcgggtcgtacctggggaatagcgtgaatcgaaagagttatttgagcttttctcaccttcccatggccaccaattcgggctgtaccatcggacacactttccgcgtcgtcccttccgtcgcccctttctcatcgctcgacgatccctccggcattctgtccgtcccttgggcagaatacttccggccgaacgtcggccgggcacccggcggaagaacggaatgatcacggccgatggttgaatcttcataggcacttcgcatcgggtcattgggctccatttcatccaaatccattgacgaatttctgcgacttttcggtggcaccggcggtggtgacattttccgatttaacgttggcacctgaataaaattggaatttttctttcacaattcgaattgtctttcaattcgcacttcgtccgtgtcccgtccgttttcaaaggaatgccgttccttaatgtcgtccgcttgttgaacagacgttgacgtcatttctggcattatttcgtgttgactcagaggttgggtgtgtgtcctgggcgagtcggagccaatgcccgagtcggcaccgtctgctgctgtcactgctgcttggctctgcggttgtgttgctggtactgcctgaactcgttgcttttgctgctgctggtggtagtgctgtctctgttgattctgttctttgttgttgttttggctttgtgcctttgtccgaatttgaggtgttggcgaatgtgtcaaattttgctgctgcttcttcggctgttcttcttctggttgtgctgatactgctccgccgcctttgccactgtcctcctctttcccaatcactgctccattatttgtcggcacagaattgacaattggcagcgacagactccgttcatctgacaaaaaaggtaatcattgaatgaaactgaaaagaactgagctgaggttggccaacacataaaaacaacagaaaaggaaagaaaaattgtgaatgattttttgatcggaatcgattgattgaaatggccaaaattcattttaaagcaaaattaacagacgcaaaaggaa

SEQ ID NO: 15966 - DNA, 3460 bp, Heterodera glycines
  unsure (1)..(3460): unsure at all n locations
actantctcttanttttgagaaattttatacgttacaaatgctttcgagcatgataggaagtgcggcgcgcaatcgccatttaatttcacagagaatttttaaatttatcttatatccaagaaaaatgactatctcttattttgagaaattttatacgttacaaatgctctcgagcgtgagagggagggcggtgcgcaatcgccatttaatttcacagagaatttttaaatttatcttatatccaagaaaaatgactatctcttattttgagaaattttatacgttacaaaagcgctcgagcgtgagagggagggcggtgcgcaatcgccatttaatttctcagagaatttttaaatttatcttatatccaagaaaaatgactatctcttattttgagaaattttatacgttacaaatgctctcgagcatgataggaagtgcggtgcgcaatcgccatttaatttcacagagaatttttaaatttatcttatatccaagaaaaatgactatcagtagtataagacgtattaatccggtgtaaaatccccccccccttcccttaccaaaacccaccaccccccatgaaaaattccggcccaaatttggtcccaaatccccccaccctccctttcatcggacccccctaccacgattcactccccacatattttgatcagataaatattattcgcatttttgtgtgttgcgaaatttgctgcgcggcgcaccaaaaatggtgccatccgcgcatcaaggtcaaaatagtttttatgttcatgacctgtcaatcaaagttcgcggtcgagaaaacttaaaacgctgcggagatgcaaaaataattgcggccactttaccgcagtttttatgttcgtgacctgtcaatcaaattctttgggcgagaaaatttaaagcgcggcggagatgcaaaaataattgcgtcacacaaaccgcagtttttatacacgggaactgtcaatcatataaatgaagggaaggctgaagcgacttcatttcaattccatttcgcttaaggtggggggtcgggggctattcttgcccctcggggcgcttgcccccaaatattcaaatttttccatcgatcatctggatctgtcaccgcggcacggcagcacggcatggcagtgggaggagtcagcagcggcaccatccccaagttctcttctcatcatttgccactttcgcccactttttcaatttgtcagcagcggagacgcatcccaaattcgcttttcactagttgccattttcatccactttcatcatgccctttattgcccccggcactttcgcgtttctttcaaaagagtatggggaattttcggctgggcattttgacccaaacagagcatacgacccaaattcacttgcagaactttcgtaatgacatttattttgcttccattatctttcattttttctttgtagtcaatggcgaaaagagtttctggacggccgatatggatccaaacaaccaacccctccttccaccccgcgtgccccatcgcccagattcccaatcccggtcattgttggtaattttaatttgttttttggattttgcaaatattccgtttacaggaaatcgtccacaggatgaaaattgtttggttttccacaaatatcttgtctgattttttccattttagggcggcagatgttccccgatgacgaggggtaagaatcggaagatgatgaaattctcttgccacctgcgccgatccccccgcaacttggccaccctccgccaaatgtgccggtaatttcggtctcgcttttcgttgctttttctcaaatttccgagtgcttttttcaggcagttcgtgttcaaccaatgcatgttgggcagcagcggctgccgctgagagacttgccacaattcgaggaccatccgcaaaatgtgccggtaattttgggtcgatttttgctgcgttttctcaaatttctgcgtgctttttttcaggctgttcgggtccaaccgatgcaacaaatgcagcaacccgtaccaatgagagccgtgccacaattcctccaccctccgccaaatgcgccggtaatcttgagtctcgttttcggttgctttttcaaaatcccgagtgcattgtttttcaggaaattggtgtgggaccaattcatgatgggcaacaaccactaccactaagagcgttgccacaattcgcccaacctccaccaaatgtgccggtaattttggctcgtttttttttgttgcttttttaattcccgaatgcttttttcaggccgttcgtgtccaaccagttcaacaaccgataccactgagagacgtgccactatttgtcaacccgccaccaaatgtgccggtaattttggctcgcttttgttacttttttttcaagatcccgaatgcattttttcaggtaattcgtgtccaaccgatgcctcaaccgttgccgctgagagacatgccgcaaattcaccatccaccgcgaaatgtgacttcaatttggatcaaattgtggttgctttttctcagtctctgggtgtttcttcagggaattcatgttcgacaaattcaacgggaatacgccgtaccgcaatttgcccatccgccgccaaacgtgccgtatcatccaccagaaaacgttccggtagttgggtcttggttttcatgcgttttctcatattttcggatgcttattcaggcaatccaaccacggcaacgaccgcgccagctgagagacgtgccactattcgaccacccactgccaaacggacagggtaatttcagaccctggcttctacctaacaccgaaacatcttttcttaagcaaatacatgccaaccccccgagagtgctggaagtgatccgacggctgggcgagtggagaggaagaccaagggacccaagacgtccgcctcaatgaatgaatggaatttggattttgataaaatttgttgttttaattttttgaattgataagggttaaattccgtcacctaaattgtttcaaaattattaaaattttaagaaattagatgctaaacctaacctttgacatagattatgaaacaatgaaaagaaatgacgaaatttttgctttcatgtcttttgaaaacaaaaaaaattcaaaaaagggggaggggggtaccatcgacagtattaccgtaatttttatatggaaatcggataaaaataatgacaacactcgaaatgagcacaaaaaatatgaagtgaacgaaaagtggtgaaaagtgttctgttatttgtcgcggaaaacaatcttttggcaaccatttttgagtcacacgtccgaaaaaagggagagatgtgtacaaataaagagagagagagagagtgcagagaaaaaacaaaacttttttttctcataatttttctctctttttgacgcactatctaatgttttcattattaggaaaaacaacatttacttcgtgatgtta

SEQ ID NO: 15967 - DNA, 1914 bp, Heterodera glycines
ttttggtataatgttgtctaattttgatatttatgtccttttttttctgttaatctatataattatttttcatttagaaatgatcaatttgaagtcaattagtattatttaaggaaatagattattgattcgtatatataccttaattgtttttattcgctatttaatattttaaggtttttcaatttaagcatcttttttatctttatccatcagttaatatttcctttggaatttactggtattcatcatttaagtatatttatcgattatttattttcagaaataattattgcttaaaaatgttaaaattactaagttaaagttggtgagaattgccgaaagatgaaatttttattatgcgagccaatggatactgggtgcctgttcggtttcgttcaaatagactcatatgtttgaactcttagccatttttttaaaaacttatttgatttatttgtttaaattaaattaaattattatttctgtattcgtttttaaactttcaatatgtaaattgtcattttagattttttttcattatctttaattgtttatagatattgaaatgttagcgactcttttgcatttatttctcataggacaaaaaaattaatagcattctttttgttttcattgaatgatattttaaaatagccttaatgatacataatagataccattaaagcaaaagttcaaaaaatgaattttatttaaaaaaaactcggattgaatgaatccattaattaccatttttaaatgcataatataatcattttttagtggcgttcaataaatagtcttaatttttctattattattatttgttttttatagccaatttaattctcattttggatttaagttttatttgtcaaaaaattcttatttggttaagacaatgtatatttatcatataaacttatttttttaattatttcatattttttttgtgttttaggcgaattaattggagttttcgattacgtactgccttcacactaaaaagtgtgcagcgatgaacacgtatgcttcagctgattgtcaaaagaaggccgggtttttcacctgaaaccatatcgttggacttcaggctggcgatgccgcctgtgcgcgaattcttcgactcttgcggggttacaatgccatcaataacagtaacccggctaaacaaaatgatcacaattatcaagccaatgtcaatgttaatcccgatagcatcatcgattttctcgttggtacattatctcgaaattataaaatgcgcctgtaatcatttttcaatgttttgttttttgttggaaatacattgttaaatatgttttaatattaaattttaatatttttcgaaaaaacagattagaatccatgtcgcacaaaaacagcttaccagactaaaccttccccctgactaaaacatcgcctcagactaaaacgccagactaaaccgacccccaccgtaattgttccattcatatttctgataaattgtaaaatattaatattattttctatatatgggaatggtacggtgtaatggtccacatccacccaggagcgccataataagcggggaaatacgcgagggatgttgggccctcccagcatttcaggcagaacctgaaatgtgggagagcgcatccctcccccaaaatgctgctccccaaaatgtcaagccaataacaaaaggtttattgaccagaatgtgtagcaaaaggcaagggaaatggtgaatgatcaaaatggccgagtgatcaacaactgactcaaatcccaacatcactccccttaaatctgattagagcgattggggaaaggggcgggggcggggacaatagcaacattttgggatggagcaatcagagaaagagtaatgcacgagagagagatagaaagagaaataaagagaaaaca

SEQ ID NO: 15968 - DNA, 222 bp, Heterodera glycines
tttttgttttgttgtttttttttttttttttttttttttttttttttttttttttttttttttttttttttttttttttttttttttttttttttttttttttttttttttttttttttttttttttttttttttttttttttttttgttttttttcttgtgtttttgtttttttttcttttttttttctttcttttttttccgcgtttttttttttttttt

SEQ ID NO: 15969 - DNA, 2248 bp, Heterodera glycines
  unsure (1)..(2248): unsure at all n locations
aataatcactttcaaattgtcaagtccaaagcattcaatcagaaggaaacgatcgatcagcggaatttccacgcaattgatcagatgcaattcgcaacgcgacttcaaagagttcacctgatagcggaaaagcacttttattataattagcaaatttggaatcatttcatggaaattaatgttcctaatattatagaataatatcaaaaaaaaaaaaatttgtgaaatcacagaaaagttagaacaaaaaaaatttcgaacatttttgttacaaaaattatataggcagagagagaaatcaaaaaagaacagttaggacaatcatatgatactaaaatttattacccttaagcaaaaatgaatatgaatcataataatttaaaataaggtgctaagtgagggcacccacctggaagtagtcagccaatttgagcagcgccagcacatttgttgctacaaattgggaatccgttcaccaaaaattaaaatttcatatttttgaaaatttatcccctattaatccataaaaagaggataattatttttcagaggattacggttgggcagaaaaggtccgatctttgtcatataaaagatggactctaaaaaggcaatgaattggtccatgtcgacgcccaactcgtccaaagtgatcattcgctgctgcttctccttcatcatgcgactgatcaccggggaaacggtcatcagccaatgggcggacacagcgacctgatcaaaatcaccgatcttatcaatattattagtgatctgatcaaaatcattttatcaattatctgaccaggacttatttttggaagggcaaagaaaatcgaaacaaaaaaaaaactttttttgaagaaaaggttgtcatagaaatttggggcattttttcaatttcataatatttttgctctgatagagcgggttgaggggtatttcatttcataaaggcaaatttctgaccctccccttgcccatttatgcctgcttctaaagtcaagccccccccccacagttagcttcttaacctgtttttcaccaattttcacggtcaaatcgtcgtcgggtgagctgtcggaaggcgccgggaacgcacttaaaaatggaaaagtaattttaaaaaaatggtacattaattaattaatagtcgggaggacggggacttaactcggctcccgaaaatgctttggttaagtatttctattggtaaaatcggaattttactattattattagtatattaccgtttctcctccgactttttctcccgctttttgagaattcgaattacaaatgatgaagtatcgtcaaaaatggcaaaattaacttcactgcccttgttcaatgtttttgtctaaaacaaagtttgttgttaattttagtagatcgcatttgtttaaatttctggttctcttaagcaaagcctgcaacatctcttgggactaacccttaattgttggtatcagtacgcattttgccgctatcattcaaaaaaataaatatttcaaaaaagatttttggggaaaatgcgccccataactataaatggtaaaacgcataaattgccagaaaaatacatatcaatcaattgctctcggcttgtaaagaacgtgaaaaaagttatgggtcctcaaaaaccttaacgttttttagagtttttggttgaaaaaatggtaaaagcataaaattttgaaaatttgaattttgcctactgcgctaaaaactagcgcacactcaactacggcgaccagtaggtggggcgccgctcgcaaccctccgcgcattttcggaagttatgagggaggacccataagttttttcaatttattttttgtccaaaactttcggattcgtttttacaagccgagaggaatgattcatatgtaattttctggcaatttatgcgtttttaccatttggaaggttaagtgccaaagccattttagtcctgggtcttcaactcttcagggagtgatttccgcacaaaaaaaaaattgcttacttcaatgattttcggtgccccgttttggtcccaatgccaacggacaatttgtgccaatggctcctcattcaacggattggaagaagaagcattgccaatgtccgcgattttcaatactttgttatagtcggttgtcacaatcgtgaattccctaaaaatgggtctatatacgaaaattaaaaaatgaaattacagtttaacaaatctgatcatttcccaatgtgaagattttccagtanacgc

SEQ ID NO: 15970 - DNA, 1105 bp, Heterodera glycines
cgtgaaaaatgccattgctctctccttctgtttcacctctttgtaagcaatttcttactaggattaaacgagaattttcgtggcttttttaaaggacccattgggtttttcaggaaatcctaagctgataagtgtcgtcgaaaatttgaatccgaaccgaataatatcatattttcacaaaattgtaacattacttttcatcagaattcttctcccgctttttgagaattcggattacaaatgacgaaacatttgcttcgtcaacgaatatttgcacaaagtcttgaaaaaacaatttattaattcaatgaaattatttattaaaatggcccttttacctctaaggatattgataaaattttaaaatttgggaatttatgaaaaaaataagtaaaaatggaaaattttagatttttactcaattttcatcaaaattaataaattttaaatttatttgctattgttttgctcaaaaatgatttttcattccatataaaatagcttcaatttaatggattattcaaagaaattttcagaagttttacactcaattttggaatttggaaaacatttgtcaatagaaaaatacaaattttcaaagaaaaatatatgtaaaaatgggaaaagcctttgaaaatggggataacattttagaaagatgacaaatgctgtgtgtgtgattcattcattgttgatcatcaacatttgtttttgttttattcaactgagatgaatgcatttttttacaaaaatgtgaatgacaaatttaattaaataaataaataataaatacatattttgaataaaaagaattaacaattcttgatgttgttcgacagcttgtgtgtttaatattatttgcaaaattttcaacttttttgttaattttcataaaaaattatagataagaggaactcaaaaaccgttttctaactttttttaccctggtttttttgggtgctaggtcgtttcgtaaaaagtgccactgtggtcgtttcgtaaaagtgccgttataaaaatatggttgagtatagagttatgaattcaaaaatttatgtttgtgtgcgaggtattatataattagtaaactatgaatatgaaaact

SEQ ID NO: 15971 - DNA, 874 bp, Heterodera glycines
  unsure (1)..(874): unsure at all n locations
agagtcattgacaccngcgctgaaaattgaaagcattttttttgaaaaagcattaaaaccggaaacagcccaaagaagccttttttttcgcttctccccccccctccccccccccactcataagccccgctcacactgctcacactccacaccggcacacccgaaacagctccaaaagccgagccaaaagcaccgccgctgccgtcaccgctgccgccgaatgagcgctgcaaaacggcgccattgtggttgttgttgttggcctgtttttcatttttttaaaatagccatcaaactccccccccccaaaaaaaaccacaactgacattgtttccagcagcaattgtcggcggttgggccacagaaatgccggccaaattgtccacccgtgatgcgcgtccatccacagcaacaccaccacggccatccgacatgtgcggtgcctgtaaaaaaaaatcaaaaaaaaataagaatttttacaaaattcaaccctcaaatttgctggaaattaacccccctgcccctcctcacattccgttgtgccattgcaaaagtggcactgtcagtgtgtgccgtgccaccaccaccaatggcaccgctgactcgcgaaatgcgcgcctgaaaagagcaatgaataatttatttattaacatttttttaagttttttatttttccattaattaaccccatttcctcacttggttgttgtgcccactgttgttgttgcgctgttgtgccatgtcttcctcgcccaccgccgccgctggggttagcagcagctccaactcgccgagcatgacgttttgtggcgggtggcgagaacgggccggcggacgaccgctgttgttgctgttggccaaattggtgccgttg

SEQ ID NO: 15972 - DNA, 1817 bp, Heterodera glycines
  unsure (1)..(1817): unsure at all n locations
ccccggcactcctcggccaaagtcaacgtcgtagaccaaacggcggagaatggcaccacccgaaagaaggggggancagagaggaagggaggggcgaacaaccncaaatgtccaaacggtgnagctgaggaagcaatcaattgctcagcactcgcagagagaattggtgatgaacggacgccccctccggcgatgaacggacgtcccccgccctcctctctctctcttttccctaaagatgatccgttagtgagtaagaaaaacaaaattattgcaaatatgagacagagagcaggggacggataacaaatagcaacaaaatagaacataattttgagaggtctataagagaaaaagggtaggcaaaatagcataggaaagcacaggtccatccccccccctccgtcctctgaacacaaaacaaaaaaagtcatgtatggggcagcgaaaattgtgcgctaaacacaagcccacaccccaccccacccctccccccaatcgcgtggccgttttcgcgtggccattttagcgttgccattttcgcgtggccattttcgcgttgccattttcgcgtggccattttcgcgttgccattttcgcgtggccgttttcgcgtggccgttctcgcgtggccattttcgcgtggccgttttcgcgtggccgttttcgcgtggccattttcgcgttgccattttcgcgtggccattttcgcgtggccgttttcgcgtggccgttttcgcgtggccattttcgcgttgccattttcgcgtggccattttcgcgttgccattttcgcgtggccgttttcgcgtggccgttttcgcgtggccattttcgcgtggccgttttcgcgtggccgttttcgcgtggccgttttcgcgtggccgttttcgcgtggccgttttcgcgtggccattttcgcgtggccgttttcgcgtggccgttttcgcgtggcagttttcgcgtggccgttttcgcgtggttgcatataaaagagaattcataactcacatttatttaacgaaaatttgtttcactcttttttctaacgaatatttattttataattaagtgagtttataaactaaattaaggttctttcaattatataatatggaccagcagcaaaaaattaaaacaaaaagaaacaaagttaagttagaacatgacggcgcactctatgttttcgaacaattgagcgcagattgacttaagatattttggcgatgtgagtttcatggcccgtcagacaagtgcaagggtatgttaatatattattttgaattttgaaaatcttttaaaattcaggacgtttgcacacggatttaaataacgttgtgcagaagttggtcgtgagttcaagattagaagaggtacaacagtgactaaaagaggtacaacggtaattagaagaggtacaacagtgattagaagaggtgcaacagtgattagaagaggtgcaacagtgattaaaagaggtacaacagagattaagaaaggtaaaacagtgattagaagagatacaacagtgactaaaagaggtacaacggtaattaaagaggtaaaacagtgattagaagaggtaaaacagtgattagaagagatacaacagtgactaaaagaggtacaacggtaattagaagaggtacaacagtgattagaaggggtacaacagagattaagaaaggtaaaacagtgattagaagagatacaacagtgattagaagaggtacaacagtgattagaagaggtgcaacagtgattagaagaggtgcacagtgattagaagaggcacaacagtgaaaagaagaggtaca

SEQ ID NO: 15973 - DNA, 1227 bp, Heterodera glycines
  unsure (1)..(1227): unsure at all n locations
aaacnttcgcctaacaagagcaattaacaattctcaggcgctgcaaaaatgtgtaaattgaaataatcacgcaaagctaaatgtggcggcacgtgatcacgtgagcatttttatggcgtgaaaaacgagagaaaacaaagagataaaatgaactttgggacttgtaaaaactgtaacttgatagggcctaattttcattttttattggtccctctttttaattagctaaaatagtgcccctttgattggttatcagcccgggcctttttgctctcctcaaaaaaaaattgttctatttttttgtctcacttcttctctctctctctctttctttttttttttcttaatcgttcagatatttttataaattggtccttattcgtttgctaccaggacttttttttttttttttgggggtatttttgcttctttcactctattttcttattctctctctcctacaaataattgttagatttgtcaattttcgatgcagtcagcccctttagcattcagactagcccgggcaaattttgttcttcttttttttgtaaaatccctttagcttttcgctagcccggacaaatgttctcacctcttttctcttcatcttcaatgtccctttagttttcgactagcccggacagattttctcacctcttttctcttttttttaagtccctttagtcttcgactagcccggacagatttttaaaatgtcagacttctttacttgcgtgtacacgtctttgtttcaggccctcaggccagggagatctcccacaaacttctgccggcttacccaattctcagcttcgtcgtcaatgatgggtcgtcgtttcccaaaatgggaaccatccggtgctaccagtgagggatgcgcactgtgcccccagaccaactatgcaccgtttatcccggatggagtttgggagggaatggggaaaagccaaggcgcctttgaccaagccccgaacccccaaacgactcattgactgttaagatgtatttattcattcgatgttggatttaaacgaagcgagaaatcggaataataattgaagtctgttccatcacaactgactgactgatcactgggggaaagagaaatacgaagagaatggggcggagaaacattacaatgagaaaggaaaaacgtgtgaaaatggataaatgtgattgaattgataatggccaataangaataattaaatgaagggaatgcgt

SEQ ID NO: 15974 - DNA, 1820 bp, Heterodera glycines
ataataacctattattctagaaattattttataatatgtgtttttcatattgtctccacattatgtgctggtgttggccgttgattctgctactcctccaacttcgtcctccgtttttctcgtctctttgaaaagcgtacattcgccggccgaattcggcgctttttgaattgactttgaggcaaaagaacagaaaaatgagggaaataaatgggaaaattttggacaaaaattggcccataatgaaaaataaaatgttaaaacataaataaataattgaattgcgattgtttaattgttcacattgaaagtcggctttttaaacccaaaaataaaaataattaaattaattttcatgcgagaaaaataaagtcacaaacttcatctacaaacttaagaatttatggggaaaatcgttcaagcgaaccagattgattttcataaaaatccgttctctaattatcatgagcagggctgccaaaatatgcaaatgcatttttttcctgggttctccatgctataaatagtaggaaaaacactttcttttttgtgtttgcgtataaaagtcgggacttttatttgcatattttggggtttttctgcatatttcatgcatattttgccatttttcgtcaaatattttttgatttgaaaattttttaaattaatttgcatccctaattttcaagttttttttgtgcaattttgcgatttttgtgcatatttggtgcatatttcacgactttatttgcatatttatgcgcatattttggccacttttcgtgcatatttttggcagccctgatcatgaaatttgaaaaaggtaaatataaaatgcattaaaattttttaaaacaatggatttttatccaaaaaaaaaactatattattgcatttttacttctaatttataaattttatgaaaattttgggtccggcggtgggaaattataaattttagaccagcaggggtttttgacagtttataccaaaaatgaaaatttttgaggaatattgggataagaaaaccccgtgaaaaaaatggttaaattatacaccaatcgatacgtctcgaggagttaagcacgaaaaaatatgtctcaagttgcggaaatgccaatcgggagtttggacaatttctcttccaatttttattaagttgtagcggtgatccatttttagtatggaattggggagagagggaaaggaattggtgaacaaaagagtggccaatggccgattcgctccgtttttaatggccaaaaggtacttttgccatttattatgcataaattagcgcggcaatgtccctcctttttccattttatgcataaaattaccagcgagacgtgggttttacaagccttatgttaccttatttcaaattttgagttgtaggcataaaacggaaaagtacctgtacttgtcagaattctcgaacacccttcattcggagcaagttaggcttcagcttaggcctaggcttagggttcagcttaggcttatgcttacttaggcctagccacaaattaccttagaaatgacttttatttgaaaatttcaggggaggaggtcataatacggaaaagtgcgaaaaaaaaagtttttagatggtacggttcgactgcataccttgatttttagacttagctcgtcaagagctttcgaatgataccaaatttgtcgggattcgatcgtttaaaaaatttaaggtgccaagtctctcaatttttagttttgaaccggttcaaaacccggttttttggcatttccccctcgagacatattttttgtgcttagctcctcgaaacgaatcgatc

SEQ ID NO: 15975 - DNA, 1650 bp, Heterodera glycines
  unsure (1)..(1650): unsure at all n locations
aatttacatgatggggacanaatgacaaatttgggacggtgggatgggtgggatcctatcattgtccatgttgaggtgacgaagcatccttccatccagacgttgtactcgatcggcaagttcttgcggcgcaccatcccgtctccctggaaccactcgagcttgaacgcggtggcggctgggtccggcgtgttggtccactccacggtcacacggtcgcccttggtgtcctcgctgccggggtcgaaggcgtcgcaggagacggccacgttgacggactcctttgggccgagcactccgttcggcgggttcatgttgatgcgcttcggtttggggtcggggtcacttcgccgcggccaactcgccgcggccatctcgccgcgagaaactcgccgcgtggccaactcgccgcgggctatctcgccgccgcccaactcgccgcggccaactcgccgcgccttgttttttggctatctcgccgccagatttttttcattgaaaggttacctcattattttgatataaaattaaaaaatgcattaatttatttcaaaagaatcattaaaataacaaacactggtccataacacaatttgaaaccagaaattccgaacaccgaactcaaaattctgataaaaagttgaaaattaaagttcttttaaatttcatattttgttcaacctttgtttacacacacggaaacgaactgaaagtcatccctgatactcatcagtgcttcaataaaatcgtttaaaccattttagattaaaaatcaaaatcgaaaaattccaatttcgactttattcgaattcaggctggtgttataaataggttgaaatggagtgctcagtagagaccggaaatttcaaatttgcggatcccgctgcgggattggaactcaaaattctttgcgggacgggatcccgcgggattaatcccgcattttaaaaaaaatgtgggaatgcggactgggatcccgcaaaatcccgcgcgggatcccgtcccgcgccggtctctagtgctcagcgcctcaaaatacccaaagaaacttgttaaagaattcccagaaaaaaaaaaatttcgggaccaatgatcgacatgattgttctttaaatttatggaaatatagaggaatatatcgttctgcaatttttccttcatgcgttaactttcaatttgaagcatattaaattggagagaaactttgctgaaatataacacattgaatacaattaactgttaaagaatttttgcttttaatgcattttttcaacgaaaaatctggcggcgagatagccaaaaaacaaggcgcggcgagttggccgcggcgaattggccccgcggcgaaaaagcgcgcggcgagttggcccggcggcgagtttctcgcggcgagatggccgcggcgagttggccgcggcgagttgggcggttcccgctggaaacggtgagtttttctttgttgcgattgcatcacttatcacaacttatttatatatctttggtgtttttcagattcaatatttgagcaaccagttgaaaaaggggaagaaacaacggaagaaagcgcaactcaaaaaaaaaaaaaagaacaacactgagaaagatggacccgcggccagcagcagggaacgacatcgaaacctcaagccg

SEQ ID NO: 15976 - DNA, 897 bp, Heterodera glycines
  unsure (1)..(897): unsure at all n locations
gtaagactagaagcgctccagccctgacctggggtttgccatttgntagcaacattttggtcattctgcccgtcgcattcaattttattgatcagcaaaaaaagttatgttaatataattttgcagatttttcctaatccccctccctttgtttatcgacccttacttctgttgaaccaggggaagtaggtgcaacaaactaaataatccggcattactcatgatccgcaataataactggacaaaatttttcaattaagccaaattaataaacatttcttcggtatttttttagtaagaatgtcttcatcagaaacaaaattggatgaaaaatcaaacgaaattagcaacaatgaattgatgggagaaaacaatgccaaggatggaaatgtgaaaggtttgttggtactttttcagtttaacggattttaaatgttcgaaatttaaatataagtacatttattgcatttaaaaagtatgtgaaatctgtccgttaaactagaaaagtaccggtttctttacttcatttgatttttcaattttttaatatccagaagcaaataactcaactgacaaatcagctgaagcagaagttcacacagacgaagcccagctgggaattgctgcagttgacccaaaaccaacggacttttcggaaaaaccaactgatattcaaaagagtgggaagccagaggaacaacagcaacaacaggtgatagataacatctcaagtacgattattagatgttgatttgcaagtagcaaagcgtttcccgatatttgcccaaatctgtttaaaatttataaacctggtgttttttcttcaatggatttttgaaaaggttatctaatatgtcaacaaattgttttcttaactcaaatgtcgnnggtaacttt

SEQ ID NO: 15977 - DNA, 3355 bp, Heterodera glycines
  unsure (1)..(3355): unsure at all n locations
aattcggcgctagttgcaaagagtacttttttgaatttttttttcacttttttttggtcaatttttttttttgttttttttttatgcagaatttgtttttttaacatggaacgtattgcatactatttaataaactgaaaaaaacattttaaaagaaaatttagcgctagttaaaaattgacaaattttgagttttatcaaaaaccaaaggggggaccctattgttttgcaaaatttttttgagataaaaaatcgtgaatatattttttattcgccataattatgctgttaatacttaatattcatcattatgtgtcaaaaaaacaaaaacaaaaattgaccaaaaaaaagtgaaaaaaaattcaaaaaggccctctttgcaaatagcgccggattttggctccattaaatttttataaaaaaatggacattttattcgaacgaacctgtaattgggtgaaccttgccaagtccggcacagcgtccactcgcatttggttgagttcaatgctctaaaatcagaccttgaaatgcttttcgttatccatactctccccattcctactttgtaaaactgacacaaatagcaaaaccatataaaaagtgagtccatagttcgtttttttttcaaaattacaggcaaatgatggttctaaccgtttctgagtcgggcattacactgaggtcgaacaaatttagagaagctgtcggcttcgcctcctcattgggctgcctgtccaccttttctgccagtagttccttttcagtttgggacatgttctctaaaaaatgctaattatagttcggcattgaaaatgcgattgatgccgcgcgaattatccaggaaaatgagaactgagcgagagcttcgagaactaaaaaaaaacggtggctggacatcccttatcccttactatatcccttactcatatatcatcattttgaataaaaatgcgtatcattacatataaaaaaaatgagtattgaaacgatatataagtcagacactacattaaaaattattgaaaataaaagtgaacaaaacgccaatgaaaaacagacagcggaattagacactatatgttttatcattgattttaactaaatttctaatacttataacttggtgaagggtaaaccaaacaaaaccattttgtgctcattttgatgggaaaattcttaagaatatttcaaagttaaataaaaatttgaaaaaatagtttattagcaagaaaatgaaccatgtgttatctcatatgttagagacatggaaatagtgcgtcaaaatgagagaaaaagaaaaaactttgcccagttgaaaaaatttttctacagttgagaatttcttgaaattttgcaaatggatgtttcaaaatattcatctttttccgttttagttttgtagaagagagtgagagggagagagaaaaggaggaaaagagagagagagagggttaggtgaatagagaagaaagaaaaggaggaagtgagagagtgaggtgaggagggaagagagaaaaggatggatgagagagcaaggtgaggagagcgagagaaaaggagaaagaaaggagagagagtaatgtgaggagagaatagaaaagaggaaaggacaaaaagagagagagtgaggtgaggagagctagagaaaaggagagagagagagagatgtgacgagagaatagaaaagaggaaaggaaaaaaagagagggagattgagaaagaaagagagggagagagagagaggttgtgtagagagagaaagagaagagagagatggagagacaaaaagagagagagagcggtagagagtgcgatagagagagagaggaaacgcgagaggaagagagagaaaaagagagagagagcggtagagtgcgatagagggagaggaagagagagaaaaagagagagagcggtagagagtgcgatagagagaggaagagtgagagaaagaggggaagagagaaagagagagagagcggtagagagtgcgatagagggagaggaagagagaaggaagtaaaagaaagagagagagagagtgaaagagaaaaataaaagagggaaagaatgagaaagaaagaaagggagagagagagagagagcgcgtagagagcgagagagagaaagagagagaaattggggaagagagagaaagagagtgaaagagagagatagagagagcgcgtagagagagagagagaagagagagatggagagagagagagagagaaaagggcgagagagagagaaagagagataaagtaagaaaaaaagaagtgaaaggaaagagagagagagagacagaccctaaaagcctttattttttcataaaaatttgctcaaaatcgcgaaatcgtatagtattatagtatgattaccaaattttggctttatgttctacattcaaataaactgaataaacaaaacagaaacaaaaacccgaacccataaattgcacaaacccggaaaaaccagtaatgtttgggacttcataacaaaaaatattggaatgtctgctgctgtaaaaggatcatggacattgaaaacgctatttctcgcggcttttctcatccgtttattttttattttttatgctcgatttcatgattattattttgaggcgagtttttactgcttttttcattaaatttggtttgactcattttgtttcccggtttcaaatttattacattttcatttgtaattgcttttcccttttaaataggtaaattttactgacattgattatgaggtgtttaccgaagcggcccttttggctcgtgaaggacattcgccctatgaacagcctgagtaccgttacacgccattgatcgcttggctattggtgccaaatggacaattcgccgattttggtgtcctttttatttactttataataaaatgagaaaatcagacgatttttatctatgaaagcgaaccaataactttttgcaaaaatttaggaaaactagttttctgtgccactgatgttcttgtcgcattcctgcacttacttatattggaaagtcggcaacaaaatcaaagaaatccttcctcgcaaaatgaaggcaaaaccattcattcatcatccgtcgtcttccgtcattttggcgtccttttctggctgttcaacccattcaccgccatcatttccgcacgtggcaattgtgatgcgatcatttgtgcactcgttttgttggcactgtttttactgatccgtgtgtggcagcggaagaacgatggcataaccgccacatttctgcgcttggcactggcggncgttgttcacggngccggtgccacccattttcgcattttccctgtgnngtcgacgcatttattgtatttt

SEQ ID NO: 15978 - DNA, 2077 bp, Heterodera glycines
  unsure (1)..(2077): unsure at all n locations
ttaattgattttgtttgcatttttatgttttgaaaaactcgccgatttttcatgccaaatgaggattttttgaggtattttaatcggcaaatgaggattttttatagttgaaatgaggattttcaaaattttgagatcgaaaccctgttttaatctttccagtcaacatatatctgtataatttaattggagggttctgcttttgaaatttaattatttcctgtgtctaattagcattctccgaatgttttattctcttttattttaattaattaattaatttttttttgcaaattaattttgttgctgtccaagaaaaattcattccatcactccatttgtgactaattaattttgacaactgctgctgctgctgctgctgctattgacggcgcatcgcatgagtaatccgaagcgtgttcgattggagaggcttcatgcattggattttggtgaatcggatgacatttcggagacacaaagcctcggcatgttaaaaaataaataataaacaaaaaaaattatcgatttaaaaaaataaattcccctgtaaattaagtggatgagtgtaaacatgaaaatcccaaaattttcaacaaaaatcctatttttcttttaaataatttttttaattatttaattttgaattttttttggttttacggaaattttttttgaaaatgtatcaaagaaagcgcaatttacgagggttgaaagtctttactaaagttgcttctcgaccttggagagagagaaaaattgggatccgggagaaaattccctgacaaaatataccgagaatggctggagaaatataaaaaaatgttgtgtaaccataccctcgttggggaggaaattttcaaaaaaaaaaaaaaaattcttagaaactcaattaaagacactttcatccgatttggagtgtaatcgtattcgcaattcttgcatcaaatcggataacaaccctagtccttacagagggcctgagaatagaaatccatataaatcggatctcttgtgacgaaaaatgccaaaacagtttagggcgtcactaatttagtgaccaaaatgctccctaataatcccagcttttaaatgacgaataataatggaaatttttaggctaaaaatattgtgtttttatattatttttcgctaaaaaaagcataaagatgtttttgtcttttttgacgaaattttttttataaataatgaaaaataggaaaaaatagaaaaaaaaatttagaaaattaaattttagaaaacaaaaatatttatgcattcatctttgaatgaaaaaagaaattattcatatgaaatcgaattaataatctctcctttgcatatttaatgtgcatttttcaaatgacaattaaaagaaatgtgtttaaatctcatttcatacacattaaaatccaataatttttccccataaatttacattttatttaaaatttaattttcttaattagctaattaagaaattatgtcttttttccttttaaaattgatgaataattcccttcaatccttcggtttgtgtgaatgaaaacatttgaaggaccatcgatttaattaatcgctgctttatttattcaccttttacaaattaattcccctcatttaaaccattttttctcaaaatttaatcgatattttttaatttataaaaattttttaacattaattttttttaaagatggttctgctatcacttttgccaatttaaacactgttaacgccaaaaatcagcaggtggttatagattaaattattataaaaaaataattatttggaaatatttaagcgcaaaaagatgaacaaccgtgatcattttgaattggaattgagtgccgaatcggatcaccgatcaccagacaaatcatcaaaatttcagtaatcaattaataaataattaaaaattaaattttattttttattattaaaatattaatatattttagaggataaatataattttcccactaagctaattaatttaattaatatacttttttaaattntttagaggaaagatatagaaaaattcacatagtaaaaattaaaatttcttttttaa

SEQ ID NO: 15979 - DNA, 2256 bp, Heterodera glycines
  unsure (1)..(2256): unsure at all n locations
tatttttcggattgcaaacggatcatcgattacgtgttggtctacgaggagaaggaaatgacgaacagcaattacagcaacaacaacaattacgatgacaacaacggcaccactgctgaacatggtcaatgtgatggtagtgccaaagtcaatgccaataacgacaccaacaacggcaacaataataataattcacgatcgtccccccaacgatcaccccaactgcatgcacaaaaagtgaattgttttccacaaaaaaaaacaatataaaaaatttctaacttcctgaaatgtttaaagaaaaaccttaatttatttaattaatttcccgatatttttttattttcaaaaattttgaaaaatccaaatgtttaaattgtttaataaaaaaaaaaaacttttaagttagaaatttaaaatttccttttttgtaattattttaaaaattttttggcagtgcaacgccgaatttaaaaaaaaaattataatgaaatttatattgaaacttaatttattataattttcaatattttatagcggcaaatgtacgaggaaagcttgttgggccttggacttgaacttgagcacgcaaatgcaactgcaattgtaaaatttttattcccaaaattttttttctttttttccactaattatttaattaagaatcccaacatcaaatttgtgctaattcacgccccattcaaagtgctaatgcgtcaagcggaattaatgatggtccgaatgccagtgcataggaatgacgtgagaaaggtggaataaaatatttattaaactattaattaatgattcaaaaaattcattaaataattaattcattcattaaaaaattgctttctatttaaattggttggtactacttccccatcgaattgtttttaaattttttagcgattttgtaaattaaaaagaaacagaaattcatcaaaattttaaataaattattgaaaaattattcaaaaaatttttcttgaaattttcgtataagaaaattatctaaaattttttttgaaattttctaagaaattctttttgatggttttgagtagcactccagcatcatttgtcctgtatggttcgaatttttgtttaattttttgaacggtatttttgtatattttaagtattattggaaaaaaggatttgaccctgctgccttggaaatgtttcaaaaattaaatgaatttattatttataaatttctccaaattttcaatgaatctgcgagattttttaaacaaacaaattaaaaataattaattaatttaaggaatggaatttgactgatggttttgtgaatgcctgcttgaagcggcttaaatttctggactttgacccaagaataaagaaacggattgagccagaaacttatttttgtcaaccatttgttgcgcaacactttgaatggtgggtaattaattaattgtggtactaattagcaaaacgcgaatttacatggaaaattttttaataacaggaaaaaaagctcttattttgcttaattgngaagcttttaagatgaatttttacattcttatttcccattaactaacataatattaagtaaaaacgttaaatattaaaaataaaattttttaattttattagtaaattttaaaaaaatattttttttttctttgacagttttgttggctatgaacacccggagacatttttcacccgagctgatcgggcccgtatggtccacgatttgttgatcagagcgcggtatgaccgtggtgaaagcatcaacaaattgcgatttggcatcgacaaactgctcaggaacaggacttacacagctgcattcccacttcatgatgtgaaatttggattttcttatacaatttttagtattaaaaattatattttaaattttaaattaattcatataatttttgtttacaaataattttttctgtttgttaccatttaacggttttaatttttttataaaatccatatgaatattttaattgataatatagaaattcttatttaattttggatttttaagaatgagttgagaattttcaaaaaaatttttagaacggaaatgttaaaatcaaaacacattctaggaatgggatttcttaaatgaacatatttgtttaaaacggaataattaaaatatttaaatcatatttttaatttactccaattatcattaaaatatgattaaaatttttaaacctaattaaacttttaatgcaacataattaaggaattgaataaaaa

SEQ ID NO: 15980 - DNA, 2346 bp, Heterodera glycines
ttttttggtacatgaaacgaaatcaggaatttcagcgctaattacctccacatcgtttcggttaagcctaatcgtcgcaccgagtcacccacagggttcccaaacgcataggctacccaggtgccaatttgtgcattcaccaaagcgtcacccggacgccattcacagtttgacgtggcaggagtgacacgatggttgttccgataaagagttgctggcggaccaagaacacggtaatcgacatggagtggcgttgtgtcaaaatgaacggacgctttcgtcaagtattcgttgttgaccaactgaagcgactccttcacccgttcgttgtgcactcgcaaaacggtgggcggaatggcagtctctttgatcatttcctaaacacttattgttaatgttggaatagaatgacgattaaaaatgaaatcgctaaacacctacacgaatttgctcaggattttgttgagaacttttgacgcgttgaccatccaaaacaaagcaaacctaaaagtgttttaattaaattgttgccttgtctgttgtacctccatgggataatacgccgggtccccaattctgcgataattgacgaggagtggtgctttagggtacctgaaatcgagaaataattaccaaaatgtttcttttaagaaagcaatcgtgttggatagtggactcactgaagcgttttccgataggtatcctcgaaatattgtttgacgctgatcttcccgctgacttggtgtgtgatgaatgtgttctccgcgttaagaccatttccagtgtttggttttgtaatgtcactgatgcgaaaaaatcgtccagaagttccatagcgcggttcagcataaattcctggagaatgggtataaaataattcacatcaaacacattcgcattataattagcataccgacaaggccattgcaaagcgcctcgtagtcactttgagtaaaatcgcctgtctcgaatcttccctgattctctcgaaaaaggagcgtctttgctttgtccaaaatgcacatgtccggaatgtggaaggcggactaagacaatgaatgtaacatggtataaattaattatgggcacgactgatggaacccataaagataaacctttttagtttggatgacgatggcaggtgtcatttggccagggccttggtcgcctgaattctaatgagttaactaaaagaaaaagaacaaaccttcaacgattcgacatcccttgttcactcctacaccaaggaatgagtggttggaatcgaagacaggacactcgttggctccgaacccatagtcggttggcgccaataagtaaacacgagacgaagaaaacccgatgaattgctttctgaataagaagtcatttgagttcttaacagttgggttaaattcaaattttaagactccttaatttttgaaatttggatttggactacacctctgaatttagcccgttgaatagttaaaatgttgttaaaataacatgtttattggtttgaataaattcatgcccgtccatgttggccttctgcgccgttgcaatgtcaaggaattgctcaagtgatcgttccattttcgacacgtcgtttgtgatgaaggacaagtcgttaacctcgaagcccgtcgctggcctgatgatgaattcataatgtttgtaccgtgccgcgtctgggcgttctgcggttggcaccgtgccgatgttaaacatgaactttccttccgactaaacgatgtgttatcattaaaatgccaactcccaaagccataaacctcgatctgtagcttcttcaacgtgaatattgttttcgataaatcgtagtagagtaagttcccggtgtctttcagtgactgctccatggtcctgtagaatgccgagaagacctcacggcatttgtcacgacggttgagtaatgggaaactaaacagatgtttaccaagcatgcaacgcatacatactcgtccctatcccgtggaccactcggctctgaaacgcaacactttcggtccgaacgactgctcactgcgttgatggtcacctcgtagtggtagatggcttgcgtacccagcagtttgagaatgtgtgcctaaacccacagtattagctcttttgaacactacagaaaaagacaaacgtttgtgatgagttgcatcctccccttttgtccggctgttcctggcagttttcttggctcgacgaaggtagcaccttgatccaccctaaacatggatcatgtaaaataataagttttggtcttacatttagcccaccctttcgtgactctagaagctgcgcccatttcttcgcgcttcccgtgttgtggtggttttctggggatttctg

SEQ ID NO: 15981 - DNA, 3092 bp, Heterodera glycines
  unsure (1)..(3092): unsure at all n locations
tcagtcgtccgncattcatcgtcgcaagcgtcgaagggcgtgcttccgttgcgctgtgtgctctgctctgttcggaatgaggccgttgctgtcgtcgtgtccagtcgtattggtggagtcgattgctcgggcaattgacgtcgtttccgccggattggtgtgcttggcatttccctcaatggcatgtcctcgtgttgtgcttggatttgaggcgttggttgtttctttggttgaaatccaatcagggtcatgagtgtgatgcgaatggggttcaggaagtaagcgattaggcagggtaggatgacgtcacggcaaagtaggaatgtggaatatgccgaggcgagacgtatccacccattggattatttcctgtagccgttcttggagccatctgacggtccatccttcgattccgccgggtaaagctccgagtgcttcggctcgttgggtcgtgtgttgttccagtttggttttgaagtcttccgagtcttcgaattcgtcgatgtgcggaaagttggcaaagttggtgtcgttgtcgagctgccactgatggaagatcagtgggtggagatccaaatcgttgtccgttttgttgaggattgtttcgtagagctcgtggatggctgtttgtgccaatcgttggacgtttccattttttgagtcgattcgcacccacaagttgggtttttgttgcacttgcagatgatggtagcgaaattgagagcaacttgcgatctttgagatgagtgagaggatgcgcatctccgggtcgaggaatgcgtcttgtgttgtgtttggcagatggattgtgaccgggatgaacttgtagcgagtcctttgttgtccggtagctgatgttggatagggagattggaacgcaggggaaacacttcgattgttgtttcgctgatccatcgggcttgcagattttcgcgcttgaggagttttcgtgcctgaagcgttgggttgctgacgcgcacgttgcgctggcattcctttaagtaaagctgtgagagtgccattgttgtgcaagttgagcagcggaaagctgtgaagcgagttgttcgggttgcacgttgcgtttcggtcttgtgtggtcgctcatgatgatgtcgaattgctcttttggaatgccgaagttctgctctgataagacgatttgtctcccgtcgcatgcttgcacggcatgcgtctcggtgaaggtcagtgccttttgtcgatcatccgagatccaaaatgctgttgtttgaccgttgagcttggtgaattctccgtggatttcttcggcttcttggaaatcgcacatgaaacaattgtcgtttggacatgctgaagtccagatgagtgaactgttgttttgcagctggcaatactcggaagcgtaattgcagtggtctgcgcgatggattggcgacagtagttggagactgtgccatttgacgaacagtgttgctggttgcgcaaaacaatttgttactgagctggtttgcttccctttgaagagtccagtgattggtccagggaaatccacttgaagttggtcgtttgttgcccaaatgtggttgccaacgtggtgcatttccgttttggcgagtgggcattcttgttgatgtgccattcgttggcagagtcgtttggagaccaacggaaattctttgttgatttcgacgaacttatcgccgacgatgttgtgtaataattttccttcgtcgttttgatgaagcagtgccatgccgttgcgattggttccggtcgatggatcttggtgtacagcgtgattgtcagtggtgtccattgcgcggtgagtgcgggtggtggtcggcagaatggtgagttttccgggcccttcagttcccatagtgtgctgccgtggttggaacaccaaaagacatcgcgtccttcttcggtggtgattgggcttttgggccagcggatcaacttgattcctgggcgtggccgttgttgtggacgtgatctgtacactgtagttgttcggtagtccatggtccgtgacattggtgtcgtcgtggttgtccaggcattgggccgtgtggttgctttggttgaccaaattgttgagcgtgttttggttatggtcgccgttgtgcgtggtggatttgtagtcgttgtgcgtggtggatttgtagtcgttgtgcgtggtggatttgtagtcgttgtccacggtggatttgttggtgccggtggagtcgttgtttgcggtggatttgttggtgctggtggagtcgttgtttggctcagactccgattaagggcgaggactttgtcaatgtatcgctggacgtatggactgtgttttgttgccgtcctcttgtcacgttccgtgaataggttgaggaagttggaaatgtagccgccgtgccatgttttgacttccgcaaattgcttttgtcgagttggttgtccttttgccgaactggtgaagagaaggcaaaggaggctgatcagcattaacgagctgatcacttgttgacttgttgacgttccgggccgggctgaacttgttgacgttgacgtcccgggctcttggtccaactccattggctccggcatcgtttgtttgattctgttggcgattcgtcatgcttctccaatttcccggttgaaaacgaagtagccggccttcagttcacgggtgacgtcgatcatatattttttgttgctgatccattgagcgctgtcgtccttggccaggatcaaagttgtttcgatctctgatcgcatgaatcgatggaccattggtgcgatctgcgctgccatgttgtcggcagtcgcttggtatgcgaagatcaagtgtttgatcttcggtccggggatgagtcggaattcgtccgccgggaaatgtgtgaaccatttggcgtcgtagaagagcggtttgaatacttctgcaacgttgtctccgatcagaattgttgtgcagttgtagttcaggtactttggatgttgtgccttggtccgagctttggagaagatttccgccgtgcgattgttgagccgttcgatccattctccatagttgctttgttgttcgtgatccgtcagtgattggacgatacttcacttgcttgcgtgcc

SEQ ID NO: 15982 - DNA, 2555 bp, Heterodera glycines
cggaaaaattttttgaaaatttgaatgcaatttattaacaaattttgtacaaaaatgagcaaaattcgcgagcttggagtaatttttaagaaaaaatataggaattttgggggccggcagtgcagataggcgccgccgggggaaaattttaagaatttatatgaattttgttagaacttagccaaatttttcagaaattttcttcttttagatgaaaataaggcattacccccaaatcagaacatttcttagaaacaagaacataaagaaaccctgtattaatcagaaaaaataaataaattaaaggaaaacgttagccggaatcgaactcatgacaaaagtactgttagtattgaagcactatccaccaatccacaaataaaataaaaaacaagtaaaatttattttatttcataaaaatttctcgatagttaaaaaaaatcaaaattgtctaaattttttgccttatttcccacgaatatgccattcttaggggtgtattttcacccccgtgcccccgcgggggtgaaggtcgcgggggcgggggttgcgggggtcagagtcacgggggcgggggcgggggcggggctcgaaccctaattttaaatgttaaaattatgattgaattcccattgaaaaaggaatcattttgaaaaattagaagaaaaaataattacttggagaggaactaattcaacgcaaaccttaggaacagaagcaagacacaacaacccactggaccacgcatatgagtaaagcaatgaagcaaaaagttaccaaaaatacattaattttaaatttgcaaaaagccaatcattaggggtgtaaaaaagtctcggtatagagtctcgaagacaggctcagggatttatttgtctttataagcgaagaattggtaagggaagagaaaatggaaataaagttttcgtgcttctctcgtgaaaagttacctgtaaaaaatataaagcccatccgtggtaatatatttatacgtattataaaaatagacataaattttatattgtatatataatttttatttaaaaaaaattgtcgatagtcacatttttgccatgcttttgattgcgtggcagaaacacctaaaaaaaagaatgatttccttttcaaatgccaaaattttattataggcgaattattatccatttactccctaatcatttgtaaatttttaaatgtaaattattttaatttttgccttttagcaaatccccgcttttccaaatgattggcggcgctaaaattcttttttccgctttcatttttatgataaacattgaaggcattttcagcacttacggagatgatttatatgcagatatttgggaaaaggcttttccaaaaaattcacaaaatttaatggcaaaatcaaaaaacggcaaaaaagttggaaatgcgcaaaaaattattgtaaagcaaaaaaagacggacgaaagacaaataaaattgggtgaaaaaaatgtaaaaattgaagaaaatgagggggggacgacagcagcagaagaagcaaaagtcaggaatgttcagaaaatgctgaaaatagtaaaaaatgagccaatttttgacgaaaagattcaaattgatgaaaaaagcggccaaaatttccaaaaaattcaaacgaatttaaaatttaagcaagcgaaaaattggccaattaaaaatttcgaaccaaaaaccgaaaaatatgaagaagaatttgataaggtgaatggggaaatattggatgaaatagccgaaaaagcaaaacaaaacgcataaaataagtttaataagaccattaatgctaataagtagagaagagcggggccgggaattttgggcaaaaccgggaccgggacttgccgggacctgagaagccgggatcgggaccttggaggaccgggaattctcgtcccggtcccgctctactgacaaaaaattattttatttttcaaaaggagaatcaaatgtccggaaatttgttgtatccggcattttaaattttctctgaaatccaattcctagtaataaaaaagataaatcctaaaaatcgcattgaattagtgagcattcccgagaaaaacaaatgatacgatcactgaaaagtcaatgtttaaggaatatgaagaaagcaatcggataaagcaggcaaattccaaagacaaaagcaaacattctgatcattttgatgaaaaagaaatattaaaaataatcaaagaatttgacaaaaggagagaaatattgaaaaacaaaaacatttacaattggaaacaactgaagctaattgaacgagaaattgccagggaattggggacaaaattttacagaattcgagactggaaaagggaatttggactggtgaaaagagcgaaaaaggaggacaaagaaacaaagttggcactgattgaacagtttgacagaatgaaaaatgagcgcaaaatgaaaaagggatacaaaaatgccgagaaagtcggcattgaatgtgaaattgccaaggaattggggacacatcgggacaaaatttacaaatggaaaagcgaattattaagtgggtgaaa

SEQ ID NO: 15983 - DNA, 1900 bp, Heterodera glycines
gaaagcacagaaattatggacaacaaatcaaaataccaatctttgttttgtatttaacgcggagagatcactcactgaaaacgggaaaaatattttcgatcattggcccattctttggaattccctcagtttccgatgaatgcgattaccctttccccctctgccgccacccttttcttcatttactccttgcttcgtcattcgtctcattcgtaatctcacccccttcccccaatccaatggcatcagacgggggaaatggcactggcaaatgtgtggcgaggggccaaacaaacgaaagtgcgctgctaaacaataattttcctcaaacgcgtcatcatgggaattggaaggtggcggagggggcgggggacagaagaggggtaacggacccccggggggaaaggggtgacgaagtcggcaacgacgacgacgacaacgggggattattggcccagccgaggacaacagcagcacagcagccgataacatctttttcaaggggtgtcagtggccaatttgatggcaaaatgctcctcttttgaagtcccttttgcccctctcccttattaacttcggcccaaaagcgacgaaagtctccgccgaccgcgtccatttccttccctttcttttaccatacgaggaggagaccatggccacaaatactcttctcttctgatgcctcctctcatcggattcattcatttgctcccattttgcaaatttcccttttccgctctttcgtccaatttcggcattaattcatcgaatccttcgctgattaggccatttcgtgcccgttcatcggcatcccttaaatagcttatccctcgcccaatttatttttgttttttctttccctttctctcttttctttaattcctccaaatttcctctttcattttcactttttcttccccgaggggcgctatccccgcaattaatttgttttgaggcacataacggaggaaaagcaatgggaagtcatcgcagaatgacaacagaagaaaagagaagcgatggcattggcattggcattggcacagtacggccccaccactcattcattctttcattcagtcattcactgctccgtttttgccatttaaactttcttggggaaagttaaacaaatgcaaatcccccgagggaacattgcaaagccaactacggcatttcggaggacaactcaaaaggcagggcaatttcctcgacagaactctctgctctcttctgtttgaataattagctaatagccattcattccaactcaaaaattttaaaaaaccgatttttattttattgatgaaattttccatttttcaaatttgtaaattcggctcacttttttttcttagaaacagggaaattggccaataaattgcttttgccctcccaatctcccaccttcgccccaaatacaaatccatccgctcaatgcctcgtggccacggcttatgccaaagaaccgccaaatccctcccgcccccgccattgctctgctcccaccctcacaaccgccctcatttttcattacccagccaaattcatggtgttgtgtgccatttgcagccatgccaaccaattgccaattggtcagccacacagcaaacattcattgaaggcgttagccgtcacatttcagcgaatgcttcgcgcaatttgctgctatggcattcgaagcaacggcactttccgccccattttcccacacttttgtactgttttccctcatcttttgttgtccttttttctaaagaaaaagaaagtaattggcccaaccgatggacaaattgcgccattcacagctcttccctgacatttccaaatttggccatgcaaaatgccattcattcccttgggaatgtaaaaatggggggcgggaaaaagttaaaaagtt

SEQ ID NO: 15984 - DNA, 790 bp, Heterodera glycines
  unsure (1)..(790): unsure at all n locations
ccccccccccccccccaccggtccccggtttgagagtgtacaattcctcacctcaattcttcgctacccaatgcattgctaatgaatgcatttaaacacactaattgactttttcagttggccgagaatttattcagattaaaacaataaatcgaaagcaagtgctaattgagtttacagattttctttttttttgtgtttgccttttcccagatgaaatggccaaagggcgaatttgtggccaaattgaaggggcgggagagacccctccccctcccccttatgccctttggcagtcactcaatcagagttcttaaattggcattgacatgctaataggaagaagcttttgaaggagcggtcaaaacggacgaaataccaaaattttatttacatgctattttaatggaaattttctctaattccgtctgtatccgaagccgaaatgcccagtcgatgctctgcgggcgtccatttcctttctctctcccaaattgggccaattttttcgatctttttcctttgctcacggcgtttcgctgtccctctctttctctgcctccctccccttttgcgcttcttcccttttgctatttttgtcccttttccttcccccctctcttttctcttcccccatttgtaccacccaattaattgggccatcacaaattattaatcgtcgtcatgcccttgggctgtttggcttattatttgttattacttcctctgctcacgtcaaattccatgacaaaaatattactcanaaaattgcctcggtattagaagagga

SEQ ID NO: 15985 - DNA, 3501 bp, Heterodera glycines
  unsure (1)..(3501): unsure at all n locations
caatgacgtggagatcttaatggctgcgttggttgcttttcgtcgagaattcattgggattcaaaggcggcaagagtacgtcgatggggtcgacgaccgggagaaccacgacgagaattgatgtcttacgggagtgcatgaccatcgcaagtgcgtgcatgaaacacttccgcaccaatcacctcccggctgagcacctcgccattgtacctgagcgaggatatgacaacgctcaaaatcagtccctccttgcgcttcgcttcatcaaatggtatgaagaacggcatggcgtccaactccaaactgcgcattctgccggtggagagaggaaagttggcaattactctctcgatgcttgggttgaagctgaacaaagggccattgaagtgaacggtaattttacttttaaacattttaaaatattgtttttaaaaataggttgtgtgtggcacgggtgccaaaagtgctttccggatgataatatgctgttgccaaatggaaaatcggccggagaagtgagggagcgggacgcaaagagattggaatttctacggaatcaaattggtcgtgtggacgtttattgggagtgcgagattgagcgaatgcttgctggtgaccgggggatgcggcaaatgttttcgaaatatgttgatgatggtccactcgaaatccgagccgcctttatgggaggacgcacgggaccattgaagctcttccggaaagctcgggatggagaaaagatttcatactacgacttcacttctctctacccgttcatcaagtgaaaatatttattttattattttcataattataaaaacatagctttacgactcgctaccccatcgggcacccaagagtgcatgtgctgaacgaagaggtggaatggacaacatcggccgacaacccctacgatctttcacttctgaaagtttgggtcattcccccgcgaaactgtgatgtgccggttctcccagtgagagtgggtgaacggctttgctttccgctttgcatgaagtgcgccagcgatcacccgacaggcggagttgatgaaaattaccactgcacacataacgattcacaacgtggttgggtcagcacttgcacatctttggaactgaatgctgccctggacgagggttatcgggtcaccaaacttttccgcgtattggaataccaaagcagcgatgatcaattgttcaaatcgtacattgcggaatttatggcgctcaaaatccaagcatccggctttgacaccagtatcaaaggcaatcctgagcttgaggaagcgtttgtgagggagtgttatgagaagtttggcattacaatcgatccaataaagatggagccgaacaaagggaaacgatcgatagcaaagctctgcttgaataacttatgtatgttgtctttaaatatattatttttaaataaatttctagggggtcgattctctcttcgcaactttgggctgtcgcaaacactcatcacagatgaccctgtggttctcgctgaatatttggacaaccggtcgctcgaggtcacagcgattgacgaattggacgctgaacacatactgatcagttatgagaaaaagaaagagtgggtcgaggaacatgcatgttccaatattggtataataatttatgaaaacaaaattcaataattaatttagtaatatctctttggacaacttcggcggctcggctggtattactaaaggcaatgcagaaggtgaaaagggcaccaggctgtgagctactttataccggtaataaaaataaataaatttaaaaaatgaaaattatttttcagacacggatagcctcattttggtccatcctcttgaggtgtgtccattgcaaacggggcctcatctcggacagttcactgatgagtacccgaaccatgagattgaagagttctgttcaggcggagcaaaacaggtacatatttaataacttataatttactaatttaaaattcagtatggtctaaagcttcgccgaaaagctgctccagctgacgctgaaagcgaatatgttctcaaagtgcgaggaatgacgctcaactatgacgtcattcagaaccaagggcttcgatatgagacattcaaggaaaaagttctgcgatatggtgagaccggtgaacctcagccgatcaacattacttacccaaactttctccgtcccagcattaagaatgggagggttacgtcttatccccttcacaaaatttataaaccctttgtcggtaaaggtattgtcggagccgaccttagtgttttagattttggccacacattgtaatcatattgcgcatttcctttgtatttttcatttttttgtaagcatattaatgaatggaaaataaaatttgaaaataattaagtgatggaagttgttagttttaggtgaaaaaatgcataattaatgttataagacacaattttaaaagactactaaaatcgtatttttgctataaacataattagggaatgggagttgtcatttttaggttgaaaagtgcataattattgatttgaagatgaaattacaaaaaaatacacagaaatgtggtaaaatatcgaatttaacacccaaatatgcacatggcgtatgtgagtatgcgtatgtgtgtgtgtgtgtgtgtgtgtggtgtggttgtgtgtgtgtcaccaaaataaatctggcgattgtgtgcactgattgcggccaacatcttttaacgtttcatcattatcatcatcatcattttcaaaccgacccgacgtgtgtgatggggtcgggtccctctctgcgaataagggtcctgaccatcgttgccaaatagggttgtcctcagtaagctcaagcaattccatgggatagagccgatcctcttttccttttgagaatcgttcaattatgcagactatataaggatgatgaagcttgatgcgatgccgagcatagaaatgagctgcgatgttgatgttgaaagggcgagagagacaaccgtaggccattgtaagtgcagcacccttttccgataaacctccaatgaagaaggtcttggtcattccgtttctgtccttgtatgttgtcgtgaccttgcgaccctttagtgaatttaatatgtaagtgcggtcttcaggatggttcagtcggtcgcgaagctgtgaaactcggcaattgagaagctcagcacagaacacactgagaagaaccatttttgacaagaatacaagaatgagcttatctgctgaaggagtaaagcttttatactcatcaccccactcataatcccaagccatactttaattttcaattattttattaagcatcacagttacaaataaatcgggntggtgaattgtagtcaagaattcgtaaataatttggaaatgaatgtccaatagacatgtggtaaataaatacaatgcaatgatgtgcacatgttgatgtcaatggtgattgatacatattgccatttcttgtataccatttttgatttatttaaaaa

SEQ ID NO: 15986 - DNA, 1928 bp, Heterodera glycines
atcatattgcgcatttcctttgtatttttcatttttttgtaagcatattaatgaatggaaaataaaatttgaaaataattaagtgaggggaggtgttagttttaggtgaaaaaatgcataattaagtgttataagacacaattttaaaaactactaaaatcgtatttttgctataaacataattagggaatgggagttgtcaattttaggtagaaaagtgcataattattgatttgaagatgaaattacaaaaatacacagaaatgtggtaaaatatcgaatttaacacccaaatatgcacatggcgtgtgtaagtatgcgtatgtgtgtgtggtgtggttgtgtgtgtcaccaaaataagtctggcgattgtgtgcactgattgcggccaacatcttttaacgtttcatcatcatccacatcattttcaaaccgacccgaagtgcgtggtggggtcgggtccctctctgcgaataagggtcctgaccatcgctgccaaatagggttgtcctcagtaagctcaagcaattccatgggatagagtcgatcctcttttccttttgagaatcgttcaattacgcagactatataaggatgatgaagcttaatgcgatgccgagcatagaaatgagctgcgatgttgatgttgaaagggcgagagagacaaccgtaggccattgtaagtgcagcacccttttccgataaacctccaatgaagaaagtcttggtcattccgtttctgtccttgtatgttgtcgtgaccttgcgaccctttagtgaatttaatatgtaagtgcggtcttcaggatggttcagtcggtcgcgaagctgtgaaactcggcaattgagaagctcagcacagaacacactgagaaaaaccatttttgacaagaatgagcttatctgctgaaggagtaaagcttttatactcatcaccccacgcataatcccaagccatactttaattttcaattattttattaagcatcacagttacaaataaatcgggtggtgaattggagtcaagaattcgtaaataatttggaaatgaatgtccaatagacatgtggtaaataaatacaatgcaatgatgtgcacatgttgatgtcaatggtgattgatacatattggcattcctttgtataccatttttgaatttatttaaaaaattttcgctaatctgagggggtatggttaagacaagactatcgaaataaatcactggtccttccaatcccctagcgtaaatagcacaccaatgagatcctttcttgttgtgagggtctcgatttacaattaacgccgctggatactccaaagtgcctggtgaaggtaattgatcgctggcataacatccccgaaagatttgggccgatcgacgattttgcatcaaaattgacgttaattctattgcatccatttcaatgccttgtctttatccaaagaaatgagcaaaattgttgtaacagtaagctaacaatcagcattaaatagagaacgagaagaccccaacagattgcttgttgataaaaattatccccttccgcacggtctttgcaaagctgaatcagaggaggtagaagagaggagactggcgtgttttcgctcaacaatttttcattctttggaaaagtcgtcaaaattgtggttgattttgtagcagaaggcgttgaagtagtaatggaaaaagatttcctttttagaaattctggaaggcgagtagtgatggtgtatgattttgtagtcctactcattgtcagtcttcttatgtattcagggtattcagggatttgttcctcggaaacaacaggtaaataaatccgaataaagaataaaattatagaaagctgtttgtaattcatatttattcaataagaatttttataaaagtggctccttaaatagtgatatcggtgcttattgatcgg

SEQ ID NO: 15987 - DNA, 1733 bp, Heterodera glycines
gacgaaacgttcttgccaccaatatttccgattttaaatcatttccttacgcgagtaagtgatgccgcgcaaatgtgggctcataacagcggaatcgctatcagacgatggctcatttttgagtttgaaaggcttacagccgccccaaatgccgtaaatgtaaaagacaaaaacggtgaaagtggcaaataaaattttcatattgaaaattaaagaattattttatttttttaattttataagggagaaaaacaaattgtcatgccaatcaaatgacgtaaaaacaaaatacacatttattattattttttttcaaatctctcgtcatttacttccgttaacatcagactatcatcaaatcaatttttatgttaatttctcgaaataacaaatctcataatcaactatatttagcagccagttacatacatatgttgtatatatttctatgattttattttttcatttagtcaattcataaagtttgatggcatttcttcacctcggaactattaaattttaaatgattagaaggcataagcactcaaaataggggacaatcagtggaaaatgaatggtctattaattgcttaattcattccaaaataaaaaatatcccaaagaaatttgcgtgtcttttattattccaaattaaaaattgaggaaaaatgaaaataacaaaaaaatcaaattgggatagttttgttcatcatccgttcggttggtgctgctgttcaggcaccaattcctccaacgaagtgaccaccgtcgaggcgccttcctcgccaaagatcagcccaatgtttttgcccgttctttgcaccttaacttcgacaaaataagaaaagcaaagtctgtgccgtttccactcacttccaacggtctgctgatgccttgctctttggccccgaggccggcgccctggcgatagcccattttggactaaaagaacaatttgagtgggaaaagagaagccaacagacggagacaccgaaacacattattaaacacagcatttcaatttggcctcccatttcaaaaagcaatcgcttgtatggctcagtggttgaaggaaaagtgatcgcggttctatccagcccaacgacgcaaacattttcatcaaaattaaaaaaggatgacgattttgtaattattttgaaggttattgcaacagaataggacagttttgggatcatttgaagtctctagaagagaaaaaaaaactcctaaacaaatgttaagcaagcaattggaagtgatggaagaaagtgatgaggcttttaaattgtttttggaataagtccataaatgtctgcacatttctctatcaactctcttttttaaaatcagtgtaaaaataaagaactaaaaaaactgcttttttaaaagactcgatttgtttttaaattaaaaaacaaagtttgtaaaactattgttttattttcaaatttaggcttttcaacccccaaacagtgggaagcatcgcaaaaatcgtgtgcaggaattcataaacaattccaaggtaaaaaagcaacaacaactcaatttagcaaaaattttgcccggcggcgcttgtcgggtcgacaccgcaagacactaaaactccgattttcttattggctcgcaatcaaaaccgcaatccttttttggacaaaagaaaattgcactcaaatttccattttttgaaaaaagtgcgccgcaaaatgtgaaaagcaacaaaaaaaaaatggtcg

SEQ ID NO: 15988 - DNA, 1412 bp, Heterodera glycines
  unsure (1)..(1412): unsure at all n locations
tgtaaagatgactcgagagtttttttattaataataaaatataaaaagacatttntagaaacataaaaagaccatttttagaaacataaaaagacatttttagaaaccaattttggaaagaattccgataaaggaaaaaccgatcaaaatgaatggaattcaattaagagtaaatttgttttaaatcatattattaaatgcttacctttaaccgttgttgctccctaaaattaaaatttgttgacagaaaatgaaaaaaggtggcccaatttaagaaaaccaaaaaaaaatgttgaaacaattctcttaagtcggggccattcatccatttggtgcaattttaccttttctgtttaaacgacgaataatcagtgggtgcggttgggttgtactcgtcttccaccatcagttcaccaaacaaaaatacctttatagggaaaaagtaatgcccaattaaacacaaaaatatttttggcggcgcaatcgccggacaatccgacggagttggcagagaaatgatcaaagaaaaaaaaatcataaaaatacaatccttacacgtaatactcactcatttaattttctaccatggccaatcccattcaaaaaatgcaaaaaatagtcgttaagacataacaaaaatgccgaaaacccttttccagtctgttactttgtcttctttcagcgatttcggcaccaaagtgaaagcgccggtcgaatcgatgggcaatggaattgctttgtgtggcttcagcttgaacgtgccgcccttcttgttcagcagctgaggcatattcggaagagtggcgggtaacggctgcgcgaaggcaacgccgggggctgatttctgagaaaaatgtaccgaataaatggcaaaattggccaaatgaaaatgcattttttagctttaaaaattgccgaacattttgcgaagcggcagcggccgcattctgtagaatggctttcttggcttcgagttgcgatttgagaaaggacaaattcattttgttgaccgctgacactgctgagacggtgacattttggggtttttgagcagagtttggtgtcggaaagtcatcagctgcactttcaaatgtttaatttaaaaaaatccttgtcaaattgtcatttttttctttttattattcattcatttgctgtcccatttgtcagcttaaccttttttctccaaattctcttctttgacctgcactgatgttgatgattcaattccaatgtcgtcgtacagagacatttaccagcaaatcaaaattatgtagtgaaaatataacttaactacctatttaaagaagtaaagaaccgaaaaatattgagtccgaattttgaaaaatttaagacaaaatcaggcattggataaaacaaaaacatcccaagggattgggtggaagtcggcg

SEQ ID NO: 15989 - DNA, 1691 bp, Heterodera glycines
  unsure (1)..(1691): unsure at all n locations
taatttaaattacaaaagaaaccaaaacaaatattatgttaacaatgtntaataaatttaaattaagtgatntaattgataatttaccgtttatatatggttaagaactttttttntaatcgcattttgcagcattttccttgtcataatcgcaatggcacatttgcggacaatttcgggaaaaataaaaaagtttcttaaaaaaattatgattttttttccgaataaatgaattgagactgtaaaaaagcagcttaatattttactgaattaactccccgaaaagattttggagaattgcgaatgtcgaaactattgccgtcataatatgctgattacggctgtagtatctttgaattttgcacttaattgttaaagaatattgtgaaaattcgaaaattaaaaaattctaaatgttttatagatacctatatttaatttgtttctttacaatgttaaatcaatctttttcaggctcattaataaacattttttattgccaattttatattatggatttccttttttaaaacatatttttttatttattaaatatttattcactgatttaatttccttgtcatcttttgtgtttacgtgtctttagaaagaaggttagcattttgcctgatttgctcagctttgccaaacggtccttggcaaaaattggagcgaaaggatcgtctttttattttgctcataatatctttggttgttcaaagacgcaaaaaacaaatttttaataaattattatattattcttttcaaaactatttgtttatttaaaaaaaaatttagaataaacgacaatgttcgaaattttaaaagttgcaattttatcaatattttttacaagtatttttgctgaatatttatatgattctgtccgtatcagtgaagcacaactttctgttaaaatgaaggacaaaaaggacaaaagtcgaccattgggaaccgtagagtaagctcaaatcattggcataacagccaatatttaataatactttttatcggaattaaattaaaaaaataaaaataaattaatctcgaaaaaacatttttatatatgtataatatacgtagtacatatttattatttattcattaatttaactattttcaattttttaatattttttagtgtgccgctcaatgaaaaactctcaaaattggtgcgtctcagcaaaaacttcatcgctcaaatttcgtttagagttagcatataaaacactcaattttcaatgccatttgctaattctcagattgtcgacggtgccaacggtcgcccaattgaaaatttgcaacaaaaattccttcgcttttcccattcaaaatcaccagaacatgaagtgttttttgttgctaaagaacacaaagaatcgaatggtcattaccaacttgaaatggtacaaaattttctttaaatttctttttttttcaaaataatttaagaataattaaattatttttgtaaggtaatgtctcgcgacttcgttctgttcaagtccaggcctggcaaatacaattgtgaacttatccttggcgatagccgaattcgcgctggcctaaaatggcaaatatttgatgcttttttggacattccaaaagtaaaataatttaatttttgctaaatttgattcaatttctatacaaatgattttgtgttttttccagtctcagactctnnagag

SEQ ID NO: 15990 - DNA, 3409 bp, Heterodera glycines
  unsure (1)..(3409): unsure at all n locations
tgcaggtcaatannttgtgaaattngnnattttttgaacnntcgcatctccaaacttcctttcatcctatcagaactcattttgcgaaggtgtaaaggtggcctttgtaagacaattttactttttgttttttggttgcaattggttagccatttctgaaaaatgtccaaatcagaatgtacatcaaattggttaactattaaaaaataataggatttggaataagtaaattgtaaaaaatgagcgaatgttaattaaaccgaacttatgccaagtggcgagggatccctcaggcttagtttttagaatcttaatttttaaaaaagcacatttttctatttttgggttggggcccaaaaacgggggcccaaacgctctggtcccctaactatatgcacttatttgttcatattttggctacatattttcgcccatttgtccatttttgctgtgctcttttgtctctcaacaacacccacacacattgtcacattgtctctttgtttggaaattgttcgggtttccgccttggcctttgtaggtgaaaaactgaaaattgaaaaaggaagcatgtatgacatttatatgatttgataaaccaaaattttttgcaattttccaactttttaatgtacatttaaattaacgaaaaaaaaatatttttaaaaatttattaaaaaacaaatgattttgagttgattttttagagaatcctccgttgtcatgacccataaatcaaaaagagttaatcaatcatttgattgcttttatgtacctcacaatgctggccgtcaaaccaccatcgcccaagcgataaattaccatttccctcatctttgggatgattacacgcctaattaaaaaataataaacaattaatagttaattagccgaattgtttagaaggaaacttaataagccaagcttaaaatgcgtggaaaatggacgaaaaacggggacatgcatttttgtgagttttatcaactcccttcctcccttcctccccccccccccccattttacatccggcggcttccattcaaaacagacggcaagtgatgcctaaacaaaaaacgaaaagccgacaaatgttttttttcaaattaatataccaaacaaaaaatcacagcaaaaagcgacgtcgtcgaaagcttcgcatttgcggagagttgcataattttgcggggttttaccaatttccgtcaagtaaaatgtttggggacaattttggactaatttctttgattttgattggttgacgctgcaatttgtgccctttttaagcgctgttttggcctccccccaaaagactttgttcaccaaaatgcattagtaagcagcagaaaggtgcaaaatggccattagtaatcatttaaatggattaataaaacacgaaatgtcaccataaaagtgtcaattgtgtgatgactgatcggataaaacgaaataaaaaacggcaaaagttcgcaaagattgcagcccaaaaactattacaaacacaaagttttttgaaattggggtgattgaaaggcagcaaataaatgcttaacgcttgaattttaaaagtgtaataaattaattattaattaaatttgcatcacttttcgcatattttatttgctttttcgttttttttatcaaaaacttaatttgtttacgaatttgaagtccaatttcgtgattatcttttcttcagttaagtattttcctgcggtgctttcggcacaattaaattttaataacaaaaattctttcgattcccacttctttttctgattgcgcatttgcctcattgatcaattgatcagaggagtataatcaatttgttaactgatcattcttcgtatcaatgatccatttattgattgtttcattcattgctttttgcactgaactgtgatactcaatctacgaattggtattagttattgattgatcaaaacaacctaatccattaattatgattcaagccactaattgcttgggatataactcggtaaatttaattacacatgctaataagaacagtatgttggcagaaatgtttgagcatggcggagggtcaaggaattgaatccacgatttcctccgtgctctgatcagttccaacggggcgccatgtgccccggtagcacagtggttccgcttccgctctgctggaggcgtgggttcaatgcccacccgccgcggtggtccaacatttctcatccaccccgtttttttcttatttctgtgtatttccatcccaattttcagcttggcattcgcactttgccctcctttgtgccgcatccgctctcctcaaatggcgacagaatggtaaaaggacggcgtggcattccattcatccgactggcccccaaaaatagaaatgtttccgggttttccgaaactcgacttttttcccgaaccgggacaatccctacccaaaatttaaaaattgattaattccaaaagagccaattttcaaaaacaatcgatcgtaggagtagttacggtagagacgggcgccaattttgggatgccaaaacttcaaataatctgaaaacactcttatctggatcgatcaatgctcttatttttcaacctttaaaagagtttcactggtcgacttaaaaacgtcctttggcatttgtccggcattgaatttgtcaatttgcccgaaggtcggctttgaaaattgtgggcaaaaaacattttgggaaattgtccttttttcagcccttctgcacgacgagaacaaaatgtatgaacaaagtcagtggtgatttgctttttgtgtaaaaaatgcttatcttatcggattttctgatcagatttgagctatttctgttgttctgtcccatcctttcccccgattctctgactgatcagggctggtcgaattcaaccaacaagcagatccagaaactcgagacgacggaaccaaaaaattcggaattcaaattttgcttagccccttctatgagcgaaaagcagtgattaaagggacaaagaaatggaagcactggaatggtgttgggtcgttactcaaaacccacaggttttcttatgttttttcataactttttgggaacttaacgaaattttttagcaaggttataagcataaatttttattttgatggtttttgagtaacgctataactccatttgaatttgtcttgcctaaatgctgctctaatcatttgaaatgcttaatgagcgcgcttttttgacaaattctattccgatcatttttgatctgttctccgtttttctctgacccatttgagtgatcattccgaccattgccctccctctcttctttcattccgtcctctttcgtttgggttactcgccgatcacttcgttcctaattcccggcatattttgtatgctaagactcggcttattacctcaattttcat

SEQ ID NO: 15991 - DNA, 2396 bp, Heterodera glycines
attgaataaaaaataaaagaaaaaagaaaaattcattcaaattttttgtaaaatttttgttcattatttgtaagaaatttgccggcatcggaggacagtggcaacccgctcaaatcttctgaggataaccaaaaacagcagcagatggatgaaggagaagagaaggaagcggaggagagcaaagagtaaaaataaaataaaattaatatttagttaataaataacattcaaattttttgtcaaatcttttttaattatttgtagcaaaatgccggcatcagttgacagtggcaatccgcccaaacccaaattgaaagactatcagaaacagcagctgaaggatgaaggagagaaggaagcggaggagaaaaaagagtaaaaaaaaaaattaaatatttaataaaaaaacaaataaaataaaaattcaagcgaagacgaagaatggaggagggtaataagcacaatgaaatataaaattaaatacttaaactgaataatatttttatttttgtaattaaaaattctcagaactttaatcaacatagaaagggtaattttcgatttcaaatcattaaaaataaatatatttaaatgcaattttatatgtataatttttgccaaccaattttcagttctaaagaagactatgaacagaaagagcagcagctgaagaagacagaagagaagcaagtggaagaggaaagcgacgggtaaaaataaataataaaaaatgaaaaagtaaattatttatttattataatattaccatttttgctaaatgcatttggcatataatttataggaaaatgacggtgccaaccgacgaacacaccactcgtcggcggcgtgaggagagcgaagggtaagaaatggaattaataattaattagttacaactttccacccaattaagcgatgaacaaattctcatattgcatgctcaaatggtggcacaatcagctgctgcagcagcacaagtagaagcaggacagttgaaagggtgctttcgccttccttcttgtgctaagaagacgaaaaaggaacaacaaaaaaagtccccaccatattgtgccgccgggaagaaataaaaatgccaccgctcaatttttgtcttttcttatcttaattgcttttgtttggatttgtttaatcttaacttattttatctttttaatttggtttgtttgtttatttttacaattcattttttcatctttgatcactgctcattttgttttattgaattcgatttgcttttttactacatcaataaataaatcgagaaaaaaaactttttttttaatttaaaaactgtgaggatggtgagtctgaaaaaattactgaagcgatttggggaaaggaaaatttaaaaaataaattaattaatatattcccttaaagcatttatgtcaaggttgaaatggcgatgtggcgaaattaaattattgataatttcctagcttaaattctgaaatatttctttaattttaaatgttttcaaaaacagcacaaaaaatccgtataattaaccttgttatgttaaatttttccaaaatcctaaaaataatattttcttcgaaatatctttcaaaatcatgtaaaatttttgtggtttccccgaccagtcggtcccaaattctcggtcccgaactactctacaaaaaaaatacataaaaaaatttgatagcaaatttactgatgaaatttcaaaatattactttaactaaatctttcagtattttgtcccttatactaaaatttttaagattttttaaagaaattttctttaatgccttaaataaaccgaaagttcgcaatttttcctacgatttttgttattacataatttgagttttgagaataggaatttcaaaaaaatcttatcttttatataagtcactttgtgccctaattcatgctttcctaacaagcatgccagatgtgctgatttgtcaacattttgcttgtttcaagacaaatagtacaaatttttttttttttgattttttggcgtgggaaaattgatgttatcaattttatttaaacatagtctcgttcattaagttccggcatcccccttcctcccaaatagtgtaatgcaattatggcataatgcatcattaaactgtgatcaaacaataaatttaaacttttaattgctgacgttgtccaagtggttgtaccggtatttgcgccgagacacttgcgcaccaggggtgtgacttgtctcagaaaagacgagagcgagagtttggcgagaggcgagagtccccaaaaagacgagagcgagagtttggcgagaggcgagagtttttcaatttttttctgtagccttattttttaatttaaaaaacttcaaaatcgtatattaaattaggggtacgggcctgggtatt

SEQ ID NO: 15992 - DNA, 1699 bp, Heterodera glycines
cggctcagttaccataatttcaggcactgatcgcccatttttctgccgatcgcctctcaattggtgcccggtcctcaccaatcgccggtggccccgaccgatagtttcccgaatggaatttctaatcattcgtcgtaaatcgctgctgcttctctggtgaactttctgttgttgttgctgctgctgctgctcgtaatgccttaataagatttattgcattattattaacccatttttattgcgatttttcgcaattaattggggcaacggatttgatggaccaccccagccaaacccaatagcttcagaacggataatatcatctgatccaaggtgatccaatttgaaaacactcagcaaagaatagtgcagaaaaggaacgtcgggtttaagaaaaacccggaaatatttcaaaattattcgcagccttcgcgaattaatatagacaaaaaggaaaagcacaaaagcaaaaggatgcttcttctgctggacaatatcggagaattccttgatgatggctgtttatacatttcattggtcaatgatcattttgtgagcataccaattggtaaatgccaacatttactcacctcagctgttcagcttcgccgctgcttacggttgtggacggtttccgcacaattgcgccgtttcctcggccaatcggcggggcgccgccgtccatcgccgatttgcggcgttgtgcgtttgccctggcgatgaagcgcttgtgccgtcgccgatgcatgcggaacagacgacggacgcacacgcgttggccaaactcggagcgcaagcagcagtggacggacagcgcacagagcaccaccagcacacaggcgccggtgaacaccagggccggatcgagctgacaatgcgcaggggcgtgagatactcagcaatgacaacattttacggtgattgattgattcaatttaggaaactatttaaaatagggtattgaattaaatcaaaattaaaattcaagagtctcgaaatgcgcgttggttgatcacctggcaacagtcgacgccgcaacaccaggaccaattgtgggagcagtgaaagaacacgtcgacaaacggacgccgtcccatgccgccgcccgacctttggtcgtcttcaaaggaaatgtagaacacatcggcagtcggcactttcactcggcacacttggccaacaccgatctgtacggacgcagaaacgaaccgttgagcagcagcgagtccgtcagcacttaaataattgtaattataattatcattattattatttaaactttgtgatatttaaaattaatcattgaataaaccataatttaaaacattgagtattaagacttatgtctctttaaagttgagaagataaaaaaaatagtacaataataatggattcaagctttctatattttttacaattttattttgcttaatacatacacttaattcatagcccgtagttttaagtatacgaattttgccaaaaaatccgtgtatatatcagaaaaatgatacaaataaatcttattaagcgctaatgagtaaataagtcattagataataaagcaagaaacgctttttatcaccttcccattggcccattgcttttgtcgtccattccgtcgccaccgtcgccgactcctccgaagtaatacagctgcgctggtctactgatcagatgcaccacactgagctcttcg

SEQ ID NO: 15993 - DNA, 1663 bp, Heterodera glycines
  unsure (1)..(1663): unsure at all n locations
ggggacctctagagtcttggcgaatttggaaatgattggtcttgggtagatctcctaggtgttcattttatcgcttttcttcagcttttcccccgcttcacctccccttttgtctgccttttttctgctgctgtcgttttcttatctgaccaagcggcaatttataagacttttctggcagtgcggagaatggcactgttagcttcatcagcttcaatccgattgcatcggaatggcgccttatgcttaacaatattcgttaaaatccaaagtgattaataagtcaaataaaatttattttagtttattaaatgatttcattgataatttttaagatattcaaatatttaatttctatacaaaattattagatatcatcgcgatgcgttcgcttgtctttcccagtcgaaaatttgtccctttttatttgaaaaaacaatctaacaaatgacaagtaacagacaaactttgcttgaaactcactttttattttccgccgtttgcaatggtaagacacggtaattaaaaagtgaaaataaaaatgtaaaaacaacaaaatggggaagcattttcatagtgatgatgagacgacaaaagacaagaacaatttgaatgtttcagtgaattttttggggattcaaatttgagcattgaataaaagggaaaagagtaaatgcaatttattagagaagcaatgaaaggggcaaaagccgacgaaaaataaaatttaatgaagaaaagtgccgaaaattgaggggcagacaaaagagagagaaaaagagagaggggattttggggacacgaatataaaaatcttttaaacaataaaatttttggacacgaattaagactaaagcaataaataataactatctgtatatatgaaaacaaagatgttccttatatcaatcaacctttggtcatttttgatttttcattaaggatggaaaattcgtattttcttatcaattatctcacgacaaattggacagtttggctctggttcatttttctcaattttatctgcgcattcttcgcaacaacacaaatggccgcaggggtcgaaggcgaattggcgctaattaaacgaaatattttattattatgagacaaatttacattttaaataattgttgcaaaattcacgtaaattatttaaaataaattacttctccctccaaacaaataatgcattttttgccgtctttttcattctcattgctattgctactgttaatgttgtctaattgcgtctgctgatggctgcgttttcgtgaggagggcgacgcaatttcacagcacccgcgacgccacgccccagccttatactgtgtgaaggcaacacaaattaattttttatttaatttaaatgcttaaattaattattcaatttcactcgtaattttccatttacgcaaacgcccgtgttccactgttggataatggcaaatgtggcggagtgttgtgggcaggggccccaggcgttttttatattgtcgcaaacggagtccaatagttgcttaatcccgtcaattcgggcaaacttttcgcttgtgagtgaaaatgaatttctggcattcgcaaaaaataggcctaaataagcataattactatgactgtcccattgctagactaattagcacaaaaccgatttcttgnaaaa

SEQ ID NO: 15994 - DNA, 1516 bp, Heterodera glycines
tttccatttaattttggctactgtattttttgattatgcctacagtatcggtgatgccgttcttcaaatgccattgcttaaaacgcaaaaacatcaaaatttgttgaaatcaaataacggacgaaataaattcttgcaacattatgaagtgaattaaaatttttgaaatttcatttttcgtcggctattagtaaaaacatggggccttcaaataaaatttcaaaaaaaaaaccgaaattcaaaggcgagagaataaacaacataattagcaatatttcgggaagttttggaaaaacctcttactaaattttcgaaatattttggtatttaaatgtattccaagagccataaaacacataaatatagaaagaattttggcaaaaaaggacagttatgaaatgaagtttgaaattgagtccctaaaaaataattttcaaaaaaaaatatttaaaatatagtttagaaaaaatttttcatattttataggatgaatacagttcgcccgtgttcaatttttacgacattacatacgtcacgaaattatacattggtaaaaatatacataatgataaactttctggggtttttaagagtacacaacggtttcataagtgaaataattaagaaaatactgctcgttttccctaatatttgataaagaaaatatttagcttttgatatttttcaataaatattaataagttgatttatttaaataacccaattctcattttctttattaaatgtttgattttttactagttttctcaaaaattaataaattttagcttgattttgtttgcattttttcttctaaattattttttaatatgatattttggatttataaatttttaaattaaatttaagaaaaattactctcaatttttgaaactgtatgcatttttttcatattttatatacataaatgcattttatgtacatatattatagcgtaagtgatttttttatccggccatccaaatacataattattacccaattaaatttttaaatcaaaaaaaaaattgcgcgctcgcacaccgttcaccgagactccgaccgaatgcaaacacctgccctgttgtgggatgtgccattgccaggcatttttgcaatttggccgtagccattcatcgtactttctcaactggactgaacacaacagtgtggaaattcctgccccctctttctctctgctcctcagtttcttttttctctctttttctctctgtggcagcagcagagggcaccggccggccacatcaactatttctccacctcattttctctgtccacccaaacgactttggatttaacgacgtatacgcaccgcacttttactctcttccgtactgatcaacctccacatttactccactgtttctcaacttcacatttctctgtcacgacagacagcaaaacgcggcacactgtgggaatggtggggaatgccagacactgtccacgcccgggcgggtggggaaacggcgtcagtgaacacgagcgcgaccgc

SEQ ID NO: 15995 - DNA, 2536 bp, Heterodera glycines
atgccagacactgtcccgccgggcgggtgggaaacggcgtcagtgaacaacgagcgcgaccgcatagcgcacgcgttgccgttttcttatatataatgaaaggcaattttcgaagtattaattgatgggatgcaagagaggaaaggagcgggtgaggaaagagtgcactatatttgttttgtatggtttctctgccatctttcgtgaactctttcgtttgttctctggcatctttgcctggctatttgttcgctttctttttttgctgtgcttgtggctctgtgctatttctatgctattcttgttttcttttccactttaatttgcctattttcgtatatacgcgcgtagcagggcactttatcaaaattttaagcatttaaaatactgaagagaaatgcacaaaaaaaaatttttatttttttgccgatttcttttaacgccaatatgcataaaattaaaaaatattttgggtattcgtcataaataaaatatttttatctttttaccaatattttaataaatattttttcgttttggaattcatcgcaaaaaattagtgcttttttagacaaaatctgttaacaaatgatcattttatagacttttttttgagtgcgtttgaaataattaaaaaaaggaagcttttaatccaaaaagtttcttttgacagtcctgttaaatatattctaaaaatgtctaaaattcagtcaaaacatcaatttggataaaaggccaaagaaattgaaaaaaaaatcaattaattaattttttctaaataaattacctgaattcattttttgaacaaattatttcactatgtcattttaggtaaattaaaaaatttttttagctttttaaaaaagatttattatttaaattttttccttagttttttcgaaaaattctaacccacaatcgcaaaatgcccacaaccaataataaaaataatgtaaaattgtcgcctattaaagtgaaattttgccaatttttcaaggcacacctccccaagaattcacggtgcaattggacaccgggtccggcgatttttgggtagtggattcggcgtgtggccagaacggttgctacaatggttgcacatcgcacgacgcgcaatggtgcaacgcgcaatgcgacccggaatgttgtggacaaaatggtggctgttgcacgacaacaactgcaacacaaccagtgccaaccatgacgccggcggcacaatttcccggatttcggcatgccgagacggaagtgccaccgtcgtgccaaaatttgtccaaatttgatagccaaaaatccgcttcataccaagagacgaacatgacattttcgattgagtacggacttgggtttgcggccggcttaattggccaagaccttgtgcaggtgagagatggaaaaatgagacatttggatttgtacaattagaaaaatttacaaattttgttacaaaattgtgattttttaatttttaataagaaattttttgaaaatcgggaacttttttcataagaaattttttggaaattgtaaactgaattactaagtttatcaaaaaaaatcgctgaaaatttttttttataattcttttttgcaatttttaaatttccgaagatttttttgaaaaatttctgtttgaaagtttttgaaaagtatttcagtttgcctccgattccaacgaaacagatgggctgagagtgtgtcaagcctactttggccaagccaatcagaaggatacccaaacaccgacattcaacggcattttaggccttgccctgaacacaatcaagcaaaatgtggaccctcttttcatccaggcctacaaacagggcctgttcaaaaagccgttgttctcactgtatttggccacccaaggcgccgcgaatggcacattagggggaggtgaggcatggcatggcactttttgaatgggacccgcaaaaaaatgtaatcagaaattggttccatctatgttggaattagacgctctcgatcccggaattctttttttgttggtcaatccttggtctcggactactgaaaatggctaattgtggttttgcggaatttatgggtggttcttagaggcctatgggaatggttgaggaaatacttattggattttaatgaattttattaagaaagcgtttaaattttaaaattatgttggccttggtaaaaataaaaaaattactgaaacacagtccgagtgttttggtatgatgtcattttaattctttaaaaaatggtgttttaagattactgtacccaaaaaccattgccactatttttttaacgattaaggggcttattaaaaattaatgaagcctaattttggacgctttttactttattgatttagtcctgatatgataaaattatttgaaacttcgttttttttattagttttgactttgggtgatgtggatgatcaaaattgtgcaccaatcaccgattggattccaattacacccaacagattcggcttatgggagttccacatcgatgtgagaagctaaaaaataatttaattaat

SEQ ID NO: 15996 - DNA, 1427 bp, Heterodera glycines
  unsure (1)..(1427): unsure at all n locations
aagtgaacctttntgaatacgaaaatattttcaacagtgtttgatttgagtgttccgcatttctggcagtcctcttttcccatccatcggacactgtccgacggcggctgatgatgcaaccgggcaaaaacgtgcccgactacgcaaatgcatggcactgcattcgggtgaaagggggaggttgggcggcacagacaaaaatttattttttaggggtgggatatgccttaatgttttctcttttcaaagtcaattcaaaaagaaataaaattgggtggaaatttacaaatgggatcctccaagcacaaaatgtgcttttctcgtaagtgtgtgaaaattgtagttttattaagcttcattttttgatttttacccaaaattaaacacttatgaatttcgattctcatttgacgattttaactcgaaaaccggggttcccgtgcgggggaaacatagatggaaaaataaattaaaatgggtacatacttattttgaggaccttatttttctcttgcagcataacgcaattctgcgccgttttcatcttccacctttggtgcttgagccggatgctagaagcaattatgatgcttatctgcaagaagcaaacaacggggacgtgtcaactttcgtaaactttctcgtatttcaacagcagtcgtcaagcggtactttcttaaaatgttttaaattatgaaccttaatttttaaaattagaccttacttattttaaaaactgaattcgacttccgggaatttttcctgaattgctatttaaaacgaaaaaaatgtggcgataaagctggataattgaaatataaaggtggacaaaaatggttgcaaaattgaaaattattgatgaaattgttttttttctgttctgcgtttgaatttttcggttctgaaatcattattttggcgttttgtcactatttttttcattaattcaacatttttttgaaaattcctttacaaaaatataaaaaaaaaccaaaaaatacacccctacaaatcggtttaaattttcaaaaaatacacactaaaaaccaaaaaatacacccctacaaatcggtttaaattttcaaaaaatacacactaaaaaccaaaaaatacacccctacaaatcggtttaaaatttcaaaaaatacacactaaaacccaaaaaatacacccctacaaatcggtttaaaatttcaaaaaatacacactaaaaaccaaaaaatacacccctacaaatcggtttaagttttcaaaaaatacactaaaaaccaaaaaatacacccctacaaatcggtttaaattttcaaaaaatacacactaaaaaccaaaaaatacacccctacaaatcggtttaaattttcaaaaaatacacactaaaaaccaaaaaatacacccctacaaatcggtttaaaatttcaaaaaataca

SEQ ID NO: 15997 - DNA, 1699 bp, Heterodera glycines
aaagatgaagatgagggaatactcacggaaataggtggagtccccaggacctggattaaactaggcttatatatgacgtatgtcgttcagaagagaatgggaaataagcgaaagtgaaaaaattaaataaaattcattttttgtcaagtaaacatgtttaattaactaatcctcatataaaataatcaatccttcaagacttggactacaataattttaaaagcaattatttatattaaggaattcccaaaaaatcattgggatgtcaccgcttgtcatgaaaacctagacatcagtggcgccaaaagtatacccgtctacaggatgatacactctaagatccaatcaatactcccattcaaatcggtttaaaatttcaaaaaatactcagtaaaaaccataaaaatacacccctacaaatcggtttaaattttcaaaaaatacacactaaaaaccaaaaaatacacctctacaaatcggtttaaaatttcaaaaaatacacactaaaaaccaaaaaatacacccctacaaataggtttaaaatttcaaaaatacacactaaaaaccaaaaaatacacccctacaaatcggtttaaattttcaaaaaatacacactaaaaaccaaaaaatacacccctacaaatcggtttaaattttcaaaaaatacacactaaaaaccaaaaaatacacccctacaaatcggtttaaattttcaaaaaatacacactaagatacggaaaaaatccgccaaatttttggtttaaaaatgtcaatatttgctaagaaaatattagaaaggcaatgcaccttatttgcaactgtaatgaatgaatacgaattattttttctcaatttttgcatgaaaattatgtcattcactaattggcatttttactcactattttagttaaacatttcgagatttttggtcactaaaagtcgcatccctacatatagtgtctgtcattcagtggggtaattaatgttttcccttaaattggtcatattttcagataattgttaaaagttgcaacagggaacttcgaaatccaataaccaattaagaaataatttgatttggttattttcggcactcgaaatattttaaagaaaattttaaaatactttaaaagacaagaaaatccattgggtgtatttttctatttctttggttcttaaaatgcttccaaaaatgccataatatgtgtatatgtttcaatgtgccaaaaagcctaagtcgttctaaatcaaactcggggtgatgggttgcgctcggatgcggaatatcaagccgggtttacctaaaaatgacctaattcgggccgggcgcaacctggtttaggaaatgtacatttggggcagttttcaagaaacgcagcgctacttttatctttatttaattgtttcagagcgcatgcagtaggcagatgatgatttgccgttctccatctcaccatcgctaatgacggccggtggcatttccataacgaataagaaaagagagacacgggacaaaaaacagaaaatcatataccatttattatgatcattttattctttccactttccaccattttgcactcttctcattgtccgacttcttcagcagaaatgcccgcttttcacaccacttttaaaactattgagccttcaaattaggggaaaatttccgtgtggcacaaatcagaaaacgctttct

SEQ ID NO: 15998 - DNA, 1085 bp, Heterodera glycines
aatcatcgaaactgttttttccttgaattttttgatcagtccaatgtaaagcaccacaaaacatacatgcaatattcataggaccaaaagaaactttgcttatctctttagtattttgagccttatatttatgcaaatattaacagttttctttaatttctctcttatgcaatttgtcttgtttttttctttcatcttttctgctttttcgtttcattttctctaacgtttgcatatgcaatctgttttgtttgattcttttaatcttttcaaattccgtttcattttctctgcttcttttatgtctttccctatctttttgtaagtaatcaattctttgttcaaaaggtatggcttgggatatattcagctgagcttgtttacttgaaaaaaaagactaaaaaaatatggatgtaattattagggatgggattcttagttttttaactattttttctgcggctttaactcgacgagaaatgcacgaaaaacacattctttttcgaaaatttttcatttttagtgccactattcatcactaggaatcactattttggagcttcgccactaaaaaaaactgtttcggaagttggccactaaaataatttttgccactattttggcgtttcgtcattatttttgccactattttggcatttttgaaaaacttcccaaaattgcaataaaaacgaaaaatacacccctaagaatcgacctaaaaatttttaaaaatgcacccctaagaattggaaaaatttcacaaaaattcttcccccaaattttttttttcttgttcaatatttgctaagaaaatattttgtaactgcaatcagtgaacaaaactttttccttaattttaaattattttcaaattaaaaatagctatttaaaaaattacacccctaaatttggaactttttcgccactattttgcaactattttggcattttttggtcactattagttaattattttgggattttttatcactaaaaatcccatccctagtaatttatcgctaatcgttggtaaaataacaaatttagacataaatataaggatagttgtcgtgtatatgtaaaaa

SEQ ID NO: 15999 - DNA, 958 bp, Heterodera glycines
ttcgtgttgatcggttccctgagaaatgcgtttgggtctcactgatgtcggacaaaatccgcacaaatgacgcgttggacttggccagacagattgcccggacctgacaaataatctctttgacgatgttagcgaagccaatcaaattctcaatttaatcccaaaggacgaattgcagaagctcaacccagaacaaaagtggatgaagctatttgaagccgatttaccgcacttgtacaagttggtcagcattgtactttccgtgcagtctcaaatgcattagtcgagagtgttttcgctttgcggctcacaatggactgatgtcgaaattcgttgaaagtcgaaaccgtgaaggctctgctccagacgaaaataaattttgatctcacttgcccagaaatgtatcagatgctcatttccaatcacaaactgttggatcagatcggtggatgggacaaatactttgaatgactcttttttgaaaaaacaatattattttcaataataaaaccgttgtaattgtgcaaatttgttgtattttgcttttataaaagccaataatgctttttaactgtttttacaaggtaacaatccattttttcaaaaaatcttttttttggggtccaaatctttgttttagcctcgtttgtcctttttttgaaaaaaaaacttggcagccctgaggtaaataaaagcaactacatatttcatcataaactctctttgctttctttccctctcactctctgtcgttttttctctttttatcattctctatttctattctcacttttcttttttttacatttttccaaaaacaaaattggcataacgtctataagcgcaaattcaaatggcgtaaacatcgcggacacacagaaattgtcaaatttatatatggactagcgcaggcgcgctcgcttcgctcgcgcacctcgcgctagctaagatttgaaaa

SEQ ID NO: 16000 - DNA, 1869 bp, Heterodera glycines
aagtaaaaaacactccacttttttctgttgaaattttagtaggctcaaatggaagagaatggctttcaaggttttattgattggatgttttcgagaatttggaattgtctgttgttggagtagcaaagagtgtgggcagaaaatgctcgtctgtgggggtatcatcgaatcctttcatcgtgattcggattcaaagcgttcacgaggccaattcaaaccgatcaatgatccctttaggaattgaatggcaaagcagctgtctgcttttgctccaattttaacattttgttggacaaaatgtgttgtggtgcacttttaggtccccgggcattccctttttatttcccccggcgggggtttgtctccgctttcctcggcgccccattgcttttgctcttttcaaatttttgggagagagggagggggggggggggaatttggcctgaaaagacatcaaccttgtggtttattggcgcataaacaaaacgaaaaacatatacgtaaaagaatttaatgtcattttcaatttcgcaaattgaagaaattacgtcaaatgcacatatcgaagtgcctgctaattcgtgtgctttcaaccaattaaagaaaccactgttttcccatttctccctaatttttgcacttttgcttcatgtggttttaaaaattttattgcatttttgtgtgcctctgaaatgcgacatggtgaaatgaatgacaagtccggggaaaaattagtccggctgactttgcaatatagtcaatgtgtggataatataaaaacaaaaaagaatgaacagcgacattgagtgggaacacaaaatgaatcccggattatttatgtcacgaattgcaaaccggtttctttttaaatttagaaaaaatagagaaattaaagaaaagaaaaaaagaatttaatggggactcctccaccgctcccttctaaaaatatatacacaaaacggaaattattttctcggaaaatttaacaccgctcacatttcaattttggtcctaaaattgcggttattcatagctcacataacaatggcttaatgtgtgttttgtattatattcctttccaaatgatacattttaacacacataatttaatgtgtttacggaattaaattcgtgagttttttccgagttttgatgtttattgctcactgaaatgagaatattgcttttggtgtgtgttcttggcatgtgaaatgaaaatattttgacaattttccgcaaaattggtaaagaagctatcgcaagaaaacgcttcaaaagcgcttttgaagatggattgacttaacatttggaaaatgaatgatcggctgggcaacaaatctgctgtttctaatcttggcctccgatcctctcccccccccgcccaaactttatttttttacattatttttctggtgattttttgtattgacatagagcataattttgactataattttttgagttttaccaacttataaaaaggaccatgtattataatttcattactacaaatctacatttttaatttgataatgttattaaatgagtaattaattaatatgaattatattcacaatttttcagaaaactataagatttttacaaaaaaactatttacgactactttgacgttttgcccgcaatttgttaccaaaaatgaggaagaatcaacaaatacactccctaataatcaacttaatatttttcacaatatacactcctaatagtccaccccaaaattttccaaaatgcacacataacaaatgaagaaattctcaaaaattcatcttcaatttacgtatgacatatataaattctgatgactgctcacgtctgttgagcctattgataactaaatacatatttttt

SEQ ID NO: 16001 - DNA, 923 bp, Heterodera glycines
ctgctcccccgtaaaacagttggtacgcttttgccgttgggggggggggggataagaggcaaaatgaaaagagattgatcagcagaaaaattaaaaacaattttcaaaatttaaataaaaaaaataggggacatgagacgcaaactgtgcaaaatataaaagtttcttttcaaacatagccataaatacgtgtgctgctttcaaattcgatttttgttccattttgtgcaggtctccttcccgctgggccaggccggctacagcgtgtacaaatacattccgtacggaccggtggaggacgtgttgccgtatttgtcacgtcgcgcattggaaaatggcgccatgatgaacaacgtgacccgcgagcgcggccttctgtggactgagctgaagcgccgcattggcagcgcaaaattgctctgatattatatataattatttatgatgtgccgatgtttgaatgcatgtctcttaagtgatgatgctttatgtataggtagtttgtttgattgttttcagcgaccattttcttttcgcgctgttaattattgttaaatgtgcttttgcataatgttattatattgtattgcgctattttctgtcataattatgcgtggaattaattctcttttgctcatcatcgtttttttcctttgttgaaatgtgtcatacatttttcggaaatatcgcaaacggatgttcaatttttgattttcccgtgacccgctctcttccagaccgatgttgttgttgtgcttatatactttatagagcccggagggcttgacaattgaatttttgtcatttttatcttacagttattgaatttgttggtataaaatcccccgataaaagttttaaaaaaatgcaaaaatattttttaaaataacgaattaaattactttgcatctttaaacggattt

SEQ ID NO: 16002 - DNA, 4315 bp, Heterodera glycines
  unsure (1)..(4315): unsure at all n locations
tggaattgtgtatagatattataatttctatgaagccgactttctaaatattactgttattgcgcagcttttccgctacctcctccggcacaggctccccccggagtgaagcaaacacccaagagatgacattgtcgactgtaaagtcaacagtgatctcttgggcgtccatccactccgagaggacccagctctcctgattagtatatcctgggaaaaaggtaattatgaaaaaattttgaaatttatttatttattacctaaccaatcaacatagaacattctcctttgttctccccggcaccgatatgttgaagttgccaaaattttagcaacttcatatttaccctttttcgggttttttgaaaccctttttccgaacgaccccactggcgcatccacaaacatgcgcccctattatttttaaataatagtaatattaatttaaatgaaaaaaaacttacttttgcttcgcgctcttttttgccgtggtgttgtttctgtctcgcggtgtacacaaccgaagaaacggaggaagaagaagcaacgagaggagcagaagaagcagcagcagaagaagaagaagcaacgagaggagcagaagaagcagcagcagaagaagaagaagcaacgagaggagcagaagaagcagcagcagaagaagaagaagcaatgagaggagcagaagcggcagaagaagcggacgaagcagctggctgaggcgaatttgtaggcgtagcaacaccatcaggagaaagcccaattgataaacattgngactgaaattattanatagtaaatgtgactttgtttaaaatcttaaaacttacttcaaaaatgacccgctctccnattcggcacggcgccttttcggtgcangtgttggaaagctgggactttgttgactgcgttgttgcgttgacatcatctgcagcatcatttgtgtatgtgaaaattgagagggatggttggggcgttgaggctaaactgcgtctgctgcaaataaaaaaattaattaatattttcattattatttaaattgatttgactcacttttttggcgcaaccagcattaacaatgccttttgagcctgcaatgcagctcggcgtttcggtcgaacactctcgagtggaagaacatccaaatttgtgccgcaactctcatccaatggccctgtggcgttcagcatcgacacgagcctaaaaatgaattatttttataatgtgtcgtcgaagaattttgactatctcccaccccccataactaacgcattttccactgaaattgtgtccgggatcaccaggaccatttgttcagtttcactggaacagttaaaattttttgaaaactgtcgacaaaatcagttaaagtcattcccctcactcacgcattttccaccacattttccatctgttcagcttcgctaaaataatttaaaaatgcaaaactgtaaaaattttcttgaaaatgaaccaaccccacccgcattcactcacgcattttgctgcacattttccaccaacggacgttcttcgaatgccaaatttgctgggtgtcgctttcgtcatcgtcgtagttaaccaatttgaccattgtgttgatgaacgctgaaagttcggtgggaaaccatcggattttaattattattaattcaaaaaaatttactttcaaaaacactttaagcagcaatgcgttcgaacacgtcgtgactgaaattagtttgggaaatgttgaaaattttttaaagaaattttaaattatttactgtaattggtgaagacaaaaagtcgaaatcgaattgataaaatgaaaattgaagagcgaatgaattctataataaattaattaaatttaaaacataaacaattaagaaatatagcaaattaaaaaacgttgaaaaatacataaatgaaaagataaatggcgaggctattgcattaaattatgagtgaatcgatggcttggcgtccctctcctgcattttggggggtcaagcgaagagggggtgggaaaggattattgacggcgtcattttcccttttctgccgttcatcgtttaagggaccaccccatattcacattaattaataaaaaattttttcattatttctagcatctgctccccccccccccctccatccagcagctgtcacatcactgatcaatcaaaaattttcatgtcggccatcaaaattacatgtaaatttgaaaacctccaataggtttgggtttcgaactcccacaatttaataattaattaatttgaccccctccacccctacaattatctgaccaattagtgcccccccatccggtcaatcaattagtcactaattgactcccgccctccagccacctgtcacttctaattagtgtcaggttgctacggaggcgtatggtttactactaattattttattaaaaagaaaaaatttcaatatattactttttgttttattcataatattttttttcaaaaaggtgaagatcaattttaacttttgaaatggtgacgaggttattttttataaattattttgtcttttttttgcataagaatcaatttttatcagctttataaaggaaatattctttttaaataaatttcggcctcatttccaacatagctcagttcatttctaatgactatttctccaatcacaattttattttctgctgtttctttcggttttaatgcgcccgaacgagaaagaacatccgcaattatgttttgccgggattatattcaatttccaaaataaaacgtgagcttaattccattatccatttgtcaacgcgcgcattaccggtctcgtttttacttttgaacataggaattaatgctttgtggtctgttaatactcttgtcggaatcattgtaatatattgtgcaaattttttcacgccgaatctgacggccaaagcctctaattctgtggtactgtatcgtgattcgtgtttattacattgtcttgatgcaaatatattggtcgaatgcgattttgttgatcaggctggcaaagaacagctgatatcccggtcttacttgcgtccgtcataatcaaaaattttcgtgtcaggtcttccatagcagctttaaaatcggaaaaataaagaacaacataactcagaatttttcctttcaattttgaaattgcagcaatttcggcgttatccattttaaacgatacgtccttttttagcagcttaaatagtggtgcagccatagaaccatcctataataggtcatgaatcccaaaaatgaatggagttccttctttgattttagcatcggcatgtccaaaatcggttttactttcgtccatttttattccgctgcgagttaaaacatggcccaaaaattggagttcctcgatgctgaattggcacttagccacttttaattttagcccagcctcatttatgtcctcaaaaacaaactttaagtgctctaaatgttgttcgaacgtttcgtatgccacaagaacatcgtcaatataaacaaaaacgaatcatttaatttgtctccaaataaatgggtcatgaagcgttggaaagttgctaccgcattacaaaagccaaatggcatgacgtgaactcatgcaaaccaaactcagtaacaaaagctgtttattcttgaccatcgtccattttaatctgccaataaccagaaataagtcaaattttttattgaatttatttttcttttataaattaaaaactaatatatgatccaaatcactttaggtaatttaaaattttttaatatatctgtagattgtggattcaaaatatttcaaatcgatttgtttgttagactttattggacaattaatttgaattggttttttgctaaagaaaatttttttatttgtttcttcgaaacctaaatataaagattcttttgttaaatttgtcataaatatttattaattattattgttattattatcctaaaaattattatatgaatatcacaaatttttatttagtataattacctttttcttgttatttacttcttcaattgctgaattgattttatttttacttaaatattgttttttatgttatcagacaataattaattcgttaatagtttagatggtatgacaccttttttgaaaaatttttcaaaattttcaaaagtcttaaaacatatttctaggggtttataggaccgctgagcacgaatctgacatccatttcgaccaattcccaaccccggacccaagttcgaacaaaaagtcgaaaattcatttttcatcacaaagaaagattcatgcaactaaagcaatacaaatgcacgaaaag

SEQ ID NO: 16003 - DNA, 2592 bp, Heterodera glycines
ttatggctattatcagctgctgttcaaaaaggggtccaactccggcacttttttgtttgtttgcacaccgtcgccccttggcatttccgccaattccaaagtgttactgcttgaactcggcgtctgccggttgtgcaacggatccaccgaatctccaattggcacgaacatttccttcatcgttttgcgcaattcctcccaatttgcctccacccgctcgtatttggccgacttgcgctggtgttggtcgtttgtatgcttccgccaaccgatatatttagtaaactcagcggtacagaagcggcaacggtacaacggcaaattgaggtgactaatcgcaggcaattaataggacaatggccgattaattggccattcattctccggcacttacgtattgcaatggtattctttcattgttatggagtttgtgacatttccacacaaaatgcactttcgctgctcaaatgaggcacaattgaatgcctttttggtattgtccaaagcaccaaagttatttggtttggcagaagggggaatcgaagcaaaaaccttaaaaagtgagggggggggagcatttgggcattcaatggtgcggcggtttgagcggaacgggggataaaatggcggatcagagatcgtttagtcgaataacttttcttagtcaatcaaatccacaaacttagcaaagagtaaataccgcaataccctaaaaattcatttttgttgacttggagcctttttgtatccattttaggcctatttaagaaactttaaacattggagggatagctttgtttttgtttttcattgttattaattactccgtccacctcactgacgcccaaaatgcattcgttgaccgccttttgaagtccttttggaacgggcggcaaattgtcacaattcgtcccgccgggcagagaattcatttgctaatagtttaatcagtttcgcaatgctcgtcattcagttttcgcttcacttaccatggaaaaattctgcgccattttcgaccccccgccggccgcaaaagtgtccatttgctggccccgctgacaatgagtagtgttggtggacgaattaagagacggaatcggagacgaactttgagaggaatgcgcaaagtcagcggactgaacgaagcaaaattaaagacaatttcaattcgaaatggccaatttgaaataatttggaccaattaaaactttaatttgcagttaattgaatattaaaatgaatattattaatatttcaaattaaatttggaattggtctatgtatttaaaaaatgattaattgtactgtattaatttaatttagcttcaattacggttttgtactgttgtggtgccaaagtttccttttgtcggcacttttctaaaatttcctcgcaaatttccttcaaaaatatgttctcagcattctaaagcaaataatattttttaatttaaattgtttttcaattttcgcctctcacataaagcgtgagttggtaatgcatcgatttttggctgtgctgaatcaattcggagggagaagaagcggcaaaagcgcactgattgcatttgtgcgggcgatagttcaaatgggcataaatgtgctgcaacaaatcttcggcaccgaacaatcgggcggcatccgccggaaggcactctttggaatggacgcaaatttggcaatgccataaaatgttgttatcctttgagcacatttcgctaatcaaatgaatttatcgctgttttttgcttttaggcaattaacaaataagtgataaatatattaattgtaagtcaacgggcacagaaatgagaaggtcattagacactcatcccatactaatattaaccatttgtgtgttaggcacaacgattagtggcggataagaaagatgcatagaattggagagatatgagatgtaaaaaggagggctttaagcaaaacctccgctggcgtcgcccccccccccccccgccgcgcgccgaaagagtgtggcacagtgagagagagaggaagagaaaaaaagaaagaaaagagcgaagaagctttacaaacaaacattaatagagaacgagtgaccgaccactcaatggatgcgcacagaaagagggaaaataaataaaaaataatggggaaaggaggaaaggggggggcaaaagaaatgaatgccatcgcttttcttgcagattaaccaagttggagaattactgtatgtgcgtgactcattcacccgctgggcttaccattcttggtcacttttttctcgggacttctgagttttgtaacccgcgagattttatttaaaaactacatatgttgtcctgcaatcgattgccgcatttctgtttcgaactcacagcgccggatacaatgaagaataccggcatttgaaataatttttaaattgtaagagattggggtacccacaaaaagtataaatctgttacatatccaatccctggtgcgaggattttaacatttttttcgtggcttcttaatgctttaaaaataaaaaaaaattgtacttaataaaaaaaaaattaaacacaataaacgtaaaaatttaatggtccgttgaattttaataactat

SEQ ID NO: 16004 - DNA, 1677 bp, Heterodera glycines
  unsure (1)..(1677): unsure at all n locations
tggcctctcagttccaaaaacatttgcatgtgtggcgaagtggtttttgtaagatagtaaaggaacaaagggtggtggttcgagtccgttgtgcaacatgaatatttttatttatttttgtccaaaatattaaaaaatgacgaattttgggaattatttttgaaggtttttcccaaccaaattggaaaaacttgatatcattcgaaagctctttatgaggagaagctttttctaagcaactgctaagcaattggattgattaggaaaaagatatgagggttcgaaattttgtttctcgaataactttttagttaaccctttttttgcgtttaaaaacccttacattttgtttgtaatttttttctctatcgatatgcaaaatttggagtggatctaacgtatagaaaaaaaattaaacgtagcgaagtaaattcggtttttctctattaacagagataaagaaatagtacgccaaaaagagaatgtttttttctctgcactctctatttattggttcatgtctcgttttttgaaacggtgtgtttggaaatgtcggttttgcgggattaattcagaaaaccgggtatggcaaaaataaaccacaattcattaaactcccttttgtaattcgtctgttttttctcttagttttgtacagtcaatggactgactcgcactgacacaagtattactgagagcaagcgcttagcgagcccccctcctccccacccctcggaaaccgaagttttctaatgaaaaataggaaatttctgaaaaagtagccttttcttaagaaattccatcataattctcaaaatttcacccgccggcacctatcggcatcgccggaccggaaatttgaccaagggccaattttaaaaaaatgagtaaaaaaaatcggctaaaaattccaaattttttcgttagccttactactgtatgttgtgttattttataaacatttttttgtttaaaaaaatttgtttttctaggaattttttttgatccacaatccgcgcgggatcccgcaaatttcaagtgcaagattaggtaatctcacaaatctaatccggtaaaaattttggtttcaactcgcaaccgtataagcaatttttgaaacaccattctttaatttttacgcaatttataacagaaaagggaatatttttgattaaaaaatgttaggtaattaatgtgtctttatgtaatatgtaaagagacttttattaaatttggatttcagacaattgaaaactaattgtaagtgagaaccaaagaaaagagaatcacaacaaaatgaaataggagatcaaataattttagtttggggcagaattagattgagatccaaagcaaaataatagggagtaaaaagtaaagtattgtaaaaatagacgaattaaaaagatttggaaggaagggaccaaagcacagcagttttatcagccgaagtgctaaggaaaacgaagtcgcgcgggtgccatcttaagtgttcaaatgaacaaataaaagacttttgccataccggcactgtatgactttgtcatggtgttccgaaacgggcaaataggggagaggctcggccaaattcccacgcatatccgtgataacaattctaaaaagcaacaaaatctgaattattgncaaaaataagtctgagtaataaccgtctgtcgt

SEQ ID NO: 16005 - DNA, 1443 bp, Heterodera glycines
aatcagggggtaggcgacggaagcgggtgggaaatagtgcaggcgatgtttatcaccagacctgcatggccatcagtttaatggttttgtcatttgagccagtcgcgagcaaattgccagtctgattaaatgctgcacaatacacagacccgcggtgatgtttgcttctgctcattagaatagttggaggaggaacaaatccatggaggaaatcactgattattggcaaattgactaacgtaaatcataatgaccaaatcaattaaacctcactcattaagcgatgttcgacgttcgtaagactgatatcggcatattaacaaatttctcgagttagtgcctatagcgaaataccccccactgggatggaatgcaactgcacgaatcgccttaacggcatggaacgatgcttaaatcgctgtgcttcttgaaaaaaagaacctgcgcatcttcgtagcagcagacgggaataaatttgaagggctcttcactctctttgcacattttttcctttgtaaagtcattagtgttttctctaaagtcttcgccatcctcaaaatgggtccatcattattaatgcttcgctttgtttggccatttgcaaaaccaaccgaatcaatgggaaagtcgggggaaagtcggctcgactcaattggctcgtccattaaagatctgtcaacaaaatctcaaaacatttctggcaatgtaagcgatgccttggtcggacaatactccgacagattgtgtcatttgttcgtattggcacttttcgaggaaaagtcatagacatcgacggaaaactcactaaacaaataaataaataatcgggttcaatttaataaatttactttaattgtaagcttaccgttggcaaatggaggtccattggaacgtattgcaattggttgcagtaattgtgcagattggaaactgtcattctgtgggtaatagagaggaaaaggcataagcgatggtggacaattagcgtctaaaacacaattgaagcaaattggtagtttttaagtactaacagtaaaaggggttctggtcgagtcgcacagcatgcatttgttgttgctcctgactctttaccgcctggaattgctggaagagttgcgaacggatcatcggactgctgtgttcggcacttcgattcacaaaaggcaaagttagtccaacattttcgccgagaggtgttgtgtctatttctaaattcatttgtttatatgtgtttcgttcattgtcagcaagttgctctgtctgagtattgtcagtgtggtggtcattcatccaatggagtctccgaatatttattcccttgttaatattgctttatttttctttacctgggacaggtgttaatgagctgtctattttgttgtgcttcaagggcaatttcatttggctccgttggcaaatcatttcccaattgttggaaagggt

SEQ ID NO: 16006 - DNA, 2889 bp, Heterodera glycines
  unsure (1)..(2889): unsure at all n locations
aaaacatttccggcgtttctgcacggaaagaaatttgtggggaggggaagccattgaaaattagctagagcaatttatgaaaaaagcatatgaaatgcataacattatgccaatagttttcacatttgtgcagaaaattaatttgcatataaatattgaaaaactcacataaatttttatattaaaacatttcgtgaaactttgtgcctttaaatattttacatttttgctgcttttcataataagcattgatgatgaagcatcattagcaatgggaaatgatgatgaagtttgtttgtttgtctttcaacaaattaaaaaatattatttgtagagctcgacattttgaaaaaaaacatgggacctggacttggattccatatttgccacgaaactggcttcctaaaaaaaacccaaaatccatgtcaaggaaaagcatggttttcttgggctggatccagggcctgtacctggatttcctaaacaaaaaaaacaggaaaatccaggccctagaacaacccaatctcgtcatgggctagatccaggcctaaatctgtttttttttgaaaattggttttaaaacgcaaacaaatatttaaaaataaattaattaacaaagaaaaatccatgcctcttggatccaggtccaagttgagctcaaatcatttgcttacaaattaaaaaatttatttatttattaatttaggccgaatcaagctcaagtagttctaatggaacgccccgtgacaatcattatgataatgaccataaacctctgatcaaggctgaaattgctgctgatctttttgtattgcttaatctcaagactcaactacaagtaagtaacaaaataatttcattcacaaattataaaataggcaatgcaaaaaaaaatttattttaattaacaaatttagttaacaaaaccataaaactcaatcaaaaattttaattttaattatatatttcaattgtaaatgaaatcattttgttttttgaacaaagaaaattttagattaaagatttttagcaagaaaaaaaataaataaattttaaggatcaattagggggtgtatttacgtttttttattgcttttatttaaaggatttattgccgaaagtactgaaaataggcaccaaaaatgacgaaaaagacataaaaatgggcgcataatccttaattattttataaaaaaaatatttgttttagatggattatatgacaaatgaaagtacaacaatggaattagtcaacgagttcaacaaaaaatatgccaattttgtgatggaattgccggacaatttgatgacaaaaggaaaatttgagaaaacattgcataaaattaatgaaaaattggagcaaattcaattcaaaaacgaaattgatattgttgcaaacaatttgttaattatggtaaaattagaaaacaaattcaaaaatggcattgaacaaattgaatgtggcgaaaatgtgtacgaagttgtccaatatcatctcgaaagagtgaattcggaactgtatcgccggtaaacagaaacaattgttttatttaataaatactatttaattagatttttaataaaaataatattggaaaaaaaattatttccttgcgaataacaactatattgtaaaaaaaaagtttttttttctaattaattaatatgattcaaaattatatgtaacttttcctggattctatatattttgggaatttgcacttttcgcgtatattttgtagttttctgaggattttttatagaaaattttggtggctttttgaaaatttatataaaaaatcaaaagcgatttttttgataaatatacacctaaaagtttattttaatgttaaatttttatttgaaataaaattttaaaaaatatttaatttatttaaaatttaaaataattatattctttataatttaagaaaacattacaaatacaaactattgctgttgtcaaaatggaatttgccaattagcacccaaaaattagtgaatgtgttcgattcaatccaaatcattctcactctttgtggctttatggatgaggttgcagtacatcaaggtcttaattatttaattcaataaaaattaattaatttaaaatttaaaagcagaatttcatttagatactcgatcaatgatcgcaaaaatgatggccgaactgaaggaagttgaaaaaagtttggcccaaaaattggaaattgatcagaagcttttggcgcaaatacaaagattggatcgaccaccaagtccttgggaatgccaggatgaaatgcagatgatggcgaggctcgttttaaggggaaaaaattttaaattaaaaaaaataagttatcccaactctcaaaaacctattttttactaaaatagaaaatctcgaaaattaaatttagcataattttcttatcatatttcattaaaatttccaaaaaaaaatttcagggcgcctaaaggacaccgccgaacaccttatgccttatttttttttgaaaatttgatttataaatggcaaaaattgtctttttcgatgcaccactaaaaattcctgcttttctccccggcgctgaaattttttgtaaaataataatttcattttaaacaattatcagccattttttttacttaaaataattaaagattggaccacaatgtgatgagtcatgaaaaaatttcgctgatttatttgcatgcatgtgcacttagactgaccacagaactcggcattttgatcaacgagttggaggaaattggcacagaatggacgagtgccgacgcaattgacgangntgttgaagtcggctgctgagcttgaaatgaatcgtctttacattttaaaaatgtgataattatgctttctcatntatttagggatttcatttt

SEQ ID NO: 16007 - DNA, 1252 bp, Heterodera glycines
aaaaaaaaataattttttggaaggcaaattcttttttataaaaaaaaatattttaccaggaatatttcagaatcccaatttcggattgcgatttagggaattttttgagccctgggaataatttccgattgccgaaattttttgagcccgaggaaaaattcagattaacgaaattttttcagccataggaaaaattccgattgccgaaatttttaagccctcggaaaactccgattgccaaaattttttgagccttcggagttccgattgccaaaatattttgagccttcggaacaagttccgattgccgaaatttttaagccctcgaaaaaactccaattgccaaaatttttaagccctcggaaaactccgattgccaaaattttttgagccttcggaacaagttccgattgccgaaattttttgattgagccctaggaatttccgaatttgttgaaggcgtcgccacatattgctgatttctacaacattttgaaatttttgatgtccagaataatcaaagtattttttaattacatttttttagatgaagagattttgcgacatgtaatggaactttccaagaatgatcagacgatgagaagcaatgtggtgcaacatgagggtccagcaatggaatccgttgcttatgaatcggacaatgaaattttaagacaggtaggtgtataaacaacttttgtaataaaaaaaagtgatcgtcaacaaaccccaataaatagcctgcacaagaattaccaagattttttgttttcgaacttttttagtaattaaatctgatatcattattagtagagctcgacatttttaaaaatgcctgtacctggacctggacctggattccatgttggacctggacctggatttcctggacaaaaatccaggtccaggaaaccaggctattcgggacctggattttttgaaactaattttaaaaatcaaaaaaaggtttgaaaaaatcaattaattgcttataaacctctaaaaatatctaattaataataataatgtgtttttaaatttatttaatctgtttttaaaacttgaaaaaacatcggtcacttgaaaaaataaattctaaaattttgtccaggaaaatcctgggtttttcgtgttctgcctggacctggacttttttcacattagacctggacctggatttcctggacaaaaatccaggaaaatccaggtccaggaaaatccaggttgccgaaaaatggcctggacctggacc

SEQ ID NO: 16008 - DNA, 1125 bp, Heterodera glycines
actggggaaaattttaattgttaaacatatttttactaactctataaatgcataataattttctaatcaaaatgcattttctaaatatattgataaaataacgaacacatactgttggtttggaacgtttccaacacctaaaatgaaatcgataaatggattttcttggaattttataattttcactagaggagcatccctggagcttatgatttatccgcatttcagcaatttatcgccttggcattcatatggcaagacaaactgaccttctttgcgacaagctcaagttcatgaagggccaaaaaacagccgccggtgcggcatcaattcagacggaaaatgtcgtgggcattctctgagtttggcttcaaaatttattaataaaattttttattttcatcaaaacccagtctcaagaaatgatgcagaacttaagaccaattcttaacccaaaattctatagaattttttttcgtttttggtccaatttggccacgtttatgtcctaaatgacatcaaatttttgggtcaattaatgactttaactatcccatattgttaaattgtttcttacttttttgacatattattgtcacgcatagacaacctttcatagcatgttcatttttttatacgatatgaattggttttaacgaaaaaacgcataaaaatcacatatccccaattttttacttaattggccccaaaaaacttaccgctcaagttatggtgtgccaccacggcgtccaactccttttccaacttcgcttgcaaaagcagtagctgcgtgcgtctgctgcctgtccctttttccggaccgatcacaaaaggaactccccagatttgttttgccaatgggttggttttgggcgcgatttgtccgttcgtcgccagacccgtggttccatcgttatcggatcggtcggcctcagtttcgggtcccttgctgtgtgtgccgggatgttcgtttggcttgctccgggttcgtaaacgtcgtgctcgattccaatttcggtttttgccgttgatttcctggatgctggttcggctgactcggcattggctttggcctgctggagaaattcgagccaaatcaaccaacacacacacaaatcaccaaac

SEQ ID NO: 16009 - DNA, 3093 bp, Heterodera glycines
  unsure (1)..(3093): unsure at all n locations
cctttttagtcagggaaattctgtgaattaatgctctttttttcctaaaaggcttatcgccctatttaattaatggatggaaaattatggactaaaataagttagggtctacaaaattccaaaaattttcttcaccatgcatgcgttttaaaaatttacttatttataatttttccgtttttgctctcctattttataattcctattacagtatatataaatgccaaagaatatgtattacggttgtgcagcattgaaagtcgtagtcctcgacgcagcatgtgctcgccctcctccctgcttttcgtatgcagctcccccaaccgcagttgcatttctgttccagcatgtcacaggcgttggacacttgcacaacaagaggcggtgcctatgaaaacgacaatttttttttgttgaaaaattatgcataataaaatataaaattatcttttttgtgaatgtttcttaccggagttgttgttggggtctaaaagcagatatatataaaaattaaatttttgtacatttctcattttgtgtgccacatcgaataattctcattttaaaaataatcttttcgaagttaaatcttaataatacagataattgcttaaattaaagagtgcattttgtttaatcccatttttctgcaacattcgcttttgtgtattccaaaaccaaagccgaaaattcatgtttcagttttaaaatttaacaaaatagcacaatttttgctggatttttgatttttgtaaacttttgcccatttttcagccctttttggatttgtgccattanaagctataatgttccgataataaatagattcttactttttcacagcacttaagttcaaagttgtttgagcaacagatggcgtcagctgtgtacccgggatgttcgatgcatgcaccatagccacaagacgaacaaagtttttggattcccttgcaggcagccttcttcaccaccactgcgatcccatccacaatctttccatgcatgtattgcaacgcatttccagcncctttcccaatctcgattgcaacaccagtaaatgggtctaatgcctgccgttttccccggaccaaaaacagctcttcccagatttgttttgccactgggttggttttggctgcactttgtccgttggttgccaaatccgtttttctattattgggtcggtcggcctcggtttcggttccgctctggccgttggtttccgggatgctggttcgaatttcttcggattcgtaaacggcttgctcgtcttcggtttcggttccgctctggtccttggtttccgggatggtgattcggcttgcgtcggattcgtaaacggcttgctcgtcttcggtttcgcttccgttctggcccttggtttccgggatgctggttcgccaagcacgggattggctttggccttgagacattagatccgaatcaactaacacacatattaagacaaagatcagattaattttttattaattcaaatttattccaaaaaagtttctttcttgtctctaaaatcttttgtcatattaaaaattttgttttttttcacttacccaagatggcatgcgatgccgcggcgatcaggatggcgaattggatcaaaagtttgaggcttggggccattggagttttatggttcggatttggggataaaagggagttgaagaattgaataattttcctaaagggatttgaaatcgtttagtgatttttctgaagtgagctgaagcggtatgattttgctgggcctatcagcggctatttatgcagctcattttgggcggagtttgggcttaaagccgaccgatccgtcgatggccgtccgtccatccgtccgtccgcttgcggcggctccgccccaatttcccagcaaattgtccactggttttttacacagaaattggctttttgaattccaatgccaaaagtggtgagtcaccattttgcccatccccaactgctgctggtagctggtagccccataattttgttcatttgttaacatcggaattttctgcttttcccaacgagtgacggtgattcacctctgttttgcccattttgtgagtaatttgtccactaaagcagtgatcaaaaaaagaaatcgctttcccagagatgaacggaagtggcaaaaaagtggaataaattataaaatgattttacaaaaagaattttagtttactatacgaattgattttataaaaagaaatgaatataactttttagggaacggttacggtaaaagtcggaccttttggttaagtttttttgataattgacggataaacaaacgtgaatgtgttttgataaataagagccaaacgtgaaactctctataaatggtatggtaaaaacggtattttcgttaatgcttttaaaaaattctaatttaaaaatgtaacgtagaaatttgtttaagaatattttacagaaaaaataaatggctttcaattccaacaagggcattgaccaagtcaaaattagaaaatgattcataagttttaaaataaaaattaaattagagtttttttaatccttcattttcaataataattgcgatcacccaactcgtactgtttttctcaactcgtactgtacaacaaagagaaattttagcaaaaatttcaatattttcattgatttattattctacgcaaaattcaagcatgcatttaaaaacaaatttttaaaaaatattcgaataaataaaatatcatttcaaacatttttcttagaattttcctgatagtgattgaaaaatgaccaatattgggatttttcgacaaatttttcccattcaaacgaggggattgaacaaaggcaaaaactgaagatataaggaggaagcttaaaattaaccacgaactcataagtcatattcacttagaaaataattcatacggtttaaaataaaataaaataaaataaaattttttttagatttccttccttaattttcaatttgaaattccgcaatgcgtaattgtgggcccactaaaaacccgcaatttccataatacgtattcattcatacttggaaaaaaattaactttatgaagagcaaaaattgat

SEQ ID NO: 16010 - DNA, 2412 bp, Heterodera glycines
  unsure (1)..(2412): unsure at all n locations
caattgacacagcaattcaaagcaaaattaacaaagtcattgacgcaaaccctggacacagcaaataatcgaacttgctaaaatcctcacgagaagcatttcagacgttgtgcagatggaaccggaaatgatatcctcttttaaattcgtctcgttttccatttacaaacaattctaactgacagcagaatgatattaatgcaaaaaaaaatttgatgtgtattttatttgcaaggtgaaacacgaatttgataaaacttggcattttaagacctaaacgcatttttcgtatatattttaggtttctaagcaactattgaatacatatccatttagtatttttgggatttttagtgcatgtttcatgcgcatattggcattttttagtgcatacaaccaccctaccaccctaccctactgatgagttatggcgtcgggattaaaaaggccccataggttaaaaaaatctttgacaaaaaatcgaaatagtctaaaaatgacaacaatcaaaagaactaaaaaaatttgcttgaaaatggtctcaatttaaaaaaaaaattccttatacaccaaaatcaaaattgaaaaatcttctacgggccaagctcgaaaatttttgaaaattttcgacaatagtcccatggggttagttagagataaaggcctggaatttttttagcacccattgcaacttaggtacaaaaaatagaattatttttactaataattggggggcggctatttaggggngggggggggaggcatatttcccaacccccatcaaaagggggctttatctcagggaggattataattaaggggggctgtattttaggaaacatgatattactaaaaacataatttttctttttcgtaagctgcattaatattgaataaatacatgatgagctgtttcaaattaatttttcatgaaaagctgttcgaaaataatttttcactcattcatatgtccttcaaataattttatggtatcaccccccccccccccccaatttatgaggttggcatcgttggcatttcccaagcataaccagtggatgaatgccattcgcatatgaaaaatggtaatgccaaacactgcttaaaaaatgtaaaagccagtgaaaggtatgctagggagcaaaatttattgggcgctaacgtttcgcaggcgggcgccaactgcgctcagaagctcattgaattttccacttggcattatgccaaccaacgcttacgtgggtaaaaggcgtttaaatattggctgaaaagcccacccaaatgaaagcacattaagagaaaattaaaaaagacgcaaatggagcgcctgctgctgcacgttgccaagaagctaatgttataccactatttctttgctttgtgctgctggcagcagatgaatgccgtgggatctctgctgttggggctgcgattcccacatttttgggcatcggcatggtgattccagtattttttgaggcaattaaatattcaaaaaaactttttccacgggatttttgccattttctgccacacctgctctaagcatttggaggattatttaccgttttcggttcgccttactttaattttatcaatgaatttagaatttatttaaggcataaattgtgggctttataacttggggactcgacaattggggatccgaaatttggggattccaattttgggaacccgacatttagggattcgacatttgtggttaaaacaacatatagggacccgacatttagggacccgactttttggggatttaatagaaaaataaaaaattttgcgtatacatttggtctgccaaatttaataatatatttttttgtgaaaagttattttaattttcgagagtagatatgaaatataactctatttttagactcagccacaaggaggtaactaactttgagtccataaccaaccacaacataatatacgaatatatttttgtttgtttttttaaatttatgtacattcactatttttgctaaatttcccaagggccaacgggaacagaaattcgtcaagagcattcaaaaggttcttgacagctttctgtttaatcgcatactgcaacaccaaagatcatttttcggtttttatttttcagggtcatttgttggttgctttgaatttatttttaaccgttacttttcgcaaatttctgggcttgatatttaaagatttaaatatattttctttttctcaataaatcttcaaatgacgcttcgtacaagagccgagtccccaaaaatcggaatccctaattgtcgggtgcccaaaaatctgaatccacaaataacgggttacctactctcgggtacccaagcccgaaatgtccggtagccgtcatagatcattagagagggcaaatcaaatggaaaggggctttgaaaa

SEQ ID NO: 16011 - DNA, 3568 bp, Heterodera glycines
aggaggcaattctcgtgctaaacggtgattaggaactcccaccggggcccaatgatcgctgatgaacgcacttcagctgctgcgagtcaccactcaaactgcgcgaccggtcctggcttgggttggacggagaggaacagtcggtggtcgtgccattggccaacccgccgaaacggtggtgcacccaaagttcgcttttctcggtcaaagttttgagaacgaacaaatcccggtcaatttggtggtaattctaaaaatggcgaaatgccaatctgacaaaaagaacggcggatgacctgcacttccttgttggacaccagcagttgcacctttcatcaaacattcaaaattggcattgacattcacatttcgccaaacctggcccatgtcttcgaccaattcttgaaattgggtaaagtggcgaaagagaatttgcagcgacaggctggtaagcggaacgaagtcactcatggtcatctggagaaggatgcgcagtagttgctgaccgtgctccctgtccatgtccaactcgaaggaatcgccgttttgccatcggaacacggcacggcacattcgctggaccaattgctcgtctatttgtggtgccgaggcggacaattcgccactgtcgccgcaggggaagtgccgtttgaagaaggcgagggcggtggtaatgcgaaagtcgcgtcggatatccatgatgaactgaagcagctcggccaccagcagcttcgtctgcagcaccatctcacggctcatcttcgcgcaggccaaactctccgccgcctccgtttcggcgcggaagtctttgccggtggccgatgtgcgcttcagcagcggatgatgggtcgaaatggacagcgactgaaggagcggcgggggatcggcggtggacgcgcggtcgtacgcgagttgttgactgaactttttggtgagttgccggatcagtttggaccgcgttccttccgcccgatcggtgtttttatctgaaagtgcccatttttacgtccaaattttgcttccgttttatcattaactgaatgatcgctgctgttctctgccagaacaactgtcgacaattaccaacaaattctgtgacaattttaacaattcctggaaatcgtagaagccaaagtgggccagcgcctgaagggaaagcaaattggctaattaatgaaattgataaagcaattaattaattggctaattaatgaaattgataaagcaattaattgcgtattagtctcccttgcctttgccaaattcacaatttcaaatgtcaatcggttttcatgcgcattttctgccctttctctcagcacgggctccccgggccgtgcccggcgtcgaatgccttccaaatattcgtccaccattttcagaatttcgcccgaaaagtccggtctgtcgcgcgaaccttcgccgtaattttcagcagccgaaatgaaactgaaaaaaggaaaattaaattatattttcattaaaaaaagcttaaaatattcactttttgacatttatttctgagggaatgtcacgccaaaggcgcgcgtgacgaacggcggggacgggcgacccgctgaagcgattcaaaagtgagaatttcaagaattaagcccaccgaacgatgtgaagatgaagcataagtcgagtgaaagaagcccctaaaggaaaagcaaaaaaaaagtgccaaaagcaaaaagaaaaatgccaaaacggacttatgtcaaacggaaggcgatggtcggacatacacctgaaaggagagagaatgagaatgagggaaggggggggggcggtagaagcactggaggacgaggccctctgtctattcgcgactgccgatagatgtgtccgaacacggggattatctcgtacgaatattggtatacccaatctattgaatgcatttcagttcataaatccccgttctcgctaattttacgtggtcgagcagctcctcatccttgaggaacgtctcatcgcatgattggtatccaattagataccaatacctcacagcaccgcagacgagacatggcgccttgtcgtacagggccagtgatgtgacctcatactcagttgtgccatcgtcgtcctccgcgatgtcggcagcattttgatccgggtgtcaatgttggcactaataaacaaatttgtccattaaaaatgaggtagttgcgaatggcttctaactcattttgcactcaaaattatgaaaagatctatctcgggatgagtcaaattatcattttttgcctataatctataatttcacaattaatttagacttattagataaaaattaccccgaccgtcccctaatcacaatttcaacaaattttataacacattcattaaattcaaattttgccgccgccaaaacatgtcagtggggcgcttaaagtcacttattcttttgtgtccaatattccctgcactaatctttgttgatcgccccgagccaaacaaagaaagataacatctgttgtatggccattctgacaatgaagaggaagtgaaattgacaaaagaaacaaaaatttggagaactaaagtggatggggaggggggggggggttttagcgatcgggccatactccgctggtcatttctccgaatattcgcgccatgcagtggattaaattcaactgcacgctttgcccgatcggtctgcattgtttttatccgcgcaagtacgcaaagcctgtgctttgtgcgcatcccagcgtccgtaacatcaccgactttttgagcaccgggcagcttgaggaagctgcaacgacagcaacaacaacaacaccatttccgacaactgccgtggtgtcggcggcggcggcagaatgcgcacctccgcccgcgcagctgaccgcatggatcgcggtgtgcactgcgctgctggcgcttttggtgattgctgaggtctgttaattttgggcatttatccgctaaacccctattcctcaattaagcttgtgcgcgccggattcaaagtgcgcaaatttttgaaggaccgcgccttcaaaaaagggatgctgcgccgccatcgccagcgtgagtttctcgctattacatttttagcaaattgtaattaacaatttatacaggaatgagcgccgctcgtcggaaccgccagccggcaagcgcaccgactccgctgatcttgccggctatgttggccggcgtttctctgcgcccgacgggcgtcaatttgactgtggaccgagggaaaatcccagaaaaaacatcaaaatggtcacaagtaaatcatgattactgtcttataaatggagccatttactataagaaaggaaaatcaaacgcagaaagaccaaaattattaattccttatttatacaggaaagaaatttttcatttaattcatgatgagggacattttgggttcgacaaaacttggccagaaatcaaaaatcgattttattgggttggaatgaaggatgacgtaaatatgttaattgatagttgtgtggggtgccaaaaaagaaaagttcaaggatgctgcgccgccatcgccagcgtgagtttctcgctattacatttttagcaaatt

SEQ ID NO: 16012 - DNA, 2483 bp, Heterodera glycines
  unsure (1)..(2483): unsure at all n locations
aaaacgaacctcttcntgatcactgttgtaccttcttctcccaccccgagtgtacctcttctaatcacagttgtacctcttctctttaccgttgtacctcttgtaatcactgttgtacctcttctatttcctgttgtacctcttctaatcacagttgtacctcttctaatcaccgttgtacctcttgtaatcactgttgtacctcttttaatcattggcgcgaagcgcccgtcctgaggccgcgaagcggccgaatgttctcaacaaaattaaaaaacgggcgcgacgcgcccgtcctgaggccgcgaagcgcccgtccggaggccgcgaagcggccaaatgttccccacaaaattaaacaacgtgcgcaaagcgcccgtcctgaggccgcgaagcggccgaatgtcccccgcaaaattaaaaaacgggcgcaagcgcccgtcctgaggccgcgaagcggccgaatgtcccccgcaaaattaaaaaacgggcgcaaggcccgtctgaggccgcaaagcggccgaatgcacttgctcatcacttatcaaacgcgcatgcactagcaacgaagtcctttgcgcgaagcgctcatgtcagcgcccgcccatatataccaaaagtatactgtctacaccgagcaaatactgtgcaaagcatactgtctacaccgagcaattactgcgccacacgctagtttatatatatatagaataatgttgcagttcgtagaaaaaattataagtccccgtggtttgcccggaggctcctgaaagtgcggcattgcttaagcaactttttgaggcgcatctgggaaaaataaggatttttcggtccggcggccagttgagcgccagcggcgctgaaacggccaaataaaaaaaatcgtcgcggttttcgggctgtaacttttctcagggaaccgggagcggaaaaagtccgctgagagggcacaccccagacatgttggctacaactttgtcactgatcactttttgatcagatcaaatgccgagcctgtagaaattggcgactgaacggcgctcaaaatgccggttttggcttttcgtgaataactcgctgggggttaagcggagcgggttcgcgccgcttgagcatttgtgcagtttttaaagctgcatccgatggcgttttcagattttgaaaattttcaaaatttttcgagctaggccccctcgaaaatttttcgtttttgaattttattattttttgccgatttttcccaggaaaacggagaccactttcaagcaaccgtttttcgagctctatcgattggtggcatttttgaaaaaatttcaaaattttccggaaatagaaaaattttccggaattgagctccccatttccgttcaaggcttataactcgtcaggcgttgatcttagcggaaatttgtctaagagcatttttgtagagaattttaagctctatctaatgtgctttatctcatgtttttaccatgaatttaaaaaaagttataaaattaattgtgattttgaaactcaaaaccataggggggaccccatggttttgcatttcatgaaaaaattttttgctcctaaattagccaaaatgcatttttatggcataatttgaggtgctgaatacgtatatacgctttattttgtgtttcagactttttggaaggtggttaaaattttttgaaaaatcgtcaaaatttgagccccggaaaatcctatgaaatttcgaaaattcataaatctcttcgtttttggtcaaatttagtgtaataaagctttaaaaatagagaaaaattgggagaattttatgagatttatttggaatttctatcttccaaaataaaaaagttattccagaatttctggaaaaattcgatttttcagaaaaaaattcctaactcccttctgaaaaagtattttataaaaataatatactcaaaaaatccgcaattttttgctctattttataaattttaatttagcttattatcaattttttgaaaaaagttatagaaataaaagtgattttgtaatttgggaccaaaggggtgtgaccatgatttctgaatgtgaaatttttttcaccaaaaatcttcaaaaatatgattttagggttatttggccgctgatcacgaatatgtaatcagattttactttagacatggttaagacctcagaatccctgtgtgattaaaattaaaaaacgggcgcgaagcgcccgtcctgaggccgcgaagcggccgaatgacccccaaaaaattacaaaacgggcgcgaagcgcccgtcctgaggccgcgaagcggttgaacgtctcccaaaaaaattaaaaaacgggcgcgaagcgcccgtcctgaggctgcgatgaatttctaaattacatcattttctagcgacgcggcgaagccgcgtcccatagcgcgatagcgctttaaaacagcacattaatacacttaatgttttgtctgtttaaaataacaaatgtgcat

SEQ ID NO: 16013 - DNA, 2987 bp, Heterodera glycines
  unsure (1)..(2987): unsure at all n locations
caaatcgaaacacgtcaacttatatggtgctccctttcttctaccgtcaccgncctcaacactaatggactaccgcgacttcggacaacaaagggaaaagggcgaccgcctgtctcctcacaatcgcacattttcaaagtcaacaacaacgacaactactgccttttttacgccttggaactgatgcgctactactcattatatatcaggggagtaatttcaaggaaacaatttagatggattaacaacaaccaaacaacggttttacgacaaaaagtgcagcaactgctccgcgaggcgggtatcccgacaactgaaccggaatacgatgcagaaatatacattcatcaagtgcaagggttgtggaacgtcaaatatcccggtgagtacaaaattttcatatttaacgattaccagatgagcccaatcaccaaatctgatatcaccgattaccaattccctattcttctctaccacaacaacaaccactttgacggcatcaaaactctttcaaaatttttcaacaaaaagaactactgtctctcctgcgagtcgccgtactacaagaaaatcgagcactcattaaaatgtacttcactctgccacgggtgccgtgaggtgggcgttgactatccctgtgagccccaacaaggatacagcaaaaaatgtgagcactgtaacaacaccttttacaacaacagctgttatgagcgccacctccacaaggatttgtgcaccaaatttcaacgctgtgaagattgtggggtaatttataacataaaggttcatgggagtgttgggcataaatgtggggaacagttttgtaaactttgcaagcaatttcatataaaagaagacgacgacgacgggatgaacccctgtacgaaatgtttcatccagcccctaaagcaacaacgaattaagtcatacaggatcatcgcatacgactttgaggcgacacaggacaagaaagtgggcaatcgtttcgaacacgaggtcaactttgcagcggctaccatcatctgcaccgactgcattatcaacagctactggaacaaatcacttcagggaaaaaagtgccaaatttgtggacctcaccgctcaattaccttttcaccttttgactacacggagacaacagtcgaccaaaaaatcatcactcaacaaccgctacgcgaattcgtccattggctcctttttgaccacaacaaaaagtttccaacagtcgcctttgcacactttgggggccgctacgacatgacgatgatcatcaaggaggttttagcgcaaggaattcacaacccggacatcatcaaacaaggaaatcgcctctacgagctgaaaatcagggaaaacgagcatggccccctcaccatttttcacgacagctacaacctaatgcccattaaattatctggcctcatcaaatcttttgggcttcatataaaagataaacaacactttccccatatgttcaacaaatcatcaaactacgataaggtcctccagcaccttcctccacgtgaagactattgccctaaccaaaagaagaaggcggatctgcagaaatttgacgactggtacagcaacaactatgaacaatgcttcgaccttaaagaaaaattacccgaatactgctgcaatgacgtccaaatcctcacccacgccctcgtcgaattacgccgggaattcaaacaactgacacaacggaacggaaaacacgggggaattgacattctttggcaagcaatgaccatagccagcgcctgcgtcaaaaattatgcactcaaccatttgaagccaaactcactcgccatcgtccctgaaaaaggctatactccacaacagaatcaaagtgcactggccatcaaatttcttgactggtactcccacatcaacaatgtcaacatccaaactgctcactcccggtacggcgaatatgtgtttaagcgtgaagggcaggtataccaagtggacggctacatcaaaggcacaaatgggaagcgggacaaaataatcgaggtgaatggttgtctgtggcacggttgtgaggagtgttttgatgacttggacgacgaaacgaggatgccgaacggaaagacgctgcgggagattagggaaagggaagagaagaaacatgaaatattgagcaggtacgtcgacttggaggttatttgggaacacgaaataaatgagaagctgaaaaaggacacagcaatgagggagtttttcgacaactggaaggaccgctcgccaatcaaaatcagagacgcttttcatggaggacggactggaccaatgaaactactccacacagctaagccgggacaaaaaatcagctacaaggacttcaccagcctctacccgtggaccaatttctctacagactatcccctcggccaccctaaaatcatcagtatcccaccaaatgagcagacggtcaactggagctctccatccgacaacccctacaaaggtctgctcaaagtgctacttctacctccaaacaacaacatcaacgtcactgttatgcccataaaatttgatcaacgcctcctcttccctctctgtgagaagtgcgccaaatacatcacagcaaaatatcccaatggcctcaaagacaacgactattcctgtccccactttaaccctaacgaccgggccttcgtgtccacttgcacccatcttgagttaaacgcagcattggaggccggctacacagtccgcaaagtcttccacgtcctccaatacgaccaatggagtaacaatgtcttcaagtcttacgtgagtgaaatgatggccctgaagatccacgcaaccggcttcccgtcatggtgcagcagcgaagaggagaagagtgaatacattgaggagtgctggatgaaatttggaattcatctggagaaggagaagatgaaagctgaaccggggaagcggtacatcgccaagctctgcctcaactcactttggggccgcttctccatgag

SEQ ID NO: 16014 - DNA, 5160 bp, Heterodera glycines
gagtatataaattgaaaacatatacggacattaacaagaaatttgttcgattttttttttagtataaaaaattgtctataaaataatgagacattaataatgccacttaatacccatgaaaataaatatgttttaaacaaaattcgaatatcttttttatttacacatgaaatgagaaaaaaaaaattttttttaatacgcgagaattacgctttttagtttttattgactcgcgcatgggtcaattaggagttaaatattgaaaaatttcattgtacttcagcataattggggaaaaataatattaactctttgccaatgatgaaaataatttaaataaaattaggaaaattaaataaaattgtattttaaatggggttaaagcatgatttaaatatattttgataatcccaagaattttctgttcaatattttcgtttagctttgaatcattatcagtagggctccaatttttaggcaaaaggctatttttttcctgagctccccgtggcctgaaacgtacgaaaaacatgtttttttgggctgttgttaagctatttttcgagttattagtacctattttctaggcttttatttttagagcctaaaaagcctaaaaaattttgaaagaccctatttttgcctattttggcgttttgccgaaaatttgttagcaaaaatacaataataataaaaaaaatacaccccctaagtatcgatttttttggaattttaaaaatacacccctaagcagagattcaaaagtttctgaaaataaatcccctaagaaatgaaaatcttctcaaaaatcgtatttaaaaatttttttggacaattttttgaatttaaaaaataatgtataactcaatactggtttgacttattttatttttttcattttacacccctaaatttgagactttttagagcctatttttcattttttgtagcctattttgggggttttttagagcccaaagcctacctattttagcggttttagtgcctataaattggagccctaattatcagtataaagcgagaatttaacggatttgagaattttctgactttttttttttgaaattttcagggggttaattagggcataaattgtttctctatgccttcaatgccaaatcattgtatatttttttgtacggcaaaaaattaaattaaattgaacttttttttttaccgttcacagcgtttgccttcaaaattttcccgacaatagcattggccatcgaagtcgcatgtgagtcccttggagccggccgaaaaacagtcgcatgccaaacactcggggaaacggtaatggccagcggaacatttgtcgcaggtgcgaccagtaaagttggcaaagcatggacttcaataaaataaaccattttaataatatttcttcaataataattaaattaattatatttcgtcaatttaactttggaattgtaattttttaattattattaaaataaaccattttaataatattttttcaattaaattaataatttttccccaatttaattgaattgaaatgattattttttgaattttaattaaaataaaatcattttaatgatatttatcaataaataatttgattaattatttgtcccccaattaaattgaaaaagaattttttttaaattaatttttttaattaaaatttaaaaaactatttattcatatttcttcaagaattaattaattaattaattatattctccatttgaattaccattccccggttttctgatcgcattccttcgtctttgatcctttctcatggcaactgcactcacgacagttcgggtagccgtagaattcgtcatcgcagcggtcgcagcgccggcccgcgaaacccgccttgcacaaacattggccacttgccgaatcgcaaacctaaaagggcaattaattttattttaaacaacccttagtcgatttgctattccaaatttttggctttttggccctgacccctaaactgatcagaaaaagtgatcaaagtttcggaaaacaataaaaaaggttacttttttaaaaaattcacaaaaaattccaaactcatgcttgagccatcaaattccttaaaaaattatcagcaaaacaattctctatcaattggttatcataaaataaattaaataaatatctgaataatgagatgttagatcgaataatactttgaagaaaaatcaaaataaactcatcatctgtcgagcggatccgaaccaaataagtgaatttttgctggtttttttatttgatcacttttttttttgttgatcagtttgaggctcataagaagtgtgtgtgtttttttgggatttttaattcaaaacaatgacaattttgggcaaaattcactaacgaatttcaaccaaaatttcaatttttaaaataaaaaaaaactaacaaaaaatagttttatttaatgcaaatatttaaataaattaaacatctggcattggtcttttgcaacaaatatattaaaatgatgagattaaaacggtgattgttcgtaaaaatattaattaaattatatttatttatttgttgccatactctgactttttctgcttgcgtgtttttccatgcttttttgttatttcaatggaattaatttttgggaacactaaaattattatttaaaatttattattatttttaataaagtctaacaattaaaggtgtcatgacaactcatacaatttcttaggttaggcctatgcttaggccttatactcaggctttagtttgtaaaatatgagttattcttttgtacgagttgccatttatcccaattaaaatgcttaaactattaattaatttaatacaaatcaaaaaatgccgtacttggtcttccgttccggatgggtcgcaatcgcaaaactcgcactgcggatgcttgtagtagcctttggcgcactgctcgcagcgtaggccaccaaagttgcttttgcatgcacatgcggttgttttcacgtcacattcactgctaaccgatccttccgcatcacaaccacacggaggacaatctgttaaataagttaatattattaggaatttttgaaaaattttaatttaataagcataaaattaaattaaataaataatttttactattttaattgatattaattaattaattagcctttttcaccagctgttatgttcgcgtaaccagctgcacatttgtcgcagagtcgtccagcgaatccgtccttgcacgggcactgtccgtccggtctgtcgggctacaaatttttggtacaattttattcatttaaatacaaaatttattttttttttaatattttaaattaaattatttatttattaaaatgagattgactaaattcatcaactttcgggcatagaatactttaaaattttaataaaataattttaatatctaaattcaattcattttttgaaatgccaaaatttaaaaacttcaccaattttcgggtacaaaatgctttaaaaattttaattaaatgattttaatttcccctaaattcatttaaagaaatgccgaaaaataaaaaattacaacaattttgggctaaaaccctttaaaatccttaattgagtatttttaattctctaaatttgcttttttataaactaccataaatctaaaaaataagaaaatccaagtgtttgttcaccaagcattggctcccctccgtgccattcacatggcaatcacatggacggcactcgggcggatggtaatagcccggtgaacattggtcacagtttggtccagtgaattgtggcagacattcacattgtcccgtcgattcggcacagtttccagtgtgtttggtcgggtcgcagcggcacgctttttaaaagcaattaaattaattaatcagttaatcaggcaattgaaataattttatttatatttaatcatttaggtattgtaatttatcatattgcatattaagaaatttgattacaatttttcgatttattatattttattgcatttaaaataggccattttaaatctgattatttaaaatttatttatcagttttgattaggcaattgaaattttaattaaatttaataatttatcataattcaatatgaacaaatttaattcctatttttcaaaattaggcaaataaattcaatgttttttttaatataaaataaacattttaatttgacaatgtaaatatttaatcattaattaataatttatgatactaaaaatgaataaataacttttgcataattttacatttgatttcattaaatttggcatttttttacctaattgttttaatttatttatcgtttttatttttcaaacactaaaaagactcattttcttgcagaaaattcttgaaaatctcgttcttagaaatttgattgtacactaatttaattattgaaaaaactgttcaaattacaatcatatttgttagaaaatttaaaaaatatatattacgttggcacacatccaattctgaccattctttgccatttggacggaaaaagccgggcgtacatttgttgcagttgatgcccttggtgttgtgttggcaattttgacagtgtccaccgccagaaaatctttttaaaagttcaaatgtttaaatacaatttaaaaaacaataatttcaagtaatatacaaaattaatataaaaaaaacatctcattttccaataaattccaatgaaaattcttaaaaaaaataattaatatttaaactattataaacaaatgtatttttatttttattaaaatatctaatttacaaatataaaaattctcattttcctataaattcctattaaaattcttaaatatataaaaaaccaaaaaattttatttaaaataatttaaacaaattttctttttattactttccataaatgtccaatgatgcttttttctcgtccaattcctcctcataaacgcattcggatgagtggccatggcaattgcacggttcgcacacaaatgggtccccctcatggcttggccgccactttttctgcataaatccggcctgacaccgttggcattgatcaccctcagtgttatgctgcagaaaattggatttaattttttttttagaggattttggcattttgaatgccaaacaaaaactagcccattct

SEQ ID NO: 16015 - DNA, 860 bp, Heterodera glycines
aaaagaaacgagagtaaaataaaggaacggaagatacaatgtgaaatttgtctctcatccctcctttttttgatcccatattttattgttaaaatatttaaggaaggaaagagagaagtattgttttgtatttctgtttttgtttcagtgtgagaatttttttgtgatcattatttaatattacattttttgcgtttttcgtttgtgaatttgtattttttttttttgtttcaaaaaattcgttttatgtttttttaatgagaaaagatatttttaatgtggatttttacgtttacgaggttagtttttaattgaaaattatgttttcttctttggtattggcccttgcagtttgcgggaatgggtgtttttcatttggggttactttctacattgtttttttctttcttttcatagagtaaaaagttttgtttatgttttacttttgcctttaattattcaggtaaattcacattctttttgaatttgatagtatgctgagttcgcttgatgagctcctgtcgattccgtgcgggacattgttggcgtaagttttttttccttttttttatagtggcaattttaatactagccgttcggtataaattttgttttaaatcttttttagaaaaccatataacttcatttaagactttttggttaggattacggtagcgaaatccttggattaaaatttcaactcaaaaacatgtatattttttaatgttttgtttaaatcttaagagtttgtgtggcatcattaccaaaataatggacacaccaaaaaaagtcagcgttgtgatcatgtgggcttcgggggaacaattcctcccccctgagtttaaaactttctgttccgg

SEQ ID NO: 16016 - DNA, 2045 bp, Heterodera glycines
ttttatttgccgttgcttttttgtatgtttcaaaaaatcattttaaaataacaattttttgatgattgtgtctttgtttttgtgttaaataaattatttttttgtatcagagtatgtctaaacattacattgtttagtaacggtttggttatatttgtgtttctgtttttttaatttgaaaagaaaacattgtttttttctttttttaaagagtaaaaagttttgttgtttttctttttttaattcaggttaattcacattttttttaaattgatagtatgctgagttcgcttgaagatctcctgtcggtcccgtgcgggactttgttggcgtaagtttttttctttctttttttgttaaaatggctattttaatactaggcgttataaataattcttagttgtttggttttgaaagattttgttttgtctcttttaagaagcgtttggctgcattaagcctttttcgctttatattacggtagcgaaccctttggttaaagttgtcactaaaaatgtattttttgtaacttttgtttaaatcttaagcaattgttgtggcatcattacgaaaattatggacacaccgaaaaaagtcagcgttgtgttcatgtgtgcttcgggggagcaattcgtcgctactgaatttaaagccactgtgtttctccgttgggtgtgcaaatcggcacggcgcagaagaaacaatcgcttgccgttcttcaggactttctttgggttggaaatgtccttttttgtttttgtttttggcttaatattttgattttaaggttttgaaattggtttgcgttaaggcccagcgctttaactccaaattcgatttagtcgctgttgcgttttttcagctttgaagtgtgtgttgactgctccatttacgctgggcgattccatgtttgctgctgtggtcggggatttagatgcaaaacgtgcggatttgtttgtgtcgggtgattgtttgtcggaaaagttcgggagtctcggaaaaaacgaccagcttgaattgaagcggtcttttgtccggtttgaaggttatttatttattttttcctatttgacgtttgttttgttgcttagatgaggctatgcagattcatgtgctttcgtcggatgttgttgtttgcaattgtaaagtcgttcttgatgtttcttgtcttactacgcctgtgaaaagaaagagcgatgacatgacttttgtttctcacaaagcgcagaagaaatagtttaaaattattatttgcatttgttattttaatttgttttctgttgtttgttttaaaataataagtgctgaagcttgaagagagtcccaaatggagagtaagatgactgaaaatgaggccgttaaactgccgagccacatcgcgtaccttgctaatattaagataaaaacgtattagggaagaacttgaagtaatgatattgagttcttatgatagtgatgccgaataattggtgagattgcgtgccggtgattcgaatgttgaatgattggaatgctggtgggttgagtcccagtgattggaatgctggtgggttgagtcccgacgattggaatgctggtggattgagtcccggcaattggaatgctggtgggttgagtcccagtgattgaaatgttggtgggttgtcccaatgattgaaatgcaggagaattgagtgccagtgattgaaatgttggtgagttgagtcccagtgattgaaatgttggtgggttgagtcccgtgattgaaatgttggtgggttgagtcccgtgattgaaatgttggtgggttgagtcccagtgattgaaatgctggtgggttgagtcccagtgattgaaatgttggtgggttgtcccagtgattgaaatgcaggagaattgagtgccagtgattgaaatgctggtgggttgagtgccagtgattggaatgctggtgggttgagtcccagtgattgaaatgctggtgggttgagtcccagtgattgaaatgctggtgggttgagtcccagtgattaaaatgctggtgggttgagtcccagtgattgaaa

SEQ ID NO: 16017 - DNA, 1928 bp, Heterodera glycines
aagcgaacgctgaaactcaggcctaactttttctattaaacacctacagagcatctcctccctcgcttctggcggaaatttgtctgtcgttgtgttcactagaggaactaatcgttttatgaactcgtccactgacttaccatctttctgatagcaagtagccaatttcctataagctaattccctaaaatgtggactatccaactttgatttaatacttttgagagcattgcttaatgtatttttctcggttgacaaaagtttttcaaaaattattcgcgtgtgagcaccaaagtgtaatttaagtcgatttattttgtctgcttccgaccaataatgccaagtctgagacgtaagtgtccgtctatgtcaagtgatcgctgagtcacggaagtccaattgcactctccacgtagtcgaacagcacaagcacacaaaatccgttgaaatcgccgaagcgggagatgcgcaccatcgatgtgcctaacaatttaaaattatattagtgtgtttttttaaccaaatttgctgacaatatgatcaatttatttaaataagtttctaaattatcacttccaattttaaaccacagaagtatcaagcttaggctgatcacgccataccgtaaacgtctaacaaaaataaaaagaacgccaaaaactgtgctttgagtgcacagataggcaaaaaaaattcaataatctggtcccctatgagttccaaaaatatgattttgggattttggaaagatataccactaattttaagtgaccaaattccccaggcattaaattcaaacccaccgattcaaattgtccgacctcagtcggacttttttcacaatttgctttgagtccgtcgaagcacaatgccgttgcttgatgccaaaaattgccgaagcactgacggctaaataaatacattttaaaattaatttgccaattatttcccctcaatttcaaagtttcgctcaaaatgggccaaatctcaatcaccgtcccaattagcaaggattccctttaaacatactgtcactggtgggcgagtcgaaagtccaccaaggtaagtccgtccgattttgtttgtcgctgcttatgtcacccttttttttgttggtgatgatttgaagaaagatcgttaaattagtttttcgctaaaaagaaataaagaaattaaaagaataaaattattaaatttaaaacaattaattaaaactttttcaataattaaagaacaaataaatttcaaacggctaaatgtttatgtgatggggaaagggaaaatggtaatgcaacatcacacatcggtcaagccaagcactaatgcagcggtgattgcgtcggactttctccgtcagattacaatcgctgtgttcatcgccagggggggggagacaaacagcgatgggaaaggcagggacagcagcagaggaacaaatgcaaagggagagtggcccaaagagtactgtattggactcaaagatttcgaattttaattgtttttttttactcaagaccttaaaactgccgaagcatttttcgcaaatttttttttaatttcaacttcttgtttttcaccctttttttgaagcactaaaatcgccgaagcgtaaaattcacttccatctgctgttgtttactctctttttttggcccttctcattttccctcatttaactcatctcccttcgttagacttcggtcgaaataaagacaaacacttacagtagagcagcttttacagtatatgcctttgtatctccgaagagtattagcacctcaattaaatttttcggatttttttttgacttattcattttgctcgttttctccaacttttcgcttttactcatatactgccgaagcatttaacctctctctgttttggatcttttcaatccccattttcttttataaaaattttggtcc

SEQ ID NO: 16018 - DNA, 2384 bp, Heterodera glycines
atatatattgtagacaattttatttacaacaatgtcgtggactttatgcgcggactgtcactgtatgtgatggcggcgaaaatttgcatactgtacccaagcggaacggtaccctttttggtgcaacagttcttcctcacctattcactgtggtgaacacattatcggacaaaaatgaactaaattgccgaaaaaggggacgaaagaaaataaaacgatggtcataaggactcccggacaatccgtcagcaaatttatattgtgaaaatgaattgaaaaaaatttaaataatatttttttatattataaagtaatgaaaaagcattttaaaaaatttaaacgatactttcttaagaaaataaattaaattgaattattaaacaaagaaatgccgttaataaatctaataatcgcattcgcaagatttgatttttaattattgctcaacaaataaaatttgctgacgaattttgcactgacggagattccgtagagacattttctaagacgaatatcaccttttttgactcaaaattttcctcagcatttttttcggctttcaaattaaaaaaaattattaaaattcatttcataattccttaaaatgccatttggccattggctccctcagggaatggcctttccccgtccaattggccgcagttcggccccatttgtgggcctggggtgccgacaaagagcagtcagtgctcttccgttggttcggcgtcggccttttctcttcgctttccatgccaattatttcgcccggttttccccaacaaaatgccggctttaacatcaattttcacacagcaaagatcatacagaaagcgatgcacgaaggtcattcattcattcaaacattatgaattgttttgaaattaaattgcattttcagcattggcacaattggggggaaacccgtcggtacataattgggaaaagctgcttcagaagagggcattcagcgacatggtataagctagcagaaataggacgaacttcacactttgagcgaaaggattttcagttttcggcatttttggaaaggattttaattgtatttgtggtgaattaatttttgttttcctaaattttttgaaattgttatttcaattttgtcatcctaaaattcattccttggagggttgaataacgttctttcaaatattataaagagatcgcctctttccctgaaccccaattaaataattcattcggttacggtaattcgtttttactttcgtttacagtacccgcacagtttcgccattgaatgtgccgcctcgagcaaagagctcagcgatgaattttgcggctttgttagcacccgaattcgcgtccaattgctgaggagcagcgaatgcgtaaggggcgaagtgaacttttgccacgcccgttcactggtcgaatgtcccgggcacattctcgacaaatacaaagcgtgaggcccaattattatttttaaaatttaattatttgttttattatttataaaatggacatttctcgaattcaaaaaaacagcttaggcaccaaaaacccatcaaaaaagcaccaaaataggcacaaaaaaatgaaaaatcagcaaatttagcgatttttgagaaatttattgcatgtaccgaaccgtaaatgtcgaattcatatttgtcatttcctttttatccacaaatttcactagcgcggagatgaaggagtggcacaacaaaaaatattcgcatattactagggctggaatttttatgtgctaaaaatcctgaaatatgtaataaaatatgtgctaaaaaaacccaaaatatgtgctaaaaaccaaaaaaaaggcctaaatatgtgttaaaaaatgcaaaaatatgtgctaaaaattggaaaaaccaagtgtatttacgcaaaaaaaaatcatatttaatatcagtctttatcaattttcgcccgacctccaatcaaaattttggcgatatcaatcaatttgtaaagtcccggattaatttttccatcagttgaataagttccttccgggaactttgaaatccagtgacgatttaacacagcgtttgatttggctgctttaggcatttaaatatataaagaaattttctaaatgcttaagaaacgtaaaatagtcaatttttagggtgcattttcagattttcttgtattttttttacgatttttctcaaaaatgccaaaatatgtgcaaaatatgtgccaaaaccccgaaatatgtgccatatgtttttatgtgccaaaacgccaaaatatgtgtttttatgtttttataactcgctctaaatcaaaaatagtcggagaaaatgctatttttgggcttctctcgccataaataggccgcaaaaaaatatgttaaaacataaaaatcccag

SEQ ID NO: 16019 - DNA, 1485 bp, Heterodera glycines
tttttcgattttttaacgaaaaccgttcgaccgaccctcttgtctggtctctaatcatcacttttcaacaagatttccatccgtagtctttctcaaactttcccctcccctcccctccgactctcgccgatttcttcatttgatggacgtgttcaatcggttgctccctcggccgggcaatggcaatgttcagttcaaaaaactcagacatacgtcaaattccgccagcattttcgcatctgacgaagcgacgggtgacaaacagcacaacgacgaaacaacgaacaacggaatgatgccggcgacgaattcgccacgggttgaactcggattgatgctgagcaacatcagtgctgaaatgcgacacgggcaaaacagcgcaactgaaggaaacggaaaagcgaatgggacggggtgagaggaaatgaatgaatgaccaataaatatgaaataaaatgacaaaaaaggaatgcattattataataaatgaacaaaatgttatgacaataaaaaaaaggaaagaaaacgaagcccaattcatagtcggacgacaaccaactcgtaacaatgagtttgatttttgcaggaagcagaataaaagctttgtggaagaaaaggccaatggaaacggaccgtcgtcagaagtgaccgctttaagcaaagggaaaagcaacggaacggccaaaggcggcggaaaacgctttctctctgcgcttttgccgggaaagagaaagggacgacttggcctttcagtttcggagcctcgactaaattttgacatcgaaccgtccaaaaatgactttgagttcggcatttattctgagagcacatttcattctttcttttttaagacccacggaaatcgaagggggagaaaatgcgaaaggaggacaaattgcggaccatcaacagaattttggggagaggaaccgattatgcgatggcatttcggacggaagtcgcaaaagtcggccgaattttgcaggggcacttcaaaaggtggcattttggagaatacgctttaggaaatgttatttgctcagtgcttttccatctcacaacacattcattcttcagtacaaatgccttttacacttcgataggtccgtgaaaaattgaacgttcgtccgtcgtccaattcccaccgctcctccgccttttctcctccgatgaatcgttccaatacgacgccgactccgttttcttcaatgcgaactccaacaaacgacaaaaactttgtgaggaataaggaggaaagaacggcgacggatgttcgccagcagcagcaagagggggcgatgttggcgaagttgcggaaacaggtggccaaatcaccaccaacccaaatgaccatttcgatccaattgaccaccaccccaacatcacaaaacccaaacgaacacaacccattaacaacaaacgaagtgacaatcaaccaaatgataactaaggcccggaattttagtcaattacttttccccgctg

SEQ ID NO: 16020 - DNA, 2289 bp, Heterodera glycines
gcacgaaaaacgagttgaaatttatacatttttatggttgtcacccaaaattcatcaattttcactatttttaaccattttaactgtaaatcattatcaaaattaggaaagcttaattcaatttttaaatttaagaaataaattttgaaaatctaaagaaataagctaaaatatttttatttcttattttttaaatatttgatttgccttctaacaccgaaaatattttattttaataggaataatcataaattattccggaaatattttattttttattatgatttttcaggacacaataactgacaaaaaatgcaattaataccagaatatgtaattcaaaaataaaaaaatattcaaaatttatctattaaaatattttgttaaccaaaatttttgaattacataattataacattttaaaatataataatatccctatttataaccaggaaaacaatttttacaaaaaatgcccaaattttagaaatagcgaaaaagccaaaattttcatgaactttgcctttttattcttatataatttcctatgaccacaggctaaaataatggacatcgttggtcgaaaatcaaatggaaacgcgggcaaaaatcggaaatccgacggccagcggttgctgctctctgaggatggatattgctcggggctcgagtgattgcgaacggacggactaagaattaaaccgataagacgacacaccgattatttgtccccacatgacttaaaacatacataatggaagaaaagcttttacttttattcttttcatttgactttttcaatttgacagttaattttgtataaaaaataatttctattataaattaaattcaaaataatttaacgaaatattaaaaagtattattaataataaaaattatagttggtattgagggtttagcatgtgaaagccgacatttaaaaggttaaaaagattcaaatgcactgaattgaatagaaaataaggtttcgtgggcatttcgtgtatttgaatcgatttttgacaatgaaggaggatttgtgaaaaatcaattttcgacattagttcgaattcgggtccggagttcgaaattagtcgaaatggaggtcatattcgtggtcagcgaccccgaataccctggaaaacaaattttatcataaaaaaggggaggggatttaatctttttaaaatttattttggcaaataagcttgataaaatggttatttttattgttttttgaaatatatacctaaactaaattatttttttttcgaaattaagatcccgcgctgaatagcagcttttaaaatgctggatttgcgtgcattaatcccacgagatcccatgtttttttccgtcatatcttattgctgatgtgacatcgatcagagaatttgtctcaataaaaaaaatatgacatcagcctctcaattaaattgcatcagagatatgacatcatggaaaaccgcgaaatttcgacagtggctgatttcgacagagaacaagattattattttattattaacctattcacattaacaagcctgaacccccggatttgctcgaagcagtttaaaattatagttaatattataaatttttcaaatttgatgcagtttcattgataaaaatgatattttttttgaatttttccatctttttcagacacttcgccaaaaaatattaaaaattaatacagaaaatacaggattttaaggcctgagtagtgacccctgtacgattgtcgccccttttggcgctaaattcaaatttgaattttcgtggtgatactctgtgggagggaggacgcgagccttgggagtggggagggacgcaagccttgggcgtggggaggggcacgcgcgcgccgtggggaagggtgtgccgtaggggagggttgtaaaatcaattagatgtgtatgattttttatggtggaaaagcaaaggaaatggcataattaattgttaataaaaagggggagggggtaattaagagtacattgattggtgtttgatcggatagaaagacataggaatggtgtgatgagtgggagtattggaattgattgtggggagggagatcatttcaggagctgatcacacgtctggcagttggggtcacatttttgccccacgtgacggatcatttcgagcttccgcttctccctatcggatcgcctcgctggtgaagagaccgtggacgacgacgacccacagctgctgatcgaactggcggttccaggccgcgacaactcacaatgcgcttgcaccttttgttcggggctgatc

SEQ ID NO: 16021 - DNA, 1218 bp, Heterodera glycines
tcaaatttagcataatgttttttttgctgttctttgcaacttttggttgcgccgttgcttttaatcagtattcgatttcaatcagcatatggccgagccttgacacttcaaagcatcagtattacgtaattttggaattctaatcgaataaatataatattaaaaagaaataacgaacaataatttaaattgttttaataaaattaaggccggaatgaaatgtccttcaaacgataaattctatccaatttatgagccattagtaagtcgtttttcaactcaagaaggtgaccgtgctgagctgtgtacggaggaactccccgctgatgaagaatgcccggaaggtttccaaattggcatttcgatgttgaacggacaaaaagaagactttacatggcagacttgggtattacattaaataaaaataaattttgaaaaaacagcttattaatatgacaaagttgattccttaggattacaagttttgcaactaattaaccttaattaatcaataaaaaaaagttttggtaaactgaagagtaaatgaattttctcattcatttaattaggaaaatatttttgcttaaatgatactgaaaatttgtacggtcgatttgaaaatttatgccaaatttattcatgcagaattaaagcaaattgtttaaaaaacaacacctgaatatttaaaaatttatgcataaaattattaaaaaactaaaataattcttatatagggcgcattttgggtgaataacatcaaatttggagagaataacgttatgtataaaaaagtagaatttggcgttcatttcaagctggatatatccccaaaattaaatgaatcttcgaatattgtctaccgagtgaatgtatattgcgctgacaacggcaatttggagttcaaaacattcacaaaatctgagacagatgtggtgttcagttccaattacaaaacctacgagcaaattggggcagaatatgtgccttccagctcagaggggaaaaaatgtaaaaaatatcaagtcaaagtttggccgagcaatgagaaacggttgagttacataaaagagaagcaagaagtgggaaatgcggtaacaaattccatttgttatacataaaaaaagcttcgtaaatctgcggcctttgtttaattactagagtagagcgggaccgggaattcccggtcatccgaggtcccggtcccggattttgaaaagc

SEQ ID NO: 16022 - DNA, 1455 bp, Heterodera glycines
  unsure (1)..(1455): unsure at all n locations
tttgtttattactagagtagagcgggaccgtgaattcccggtcatccgaggtcccggtcccggattttgaaaagctcaggtcccggtcccggtagggcaaccgggaaccgggaaaaacaagcactggtaagaatgggggtctgagtgcaaaaattagtgagaaaattggagtaaaaggaaaaaatttagaaataataattaaatatattcgataaagtagcacgaccaactgtgcaaatgacctagtggctagtctccttcactttcccttcttctttcccctggttcattccctctacagaaattaaaatatttgaattttctttttgtacactcatggctttcctatcgacaaaatatgattcttaatttttttaattgtattttatcattttttaaagaaaaccgtacaaattgagcctagtaatctcaaaaaccagccttttttttttgttgaaatttgttaacaaatcacactcaaattttcaaaattttcccggcggcgcctatcggcaccgccggacccccttcttccccaaaagttttctggaaaaagcgcgccgaaaaaagtgatgtgaaaagtatgtaaatctgaatttctattaatattcgatcatttaaagtacaaaatgattgttggttgaaattagtttgaaaatttttattaatttaaatagctttaacttttggattttataaaataaaaaccaaaataaaaatttaattatttaatattttcacttgaaataaattaaaatttgaatttttttttaattttttgaatttttaaaaattcccggttggtcccggttcccggtcccgaacaaaaatcgaggtcccgtcccgacttctcaggtcccggcaagtcccggtcccggttttgcccaaaattcccggtcccgctctactcaattaattaccataactttgctcaaaatcaatatcgatcttggtatcattaataactaactgttttttagcctacaaacttcaaataatgaaaaattttgggctatgtaattatttactgaaaaaggccccgttggtggtttttatgaacaacttagtatcttatttattgttaaagctttcatgagaactacatttagctcttggaacccgagtttgtcgcaagcggtgtgattacaaatggcaaattatataacaatgttaaattcccggttcacttcaatttgatcattgagccgtcgttggaccatgaggcagaaccaatttattacgtaaaagtaaaatgcaatggcaaagaatcgaacacattcaaaacatttactcacggcaacacgaaagttgtgttgaatgtgaaaggttgtacaaaatttgacatatcagtgagcaaaatggacagagaaagtgaaagccccgaggtgcgaatgaatttagtaattttacattaaaagtttttatttttgataatttctctnatactnattatta

SEQ ID NO: 16023 - DNA, 2534 bp, Heterodera glycines
ggggacctctagagtcttggtcacattgtaccaacatctgagagaccaacaagtgctccatcaggtgcatttgaattattttccatggaaataatagaaatatcctgtcaaggctcaacaaatgccgtcaatttcggctgcaatgattgccgctgcctcagcgtcaacccaatttcctccggcgacactgtcaaaatgtaagacacattaaggtatttgctgatttttcatgtcttttaagggcactccattgttacgcctccttcttcgttggcccagggaggggcactcgaggagtttctccgtcatggtctcctggcaccgcaggcttcgtcgtttgcgccttcttcgggcagaggagcagaaagtgtcgggacgagcgcaatggctgctccaacgtcatttgatgaactgtttcaacctaaaatgtccaacacttcttcgtcccctcggacctttccactgaatcagccacaaatgcaccagcaaatactagcgaatgtcccacagagaaatgccacgggcacaaacatttcacatcagcaacaggtggaacggatcaattgtagcacgggaacaaccccaggcatttgtctgacaatgagagggtgccggaaaaccaagcagtctatttccggtactattgcatttgttttttgtttagcaacggcagcaaacacaacaaatttctggggcgtctgcattaaataaacaaatgcacacggaccatcaacaccggcaaccccatcaagcagtgcaacaacacgcaatgttggggcaagctgcagagaaacagcaaattccgcagcaaatgcaacaacaaattctgcaaaatccggttcatcaacaacagatgcagcaacagccccaaattcagcaacatcaattggcccacaacagccgcattttgttcacacaaatgtgccgcttcagccatcgccgcaacacattttgcccattgctgaaccgcaacaacaccaagaacaagtgcaacagttagcgcagcagaaaatggtgaagaagcaaagcagcgcaaatgtgagcgggattattgggcgagggaagcaaaagaattgcattaaatgtcaaaatttaacagaaatacccagtgctgtggcaaggacaattggcaatgaaaaacgcggacacgctcgtccaaatgcttaaggtgtttagttgggtggaatggccttttgaatctccaaagttcacaggtctgtggcaatgaatcgctcgtccaacaaatgaacgccgaactttcctcggtcaacgaaaacggaattcccctcctgcgcattaaccaacggatgcgattggagcacactcatttggaaagtgagaatagctatcaaaatgggatcggtttaaaaaaacctaattgtcccctactgttagatttaatccgaaaaatggagagggaggacaaccaattggcgctgatttgtgttccttgcggccgggacagagaggacgtggtcatccaaacacagaaaatgaacatctcgttcatcgagtacttcagttcgaagagtgccgccggcattgtcagctcgggccccgtgagttcaattgttgcatttatcatttgactggaagaacgacccatcaataatagactcaacagccaagcgcaatggtggcacacatttttccgcccagtgatttcagtcggatgctcctgtcgcgaaatgcgccgaaccttttgaggacggtggagagtctcaacgcgggatacctctttgtgatactaaccaacaaatagagcactgattttgccgctcattcataccttcacacttttaattgttttagggaatagttcatagtttattttatttgttttccctgctaattctgacatttcctattccgtgattcggtgtatataactgtacgtttaatacatttattgtatgacagtaatttaaacaattcaaatgataaacctaagaatgtataattcggaggatgcttcaagtggactcactttgagagtctgtaaaatacgctaaattggcgaatattgttgtcgttggtaatccgtccattataaattcatttatgtgtgtgctgtgtgcctccgtggataaatgaattatataaagggtcacaaaaggttggggcgagtgagtattatttcgaaggagtgcctctatcaggggaattgggaagcaaaaattacgccgcggggcactatggacggagcctaataattggaattaggaagagcttggagggggggaattactgcccctgggatttgggccatcttttggcattgttttggcaaaacgcttttatatgttcatctgacggagaaacggcatttctcgagaagcgcaaatgaccattggcaaaaaaagacgatttggcacagtccaaaaaaatggccaaattttccgctgtcgcccctcccccccccccccccactgacatcggctaacataaaaaagccaaaaaaaagggtaaagacatgcagtgcaaaagggggggtgtgggagtgatgggtccgtccgtccatcgtcccatgacag

SEQ ID NO: 16024 - DNA, 1198 bp, Heterodera glycines
  unsure (1)..(1198): unsure at all n locations
gaaaagaaaattcttaagtaaaaaaagagccacatatttttagacaaatgagattttttttatccgagtggatctagggttaggcaaggggctatataaatgtcgtattcgtattcagcgaccccgaaaagcctaaaacagacccgttttccggctttttatgagctttttagacttttggacaattcgtgagtttttactcttttggacaattcgtggcttggacaaaacgtggcttggacaattcgtggcttggacaattcgtggcttggacaaaacgtggcttggacaattcgtggcttggacaatttgtgggtcagcggaaaaaagtttgtacaattgaattttttatgtgttttgctacctaaaaggcgttaataaaaattattttcgtgcctattttaggatttttctgcctttttaagtgcctatttcgcgattttttgtgcctaaaaatcccatccctatacataatggattatggcttttttgcaaagaaatttaaataaaaattattttactttaatttaagctattatttatgagccacccaatttggcaaatcggtctttttaaacgcattaaagaagatttcagtcgattgcttggagtgtaagcaaaaaaacgctattaatttttcatcccccctccctatgatcattcacacattcgctgactgctgatccgtcttctcattcctttaattttagcctttcatcatcgctttcaaatggccaatgccctcccaaattgcgccggtctttccggtaataaagaggcgccgtcggcttttccctcgccaccttccctcccccctcactctctcatccatccgttgtcttttcctctgtttcgtcctctctcctcttttctccttcctttccctccgcccgctctttttctctcgccccctccttctctactcaactctctcatccgctatttcttcactttatccgccaattcatttcctttctcttcatcggcacattctaacagttttacgagcatcgaatcgctgctcagtgagggaaaagagcggcacaaactgcagaaatccccggggggaacggattacggtaagtcactggcaaaggcattgcaaatgcctccaaccaatcgctgcgataggtgtgccgtgttcgtcttcggcacaaagagcgcttcccanaggggcagcagagaaaggcgaacaaag

SEQ ID NO: 16025 - DNA, 1174 bp, Heterodera glycines
attttcgactttttgttagaatttgagttcggggtccggaattaggcgaaatagaattcgtattcgtgatcagcgacccagaaaaccgctgtaaacatattttcacgatttttgaaattaaaaaaagttaaaaaatgttcgaattcgggttaggggttcgaaattggtcgaaatggaggcctgattcgtgctcagcgcctcaaaacacccctagaaacgtgttatagggattttcagaaaaaaaattaaagaaaaaactttcgggaccaatgatcgacatgattgcctaaaaaccatttccaaacccatacataaaggttcaccctttgttatttttttgggggctcccaacagcaaaaatgatttactctcttttgaagtccgtccgtcaatagaatttgatattttaatgggactgccgaggagatttacttgtcaaaacgacgtcttttcacttcattttatttaatattaaaatgcatccaatttaaaaattttatcaatacaaaaaccaaaataaatataattttaaactttgccaaaaatttaattcaactattttatttaacataatgatcactagggatgcgatttttagatttttacatatttttttcctgagatccccgtggcctgaaacgcacgaaaaacatgtttttttgggctgttgttaagctacttttcgagttattagcacctattttctaggtttttatttttagcacctaaaaaacctaaaaaaaattttaaaaacttattttcacctattttggcattttgcccaaaatttgttaacaaaaatacaataaaaagaaaaatacacccctaagaaccgacccaaaaattttttcaaaaaatacatccctaagaatcgaccagaaaattttcaaaaatgcgcccctaagaaatgaaaaatttctcaaaaatttatctccaaaatttatttattttattttcttgacgataatttttgattttgaaaattatgtatctcattaatgatttggcgtaatatttttgccttttgaagaaaattttcgattttacacccctaaattcgaaactttttggcacctattttcccatttttagcacctattttggggtttttttataacttaaaacctacctattttggcagtttttagcacctaaaaatcgcatccctacttat

SEQ ID NO: 16026 - DNA, 2036 bp, Heterodera glycines
  unsure (1)..(2036): unsure at all n locations
tgacggtttgcccgggccaagcggtgatcagcaacaagcagaaatggatttatcgcttgactgatgcaattatatgctctaaatgttgtatgtacactgttatttgagtgtcgttgtatttgattgttgctcataaattcataaaaagaaatgagtttgcttatttgttaaccaatattttgtaaagtaaaaaacaccccacagctaaactgattatttttaatgacatatttcattaatagggcccggatttttatgtgctaaaaatcctgaaatatgtaataaaatatgtgctaaaaaatgctgaaatatgtgctaaaaacccaaaaaatgccaaaatatgtgctaaaatatgtgttaaaaattgaaaaaataagtgtgtttttgcataaaaattcccaaaaatctcattctttatcatttttagcccatacaacgcaaatcaaatacatttcgaagtgtttggggtaaaattgtctttttttgataaatcatttctataaattgaaagttccagcagagaacttcgaaatccaatgacgaattaatgaattcgagatttcattagtttctacaatcgaagaaaaaattttttaatttgaaaattatgttaataattaggaaaaaagtcgatttttagggggtgtatttttcaattttcttgtatttttattgcaatttttctcaaaaatgccaaaatatgtgcaaaatatgtgccaaaccccaaaatatgtgctaactagggatgcgatttttagatttttacatatttttttcctgagatccccgtggcctgaaacgcacgaaaaacatgtttttttgggctgttgttaagctacttttcgagttattagcacctattttctaggtttttatttttagcacctaaaaaacctaaaaaaaattttaaaaacttattttcacctattttggcattttgcccaaaatttgttaacaaaaatacaatttttacgaaaaatagacccctaagaatcgacccaattttttttcaaaaaatataccccgaagaatcgaattgaaaattttcaaaaatataccctgagaaatgaaaatttctcaaaaattcatctacaaaatttatttgtttaattttttgacgagaattgttgattttgaaaattatgtatctcattaatgatttggcgtaatatttttgccttttgaagaaaattttcgattttacacccctaaattcgaaactttttggcacctattttcccatttttagcacctattttggggtttttttataacttaaaacctacctattttggcagtttttagcacctaaaaatcgcatccctaatgatcactgagcactattttttgaaatataaaaaattgaataattttaaaaattaaatttttttacaaaaattaatgttagttaaagagttagtagctatccgtatcatagtttggaaacaaggggacgcagaaggacatgagtttgaccgctgcactgtcaatataattattttttctaaaaacataacaaaatccgagaccgataatgcataatttccgaaaacttaagcatctgtcggttcactaaagacgcgccgatgcatacgcagtattatccatcttaaaaggtagctttgctaatcgggaaattatcgcatagtaatcattcgattcttggaccttgatgcttatttgctttgagtagatgaacttagcgttgagtatggtcccaacataaggcatcatatttgaaggcagagcggtagacgccagggatgggccaaattgaaaaataaaaagcgaaatgcgaaaagcgaaatttgcgaaactgaaaaatgcgaaatgaaaaaaaaagcgaaatgcgaaaagccaaaatatgcgaaaatgcgaaatgcgaaaagcgaaacctcggcccatccctggtagacgccctccccgcatntgtcttattcgttcttnccgcctctctggtgttatcgccgccatgtcgaatacgttcgaaagccatctttttgctagcttaatttatatttaccaattcaaaaaca

SEQ ID NO: 16027 - DNA, 2772 bp, Heterodera glycines
  unsure (1)..(2772): unsure at all n locations
ttttncaattgatcaaagtttgcaacaaaaaacagctcaaacatcaatcacaaaaaatgtgattgattggcgatccgacagatggtttttgagggcggcggcgtacgtatgggggggccggtgcaaggaaaagcaacaatttctaatgtgttcattattcattcatttaatttctgtcattcttctgcggctaaattcaccattttgtctctgttttaaaaataaatacagtatttctttaaattttttttgaaatgcaaaaatttgttcaccgctcttcttgtttttttccttcaatatgtcttcgaatgaacacaacggcagcagtgccaatggcacaaaatttccgccttttttgccaccaaacgccaccatccgtcaattcggacggttccgaggcgaaacggcgccaaataaatgagccaccaaaggaggggtccggcggaggtatttttaatcaaaatcatgaaattggacactaattttttcaatttgttcagctccatccctttccgtcgacccgttcggctgggagccgaccaaatgggaacgctttttcctcgtgttgacgcggtgttacgagcgcagtgccgacattcccgcaattattccgttggtggtgcaatgatcagaatttaatttgaaggacggggcgggtgggctaaggctgtttagatttttagttatactttcctacaatccaattacgggagtcatgcattgagacccctactcacaaacagaggagtgggtcgaaacctttcggtctcgataattctaattcagaaaaaaaaattttcgacccattttcatgccctgcctaaattttttaaagtataaaaactccaaaaatggtttatatttttactatcacagagggggaggttaataaaacaaattatgatgagccacttataattatgtgattttttggtttcagtctccgagttggtaaacagtacacgaaacgaatgcgcctcctccgcttttccttcgctttgctggtcgcgatcatcgtctgctttggggccgagttttacatggccaggtctccccagacactttgataaaaaacaccttcaaaaatgccaatttgatattcctcttctaaagcacataaaacggctctattgcagtttacacgaccataaaaaaattgacaactttaatgcaagcaaaaaaaaaaaatccgttttttgcaaaaatttggttttgtttttggttgtataaataatgcaaatttcgctgtttttcagttgggaccgacgcatgcgcaggggccaactgagcgatagcgacgtgaaatttttggaaaagatgcgcgataaagctagatgacaaaagagacacacacacacacatatatatattattttttcgttatgatttccaaaatatttaaaatatctgaaaaaaatatctagggttttcccgctttggattcttaaagaatgtgcattgtgttgttttttgaatatttttccatctgtccattcattcattatttaccatttaaattcggttttagcccccttcccgttaattcgacttttggcaggcaatggcttcgtcgtggcggtgttttcggcactttttctccacttcaaatgcgcgcgcttcgtgtcgtccctttttcgcagcattggccgccggcgcgacagtggcaaaagtgccgaagtcggcggtaggcagcagcagcgaggcacggtttatgtgttcggcaggcacttttttgccaaatttaaatttttttagcaaaaaaaatgataaatttttcaggaattattgcccaatgatggtgagacaacggcggaacagacgaagaagggcgaaagggaattgacagcacgcgaaaagcgttttgacacgacaaaacacggggtagggaaatgcgtaaaatttgatgaaaatgaattggaaaacgaattttaaatcgaattattaaaagagaaaaatgcaaaaatgttttttttttaaattgggcatcaaatttattggagagagacttcacccattagactgcaatatcctaattaataatagcaattagtgacctaaaatttgttgtttttgatgttttgtctctccgcccgtcccggaattttttttaacttttttttctatcataattttctgcgctgaatacgaatccgagtttgtttccacgtgtggctcttttctatagcatgggagcagatcgtttcctgctccggaaatttagaaaaataaaattttatttaaaaaaattagatggagaaaaagacaggggaatgaattgcgcccctttggcatgacaattctcttttatcctacgctataatatgacaaaatgattagcgttttgttgtggaaatattaattcccaactcctccatcaccttaaattttttaatattcgggttttcccttttccaggtccccgactttcgccacgttgccgtcaccgatcagatacaaacgaagcgaagcgtttggcaagttccggtggccccacttggaatagtggcaaccgtgtaaaatttattttaaaaaatttcatgaaaatagtgaattttttgcaaaaaatcaacgaaacaatttttagaatattaaaatttatttttttttaatttttggttgaaaattggacagtttataatacactaaaaaaacattatttatttttgcaaaaaagtgacaatatacgatgaatttgcactttcattcttttccagggccgctttgctgtacgaggtccactcctcctacaggggcaacagaaatgcgctgtta

SEQ ID NO: 16028 - DNA, 2698 bp, Heterodera glycines
  unsure (1)..(2698): unsure at all n locations
ctgaagacttatgaccacatatagaatttgtagtggagtagtaaaagaactgactttcacttaacaaattaacatttttgtctaatttcttggaatatctattattttctataaaattgcgatctcatcttctattttctcaaatagtttggtgtatattgtcattcaatatttgtatttttcaatttatctttttgttacttatctcatctttttattttagtaaatattttaaacctttattcttgttttaattgttctttaaatttaaaactttatttaaaagacaagttgatatttgccattactatgatttttaaattttattccatcaatttatccgtcattatttttatttccgcttaaatggtttggatttctaattatgttaatttttcaaaaataattatatttacataacttgccgtatcaaaattaggagttttaagttcatttgtgcaaagaactatggccattgtctcgaatttttagtgcattcaaaaatgtttgacaatgagaataattgcaggtggtgcctttaagaaacatttttggtaaattaaatgtaggtgttgtcgagcgaatgattgattagtcgatcatttatttacttattaaaaatgattaattatttatgcgaaattattcatttatgtatttattttcttttatacaaacaattttcttttaattttgtttaaattcaaatattttcttttagtttggtgcccgattatttttaatagaaaaccaccaatcgctttttctgcttttatttttattgctttaatccatcttagttttatcttttgtgtttgttatgcttgatataataataatttattcaatattaccgtgagtcttttattagtaagcagatagaatggattttaatttttttgctaaaatagattgaattaattcaggaatgtatgtattctttacaggctgccagatgtgctgcattttgctgcttttcaatggccaaagctgcttttttttgagatgctgaatcggccaaatttgatttgtaaatgaaaatgattggtccacgtcancagatgtcagaggaataaatttctaaaaaggaattaangtttggangaacatctgggtctcgtggttttttcgggacatcatttggccaatttgcgaaatttttaatttccgtttttctcggaccaaaatgccagaaaaatttttctacaaatgcttttttagtcatttgtttatttctcttaaaccaccccatccgaaaaacgagagattaaaccataaatagagagtgcagagaaagtacacataacttttagcgtacgatttctttatttccgttataaaaaaaaactgaatttgcttcgctctataaaaaagtttttttacctttcaaattttctttaaattttgcataccgatagagaaaaaaaatcctgaacaacagctaagttttaagtacaaaaaaagagttagcaaaaaattattaaaacccaaatttagaagcctcattgaaaaaatttcttgaaaattccattttaattattttttcgagcaaacattaaataaaaatgttaatgttgtagagcggagttgaactcccccgcacttttttcctttactatcttaaaaaaccacttagccactcatacaaatcttttttgttataggagctaatttttgtaatgatatgtaaaatataagaattttattttgcgtaattgtcggcacatcacattcaataaattaggggatatatttttttgattcgatgaattttcgagtcaatttcgaaattaaaaaactgcggtataaggcgaaattttattttttaattatttgctgtcttgttatttttcttcttttagttaagtaagtttttaatacgtaagaaatagaaaatagatattgattttttttttcttaaaatcagcaatttgtcccccgcaacccccgcccccgtgaccttcacccccgcgggggcgcgggggtgaaaatacacccctaagaatggcatattcgtgggatataaggcaaaaaatttatacaattttgaattttttgaccatcttgagcaattttgcttatattttttaaatatttgtggtttagtggttagagtttcagcactaataggattctttgttatgagttcaacacctgttgacgttttcctttttttctgattaatacagggtttctttatgttcttgtttctaagaaatgttctgatttgggggtaatgccttattttcatctaaaagaggaaaatttatgaaaaatttggctaacaaataagttccaacaaaattgatataaattcttaaaatttttcatcaagttttttggaaaaatgtgccgcaagaaaaaattttaaaaaatctgagttccaattttccttgagtaaatcatgataatttaatatagctaaaaaaacgaaaatttagcggaaaaatcttaatttttttggtgaatatctgttaataaatttaaaattcgctcctatcggcacgccggcccaccaaaaaaaacctattttttcttaaaaaattacccaaaaatccctaaatttggttattttttagtcaaaatctgtgcaatttatgtcaaaataaatagaatcaaggcgatcaacgaataaaggaatgtggagccaaagaaatcattcataaaaaataatttttttgtgagattttttggagct

SEQ ID NO: 16029 - DNA, 2481 bp, Heterodera glycines
  unsure (1)..(2481): unsure at all n locations
aattctatcctttntgccatttttataagagacattcgtatgagtaagatagaaagaaagacggaaatttaaaaaaaacagttaattcaaaagcacttttttatttttaccagtttcccagtgaataagtaaaataatcagtcataggacagatcatttgttagatggaggaaagtgaatgaatgattaattaaaaaacaaatggaacagtgacaaattagtaaaacgcattttacaatttatttgtagtcagtaaataaaaattccatcagagagacattcaaaatttaaaaaaaaaatgaaaacgatcgcactctttgcccttttaccgctaattgaaatactgctgatcgccatggtcaaccaatgtttatgtatgtttaaaccaaaattaccagcttctaatttaataattaagcattgacgtgcaaaatagactctttcattgaaattaaataaaaaagtacagtacacagacaaaacaacttacaaaaacaaagtcccacaaatccaaatgataaaacacagcattttaattcattactgttcgttcgtacattgaaaagggggaggggtgatttaatcaaattacaaataattcattttcttcggtcatcagcattttactctaaaatttttgaataatttttatattttttaattacattttttctgggtgatttgattgggaaaaattatgctttattcatttaattgaaaatcatataatttttaggcattgattgccgcagtggttacttctttggtaacggttacggtcgaactgaatccatggaatgcgctgggggaaaagactgctttgcggccaaatgccacaatggttcctttttatattaatttcatttaaataaaatatattcacaaaaattgtcagcttcaaatattaaaaatttaaaaaattttgagtccggaggtgccgccgatgtctagagagggttcaaaggaccctacttacgggttatgtcgcccctataccccaaaaatgtcaggatccctatagttttacggattgatcaataataaaaaagtctagatcttttggaaatacaaaatagagaggatttcgcaaaattcagatttttctttttcacagcttcagaaaattacaccttctggggctgtaccgtggaaaacgattgtgacgcagtcagtaaattccttgcatttgaaaaatgcgaatgtttatttggtattaatggtttcaatctttcaaacttggaaatgttgaaacctaacctttgggctcggtcgataaatggcaccagtgagtaaaactaaatttattatttaaagattaagtatgccacttaaataaaaatttaaacataattaatgacaattaacaaacaatgaaaattttcaaaattttcaggtgtttttttaaaacagataaaatcgttttcagatgagtcaatcccaacaggtgactccattgcgctgcttccctcgctgcttcccattgtcattatggcgctatttggtcactttgttaaaactcattaaaatattttaaaaaaatttttgatttaaagcatttaatttaaataacattaataaaaaaatctaaaagattatataggaaaaaggttaaatatgaaattgtaaatttgttttgctttttttattctttctttccacagcttcgcttttccgtgtgttgttcgggtattttttaaaattttaaattgttgtgatttttgaaattaaaaagataattgcgttgagcgtacaactaactggtgcaagttgcaattgggcgtcgcaaatgatgggaataatgaccaataacgcaaaaaacattatgtttcaaaaatctgtgcttttccattgaaattaaactatgcaacaacttcatcaactaaattatgttggaaagaataaatcccatctttatctgaaaatcatattatttgttaaatcaagatatgattttttaactcctacctttttcggaaaaatgccaaaatatggaaacatacacatttacacttggataaaatatttatctgatgagacccaaacataagtgcaaaaaacgcacaattaaaaatcaattttcatcaaattcttatttccctcaaaacattcttctatcattgatttatccgtaattgtcgtgttgaccaataatcgaccattttcctatgaaaagacaattgatagaaaagtttaataacagcaactacggagtgggccatttcgccatcgcctaaggcgcaataacattttttcccattcattcaacaaaaaggacattttgcgattttttaaataattcaaaacgattcatttgggtggcaaaaaaaagttgtgttgttatacggtggcataaaagggagaaaaatagttgttgtttttttgccaaaactttttttttgtaacttaaaagaattttttttttgaaatactattctgcagataaaatggtagagtttatcttgtaattcaaaatatcaattt

SEQ ID NO: 16030 - DNA, 1246 bp, Heterodera glycines
gtggtgaagtgaaccttcttttatttatcatttgatagcacgaaaaaaacgtcgcccgtgacaaatcgcatgaaaatgttggcgaatcaacagcgaatttttatatacccatttaaactcacaattgttgaaacccaatgacgacagtcattgttattgtttccgaaatataaaagcactgtgtaatacgacattttttgctctccctctatcggaactgttggcaaactgcacacaacgtcggccataaaagtcgtcacctggattgtttaaaactagtgagtgaagttaaaaactgcaatcctaggatgtttttaaaaaatatatttatttttatatgttatttatttatttgaaaatttgagagaattagatataggaactttgaaaccaatggggccgggcacgggaatttggaaaatggaccgggacggaagaaacaggacaaaaaagcttttgcagtaatgatactatggcaaaaaattataattttcaaatataagtcaagttagttgtgaaatttacgcccgttcaaaacaaccagggaccgagcttaggtaatttagcgggcctgggtttaccaaaaaaaaaaatacgggaccgggcggcccagtaaaaattcgccggaccctccgggcccacccggtctcaagagataatattttttgtcaaggttttatccgaaaatacgaaaaaaattgtgctgttgtgagttgcgagcacctgaatgtcgccaccctcagccccgcttgaatcgtccgacgaatgatcactcatttttacttccgttgtctgaaaaagatgaaaaattgtagtaataaataatatattttggaccaaaagctcaaaaaatattattttttagttttttcaacccgagaaatgatgtgttttttctgactgtattcagatcagacagtcaaaaattatttgtcaaggatcaaaccaaacggagagatattcctttgctcgaagtatggtttttttgaaaattaacaaaaaattgtttgttgcttttgcgctaagttattgaggattagtttaaaattaatcatttaatggttttttaacggcccagaatcttcaaaataattaaagttaatttattcggttgcttttttagggcttttataatatttcttttttacgtttatatttaaattttacttttattgcagttaatctaagcttttcctttacatgtttactcacttcacagtcgggcggcaagtgaatacaattttca

SEQ ID NO: 16031 - DNA, 3016 bp, Heterodera glycines
aaatcgaatcaattaatatttggcaaatctcttgggcaaacatttttaacagaaactgaagaccagactttacactctttgtccaatgccaacaaatcaagaggctgaattttatgtgcaagcagttaaactttttcgtcaaattgagcgggagcacatggccaatttcaaaatgagcacatatgattatgaacgactaaaacgcagtaatttaagacaatattttaatcatttctttcaatgtattttgggtttacgttcccgataagtataaaatgttaaaatcatatgataattccgagatttttgatggttttgaaatgagaatcaccgtatctcgagcccgtagcgaaacgggatccccgcgcgtgattttgccgggccccaatccgcaattccgcgtattttgaaaatgaaggattttatgggattaatcccgcgactctgaaattttcaagagtcattcattatgcccaatattttatgaaataattattatcagggaacggaattttaggtgctaaaaaacgcgaaataggtacctaaatagttgctaaaaaactgccaaaatagttgctaaaaactgaaaaactccaaaatagttgctaaaaagttgccaaaaattggaaagcatgccaataaatttgtgaattttgcaaaatttctcatctttatcctttttggttgcacaattgtaaatcaacacatttgaaaattttcaagcgtaaaaatttttcgatcgtccgccaaatcatggccagaatttttgctttttgaaaaacagattcttgggggggggtgcattttttgaaaaaattaacgtcgcttcttagaggtgcattttatttattttttattgcatttttcataataattttttttgttgaaaagcagaaatagttgaaaaatagtttttttttaatttcacaagtcaaaatagttgtttaaaaagtttcataagcaaaaatagttgaaaatagttgctaaaaagtcgctctaaatcgaaattgatcgaagaaaatgtgttttttgcgcttatctcaccatatgctatctgcaaaaaaataggtgaaaacctaaaaatccgttccctgattattatgaatttttatgtatgaagttctattagagaatttatggtcatttattcaaaattgctaaaaaaaccggggtaatgttttcaaaaaagttttcccggattgtctgtcccattcctcttcaaaatttaaaaaaaagcgcgacagaaaataaaaggatacaaatattataataacttttttgaattttattgttaaattttagcgggatcccgcaagtttgaaatgagggattgcagaattaatcccggtgttcctatcctgcaaaatttttagttccaatctcatagcgggatccttcaaattgaaatttccgggctctaattatgagcattcgaaaaatatgtacatgcgctaagcagtgatgatttggaaattggaattcaatgacatccctgatgctgagtataggtgttagagcattttataccattcttaatttatagcattgttaacgagaatgtcaacaaatgaatttatgctgcaaaaatttaaaacaagtaattaatacaggggcagggctcggattctttctttctttcaatgggcatcctttattttggttttaatccttttgaaattttgaccgtcctttatttcaaagatgcccttttatatcggcatttttccccattcccagacagctcctatcggcaccgccggacacttccatttgtcaaaaaatttttgaagaactttctcatgaataagtgatcggtcctttgaaaagggaatttggcggatccgagtcccgaagcaaaatttatttgcatttgaaaatatattatgctttacctttacagttgccggagacaatttaagcactactcgtattgaaaaagagcttcataaattgcgcattgggcctgaacaggggtacggacataaattacaaatttaacacttcgattatgccaactgtatagattgtatattatgttgcggtattcattattggatgcagactcgtaaaaaataccataataaaaattcaaatatgggcagaatccatccctgaagcttaaaataaattttttaaaaacaaccctcataatccgcgggggaaatatggttttccataatttaatgccttaataatttttattgcacataattcttgggattcacgaaattggaaaaacaaaataattgaggtcatcataaacattcctttattgtatcaaattttttggtcgaaaattaaggtgttggcttaaaaccgcaattgagggaaatgaatggctccgtgctgaacttttacgttttgccgattttgcacgacaagaccttttgaaaacggtaaaaagaaattcgaacatatgtgacagctctgtaaaaaacagctattctatctaagttttaatgataacacacttaaattcaccttagcgtgttaattatttattgataaatctttagacactcattgccacacaatgtgccaatataaccaacaatggcaacatgacagagatcgaaaaagaaatgaaagcaatcgaaacgctactgggggaaatttctcatcatatggcagattggattgaagaaaagcttgtaagtattgagaaataatgaaatgtgacttctgacctttttggggtcggaattcaatttttggataaccaaaataccaactttgaaaatttttgggtctggatttccaagttccaaaaattttgagcgttggaattctatggtactcatggttatgtttatggacaaatgctaaaccgagacaaattattgtactttttcttggatgaaattaaacgagctaatattttggcgtttatagtagcattttatgagcttcctaatcatatcaatcaatatttgagataaaaatattttcttggccaaaaaatgtgaaaaattcttcctaacgcaattttgatgcttataaaaaatctttcacaaca

SEQ ID NO: 16032 - DNA, 2107 bp, Heterodera glycines
aaattttttcaaaaaaaaaaaaattttttttcttttttttatttcccggttgaaaattttgtggtaaaaaaatgtgggaggaatttttgaacagcaaaatcgggattttaggggaaacaggaacccataccatttttaaggggaaatattaaattttactaagtaattttgataaaatacccttctcatttcccttgtaacggacagtcattttttggtcgccaatgatttcgagtttctcatgacaagcattggcatcgcaataattctggcggaaatttaaaagtgcctaaaaataaaaaaaacatattttaattttcacctttctctgctggttgtgcaatttttcgagaaaaaataaatttttttgggggggggggggagggaggaggattccacacgaaaaaaataaaaaagttttttcagcaatttgttgaaaattaaaaaaaacttattgttagtaaatcttgaaaattggtcgtaattccatcaaatttttcatttgttttgcatttgtaaataaaaaaccagtaataaaagtaagaaaagagttaataaatcaaccataaatttgaaaaatagctaaaaaaattgtaattttttttcgaaatttaaaaaaatttaagttataaaaaattagaatcgagtatgctctacatgataaaattgggtttaaaaatgctttttaaacaatacccacctcatgttggtcccgttggtgatcgaggagcggcggtggaagagcgggcgacggatgtgcgggagggggcggcgattggtggcgccggagagtgccaccacctccatcagcagcaccggcattggtcccagcagctggaaagatattggtccttttcaaatacgcaaaacctcttttcattaattacaaatacataaaagcgaaaaggagaataaataaattcataagcagagattcttaccacaagtcttctcatgatgtttgaaccattgtggcacaattggggccccacaaaatcgacactgaaaaggcatttaaagataaaatatttttttatatataaattaatttattaattagccataacatttatcccaccctgcccattatttcccttgaaatttctaaaatactttagcatttgtacatttgtttaaaaaatattgttgaaaacccataataatcgcattcaaatcatcagcccttgtcattttccatgaaaataaagaatcaccttttccccgtagcgatgaaggctcatgtggcgcttcaagtaggctttttgatgcgttcgatgtggacacaattcacacttaaaaattaattgttatatttgaaaataaacattttttagatacttactttgaattgtttgaagtcagaatgtgtactgtaatggcgttcaagcttccacacttcgtcgaattccatcgggcatttatcacaacggcggggctgaaaaataacggaaattatctcgggccgaaatcttattgcgatttattaatagattttgtccaataaataaccaattttgcaattttttgagcgtatttttttataagaaaaattaggatttttacgcaccgctggggaaatttttttgaaattttaaatgaattttgctaaggggtttgttcaaattttaaaattttttctctttcccgcttcgcttcgacccccccccccccccctcacgacgaacgaatgggaaaaatatattttttgataaattttttggaattttgctggtttctcaccacttttggcactttgcgtcttctcccgtcgggccgtctgttcttcttctcctcctcctcgtcatccacttcgatgtccgcgtgcgatctgagctggcgaaggttaattgcctggccactttcgttggctttttttggggcggcggagacggcgaaattgacggcgaaagacggacctggaaaggggttatatgttgaattagcgaatagttaaattttatgacaattctcagaagaaagaggaacaaagtatttatttccaaatgtttttacgtgaaagtaattagtgaaatgccgaaaaaacattcgaaaaattaaaaaattgatgagcctaataaggtcccttacgcacggaaggggggggggg

SEQ ID NO: 16033 - DNA, 2022 bp, Heterodera glycines
  unsure (1)..(2022): unsure at all n locations
atttatcatttttttcaaaaaacaaatgcttaattttacttctattaatttcgtgcttaattaggagacaatttcttaaaaaagaatcgattaatttattaaccaatcgtccaactaatgcattcaattaattaattactaattacatcattcattattaattattaggtatacacgttgcataaatcaattgctgggcaaatgcggaaatgggtaaaaataatactaattgtttacataatattctcagcttatccatgcgaaaagcagaaaatctttataaatacataaatttacatttgataaatggaaaaagcattttgaatgcttttccatggagaataataaatcaattgcactttctctctcagctgtttatgaagtgagtggaagagaaaaaaaatgctaatccgccgcgtgtgtaaagccatgaaaaagtaattaatttttaatgattgaaatatgtactgaaggggggggggggaattagaaatttttttgaaaataaaaaccaatgagaatcagtaaaaatcagttgttatgtatgacaaattagaaagtgataagagaatgttgatcagtcagtgatcagagattaattgcatgaaacccaaaaaccggaaacaaattactattataattgcatcattatatgttggattagcgaatagttaaattttatgacaattctcagaagaaagaggaacaaagtatttatttccaaatgtttttacgtgaaagtaattagtgaaatgccgaaaaaacattcgaaaaaattaaaaaattgatgagcctaattaaggtccctttacaccaacacgggagggggggggggttgcattagagggaaggagaaaatttccaaaattggtgaaaattcatttttttaaccccgcataaaattttaattccgccctttttcagtttttcaatgtaatcaacncacttccaggcgttgtcgaaagccctgccactgctgctgaaacgacgactccgtttgtcgatttgcgctgcgagcggcgcggccccgtgccgtccaccgtcgcggcggcgattgttgtgccgttgtcgtcctctgcgattgggatagcagcggaaagcgccgttggaagcggcgctgcttcaagcacatatgacggtagtgcagcggaagaaaacagagatggacggcgccatacgggagcggtggttgtggtaacggcactggaggagacggtgcatgacgaaaaactgcccgaagaatgggctgctgatgccaccttaaagcaatttaatttaaataattttttaaatcgaaaaaagtgccttaaaatgtcatttaatgaaaaaaaggaagaaaattcagtcttcaaaatgaaagaacattgtcgcttttcaatgtcaaaaattaatttcagttctgcccttaagctccacgagggacaacaaaataaaacaaaaaaagtggttaaataaatgcggggatatgatcagtggcgggaccaatgcaattagttttttaaaaatttttctcatagaattttcaacgaaaaattttttaaagattttttcttgaaaaatttctaagttttaaaattttaatggcactcgtacaataaaaggtggtgataaataaatgcggggctaaatgccattgaaatcggaaaaccaccaaaagtgccaaaactctgcaaaccaccaaaagtgccgttctctgctgacaacccacttcgttttgctgttgctgctccagcagaggttgttgttgtttgtagagcaacgaagatgatgaagcggaggaagacgaagaatactgttgatgatgtttgaatttaatggtagaagacgctgaaaaaattaaaatataaaaataatttaattgctttttatttaaaatttaaaattacgcgctctgatgacatattgtggcgcgtgagattttggtgaaaattttggccacacattgcgctgcctctgctgcggcggagtgcgaacctataaacatggagttgttgaaaaattgtaaaaaaaacatccccagtc

SEQ ID NO: 16034 - DNA, 1799 bp, Heterodera glycines
  unsure (1)..(1799): unsure at all n locations
tgtttancgggtgaacatgccaaattcaacgcggcctctgtaaagttaaatgtgcagacaggtatcttaatgttcattttcactcaccgataacaattgtctccttcggcccagtcaggggcacaatcagccaaaaacatagcctttgcttcgtcaattggcggaaattcgaagccattcatttttaacagactgtgcgtgtcctccacaattttgaactcgggaattcccttgaaagcggatgtccagcactgaataagctcaagcagcttttctctaatcttctcaggcgggtccgaaataatcatgcttttgaggtcgtccatgacttccttggttgccacttcccgaatgaactaaacccaaaaaataatattattttcccaatgaaaccctacctttttgccgcaattcttaacacaagcttccaaaataagcaaagcatgatgtgaaatgtgcgggttcgaattgcgataacgcttttgaatgtgttttaatgcttctttcacactgaaagaatctttagtaatcgtcataaaggaaattcaaactgacggcacttcgcctccccttatcatatcaacgcattcgagaatgacttcccagtttggctctatcaacgtttgatcagtggccacttctaaaaatgcaattgactgttgcatctttggtcgtgaaataatcacttacctagcgatctttggaatttgtatgacattatttcgtgtcgttttttaagcaatgttatatacctaaatagtaaatgtctgttaattatgatttggttaattagtacaataaaaaaattaaaagcagagaatcgattagaaatttatcagcattaataagcgaacatatgaaaggaaacaaccacagcttactatgtattactttactatacgttttcatttttcttttatctcacaaaggaacataatgatgagtgatgatgacaaatacctattagttttcaataaataaattgttgtgcgcaaccaaaaataaatttcagaaaatattggtttgtttgttcgacaaccaaagcgaaaaagaattagataattaagagatttattcagttaacaatacaagtgctttattcaatcaacgcaaaagaaaaagcagatctgtactgttgcctctcccttgtctctaatttcaattcagccaattcctcacgagtgcaccattgataatccaccacattgtctgaagtcatgtcaaccagtgttatcggattcggcatttttcggtggattagaacaggaaaaaagaagatctaaaaattccattcaaaatccgattctaatattcatttcgactcaagaaccccggacccaatttctaacaaaaagtcgaaacttattttttagtctctctcaattttgatataaatacggtttaaactaatgaaacaagcaaaaagtaatcaaagtctggtacttttctagtttaccgggtatttttaacatacattttcagataaatgtgttttagaaattagtgaaaataagttttaaggggttttcaaggtcgctgatcacgaatccgggctcagatcagcgctaccattcactacatgagctgtacagggacaaagaattgataggtttcctgtaccaataataccccattggcaagatgccaatgaggatatcatccatacaatttcgaatttttatttttgtccgagttcggatcaggggttcaaaattggcaaaaatgggtgctatattcgtgatcagcgacccccaataccccttaatagttattttaattaatttctagaacacatttat

SEQ ID NO: 16035 - DNA, 1139 bp, Heterodera glycines
catcggaccctaaacgctgtttcatccggtgggaatatcgatgcactaaatgcgagaacggtgcattaccaagaatttgaaatccaatggccatttgatcaaaatttggaaacatatgagcaatacatttttctgcagtctgaaaaattagaaacacatataaacaaaggaaaatcggtactaattcggtttgtatccacatttttggtcaatttgatttaaaaagacccacccttcgttaaaaaattgcttgaaatctcaaaatttttttaaagttttggatttcggagggggggggggcgggggctttagctccctcagctcctctggctacgacattgtatctggctattttaagaattgtttagggtcagatctaattttactgtcttggcaaatcttttatggtctggtgaactgaaatagagcaggacaaacttgaaattgtccgtaaaatttatttttcgcagaaacaacacaaacgtttacattgccaattttcattaatacctgtcgcaatgtatcatcgccagttcgtattaactgtggtaaaatccatggcgatacataatcagaattaagagcatcagggaaccgttgcttcacaagcaaagccagctttttttgctgcatccttccaaaagtctttagatttttgtcctcatccgtcgttgtttgtggcgaatccagtttgtactgcttggtaagctgttcacttttctcgaaccaatcatctctaagttgagcagaagagacattaatttcttcgtcaagtgcgctaaggtcccttccttcgttttcaagttgtcgtcgcttctccaatagccttaaagcaaagtatgaaaaaacaaaaacaaaaaagaaataaaacaccgacttttcatctttttccaactgaagttcaaagtcacatttgtaagacgacttctgattggcaaattcagacatcctataaaattgttcttcaacttccgtcattggtggagcaacaactggaggacggtaaatgagcaatgcgacttcaatacgccattttgagggatccaatttggtgtttgttgagtagaaaaagcgagttgaattacgaaccgaacgagaaaaagtcttcacaaacatctatatagaaaataaatatatgc

SEQ ID NO: 16036 - DNA, 2452 bp, Heterodera glycines
  unsure (1)..(2452): unsure at all n locations
tgttggagaacgacgtctctctctcactcgggccgaggggagaagagaactctgtggtgtttggacgctctatctcgggccaagaagagtgcatcttagagggatgagatgagtgtgggggaaatgagacctgcgtagctcagtggttagagcatcccgcgttatgggaggtgtcgtgggttcgagtcccactgtgggttgatcttttacacttccgcaccacagagaaatacaacatggcgaccctggcaggacccacatccggatgactcggtgaaatgtacgagtcgcctctccgttctatgctatataccgggccggtgatagcatgtagagaccggggaccggtcttcataaaggccggggatgttggagaacgacgtctctctctcactcgggccgaggggagaagagaactctgtggtgtttggacgctctatctcgggccgagaagagtgcatcttagagggatgagatgagtgtgggggaaatgagacctgcgtagctcagtggttagagcatcccgcgttatgggaggtgtcgtgggttcgagtcccaccgtgggttgatcttttacacttccgcaccacagagaaatacaacacgccgattaacgccgccattgatggccaacaaaatgccgttctgccgaacgcatttggttgctcatagtgccgacagacaaattttaagcaagcataattaattagtttttttgtttgtctgatcattagtgattattggagacatatattgtttttttatttcatattttaaatataaaataaacaaattttacttgcacaaaaaataattaatactttataacaatggagaaataatttttattaaatgtagagtaaattatagaattccataattgagatttactatttattattttctgaatattaaagttaaaaattgcaaaaattagtaaattttttgcataaaaattagttttcacgcaaatttttccctgcacaattttttgtatttcccgatttatagtttacaaaaattgggttttttgaacttttaattcttataaatcataactttttggtgagatgattaatcgcttagcttcagcttatgaagcttctaaacacgtagagctttcgaatgataccaaatttgaagaaattaactgacgaacaaaaaagttatggccatttccatttgaaattgtacgaaacgccattgtacgaactgccttgacaccgattttaggagcgtattttccaaaatattccatttataataaggtgggtataatttacgagtttttttaaaaataaaaatgccgaaatatgcaaaattggataaatggaaataaaaaggcttccagaagcatcaaaccaagctaaaaatactatttatatttacgntgtcttttcttgaaaaataagtttgcaaaaaaaaaaatggaaatccataaatccggtctctagtaattaataaaatagaaatttttcgtccaaccaaatttttaaaaaattatgttattattcatttattttgttgcggattttcttatgtatttgcctatcttctttctcttttgctgatgaccatgatgggcttggcttgttcataagtaaaattcttcgacaaatcaattaaaaaaagaatattttgttttctttttatattctcacattatttatttaaaaattacttttaattaattaattttaaatgtttatccaagcaataacaaatttttttaaagcttttgttgttttgaaacaaatttctaaaaaatttaggtccattaatgcagagctgaatttcctcgccctgaattttcctgggttttgttcagaaaatccaaaatccaaattaaagacggaattcctgtccccaggtccaggcttttttcaaaaactgagcaatagtagtttgtattaaaaaacttattaaaacaaatccctctattaaataacaaattaattttgaatccttgatagtttctgttggaaatccaattaattaatccaataattaatctataattatgcctttttgaaattaatctcatccttttttcaaatatatatttctctcatttttctttgttgcggattttcatttgtatttgcccatcacccttctcttcttttgctgatgaccatgatgagcttgttcatagttgagttttagttgtgctgctcattcagaatataaaacaaaactaagtatttttttgatattatgtcgatttttaggaattttctttttaattttcatggacagataaattgatgccaatgtttttgttacgatttgatcttaatttttactaattggaaattttttaccgctcaaaatattaaaaaacaacaacatgcgttcatagggtttgatgagttttgcccagaaaatccagaaccagcttaaagatggaatacagatccccaggtccatgcttttttcaaaaaattgagct

SEQ ID NO: 16037 - DNA, 2351 bp, Heterodera glycines
  unsure (1)..(2351): unsure at all n locations
cagcngggtggtcgaatagtagcacgtctctcagctggcgcggtcgttgccgtggttggattgcctgaataagcatccgaaaatatgagaaacgcacgaaaaacaagacccaactaccggaacgttttctggtggatgatacggcaagtttggcggcggatgggcaaattgcggtactgcgtattcccgttgaatttgtcgaacatgaattccctgaagaaacacccagagactgagaaaaagcaaccacaatttgatccaaattgaagtcacatttcgcggtggatggtgaatttgcggcatgtctctcagcggcaacggttgaggcatcggttggacacgaattacctgaaaaaatgcattcgggatcttgaaaaaaagtaacaaaagcgagccaaaattaccggcacatttggtggtgggttgacaaatagcggcacgtctctcagtggtatcggttgttgaactggttggacacgaacggcctgaaaaaagcattcgggaattaaaaaaagcaacaaaaaaacgagccaaaattaccggcacatttggtggaggttgggcgaattgtggcaacgctcttagtggtagtggttgttgcccatcatgaattggtcccacacccatttcctgaaaaacaatgcactcgggattttgaaaaagcaaccgaaaacgagactcaagattaccggcgcatttggcggagggtggaggaattgtggcacggctctcattggtacgggttgctgcattggttgaacacgaattgcctgaaaatgcactcgggaattgagaaaaagcaatcgaaagaaagacccaaaattaccggcacatttggtggagggtggaaaatttgcggcaggtctctcagcggcaatggttgttgtatcggttggacccgaacagcctgaaaaaaagcacgcagaaatttgagaaaacgcagcgaaaatcgacccaaaattaccggcacattttgcggatggtcctcgaattgtggcaagtctctcagcggcagccgctgctgaccaacatgcattggctgaacacgaactgcctgaaaaaagcactcggaaatgtgagaaaaagcaacgaaaagcgagaccgaaattaccggcacatttggcggagggtggccaagttgcggggggatcggcggaggtggcaagagaatttcatcatcttccgattcgtagccatcgtcatttgggaacatctgccgccctaaaatggaaaaaatcagacaagatatttgtggaaaaccaaacaattttcatcctgtggacgatttcctgccaagatagatatttgcaaaatccaaaaaacaaattcaaaattaccaacgatgaccgggattgggaagctgggtgatggggcacgcggggtggaaggaggggttggttgtttggatccgtatcggccgtccagaaactcttttctccattgactacaaagaaaaaatgtaaagataatggaagcaaaataaatgccattacgaaagttctgcaagtgaatttgggtcgtatgctctgtttgggtcaaaatgcccagccgaaaattccccatactcttttgaaagaaacgcgaaagtgccgggggcaataaaaggcatgatgaaagtggatgaaaatggcaactagtgaaaagcaatttgggatgcgtctccgctgctgacaaattgaaaaagtgggcgaaagtggcaaatgatgagaagagaacttgaggatggtgccgctgctgactcctcccactgccatgccgtgctgccgtgccgcggtgacagatccagatgatcgatggaaaaatttgaatatttggggggcaaacgccccgaggggcaagaatggcccccgaccccccgccttaagcgaaatggaattgaaatgaagtcgcttcggccttcccttcatttatatgattgacagttcccgtgtataaaaactgcggtttgtgtgacgcaattatttttgcatctccgcagcgctttaaattttctcgaccgcgaactttgattgacaggtcccgaacataaaaactgcggtaaagtggccgcaattatttttgcatctccgcagcgttttaagttttctcgaccgcgaactttgattgacaggttgtgaacataaaaactattttgaccttgatgcgcggatggcaccatttttggtgcgccgcgcagcaaaatttcgcaacacacaaaaatgcgaataatatttatctgatcaaaatatgtggggagcgaatcgtggtaggggggtccgatgaaagggagggtggggggatttgggaccaaatttgggccggaatttttcaggggggggggggggggttgggnnngggnngggggggggggg

SEQ ID NO: 16038 - DNA, 950 bp, Heterodera glycines
ccggggtgaaggaccaaaggggcccctggtggttgatcaggattggggggcccccagctcccaatggtccctgaaaacaggggccaaaatcgccaaaatggcgatcagcgaggctattggggagcccatgctcctccccgacgggaaccatcacgccgtgaactcacggggcgcctcagctcgtggttggagaaaaaccacgggccaaactggtacgaaatggcaaacattcgccgtaatgcggaggaacacctccgcagagaactacacgaaggtgccatgctttgcgcggcacatcttggcccattcacgaatgtccgtttcgacggatttttccgttatggaccggccaacacgcacatgtccccaggacggactttccgggagcattttcgtagacgcgggttccaagtgaacccgaatttgccatgcctccaagaatatggaggtttcagccacagccaacagggcattcatgtcgattattttccgatcgacatgatcaacattcaaaaaggactcggtgttggtccgagaccgcctccaactgaggccgaaattttacggcctcgccgcatccaagcctatttggcatttgaggaaattcctcatgagcaagaggagctcaacagaagagccctcttcttcgaggtcattggccttcgatcaaacagacccaacgatggcactgcaaaggaggaaggcgctcaacagacgcgccctcaagactttcaacgaaagaaagagttagatgatccacacactgatcgtcaccttgaggaccaaccaagaaagaaaacctccaacggaccaacgcgccattgaaagaaggatgaccgatttcttcattgcgcgtgccaaagaacttcgcgggggtagttctgtcgcagaagcgacagatcttatcgattattttttcccttcccgcatatttttgttccctccccctt

SEQ ID NO: 16039 - DNA, 1141 bp, Heterodera glycines
gtcaatagtaaaaataattcaaaaatgtttaaaaggcccagaataatagtaggggtgttccaggtggcataaaacattaattgattcattttatcggcaggattttattagagaatcatgcagaaaatattaattatttttaaaactcaaaaaataaaatagtccaattgctcctcagatatatgatgttgtctaggatttccacatgagggggtacggcttaagagaaatagcaatcgttaccggatatttatataaagagtcaatagtaaaaataattcaaaaatgcttaaaagacccagaataataggatgctgtttcagcaggcataaaacattaattcattcatttaatcgacaggattttattagagaatcacgcagaaaatatttaattatttttaaaactcaaaaaataaaatagtccaattgctcctcagatatatgatgttgtctaggatttccacatgagggggtacggcttaagagaaatagcaatcgttaccggacatttatataaagagtcaatagtaaaaataattcaaaaatgcttaaaagacccagaataataggatgctgtttcagcaggcataaaacattaattcattcattttaatcgacaggattttattagagaatcacgcagaaaatatttaattatttttaaaactcaaaaaataaaatagtccaattgctcctcagatatatgatgttgtctaggatttccacatgagggggtacggcttaagagaaatagcaatcgttaccggacatttatataaagagtcaatagtaaaaataattcaaaaatgcttaaaagacccagaataataggatgctgtttcagcaggcataaaacattaattcattcattttaatcgacaggattttattagagaatcacgcagaaaatatttaattatttttaaaactcaaaaaataaaatagtccaattgctcctcagatatatgatgttgtctaggatttccacatgagggggtacggcttaaaagaaatagcaatcgttaccggacatttatataaagagtcaatagtaaaaataattcaaaaatgcttaaaagaccctagaataataggatgctgtttcagctggcataaaacattaattgattcattttaat

SEQ ID NO: 16040 - DNA, 3181 bp, Heterodera glycines
tgtcactaagtatgtgattatcggatattaacattttgtagtcaaagagaaacagcagccttagttcaaactcataaaaactcctatttaattctttcggtggccaatattgaccgaccacatacccggaaagtctgaatgagtctgcgctcggtgctgacattttcgctgcatatgagaataatttatatacaggcagtggccagccgtgacaatatgaaatggcgaaacaataaatccggtgcatcgtgctgaaagttgttgctcattggcacatgttgaacgggcgaccagtaatacagtccatggagacgagtgttctggtgcgattcgcctgccaacagactacataataaggttttaaattttggggcgtaaaaaaagttttaaattggtattcttctaaatggcttatcaacagaaaatcaaaaatcttcttaacagttcttaggtaaaaatgcgtgatcacgactattagctttgattttgcaaaatattggttttgtctatgattttcatcaagcagttgatttaaaaaaattttaattttatgtagaactctgtttcctgtaacccatattcaaaaaagtataaactcataaacaactagaatgtgctaactgttggagaaatgtattttttgttttcttatcttttgaatttaataatttagtttgacttctccatatattaatggcttattcaaaaactatttatgagttctatattttagaatatggagttaccggcaacaacgttctatcaaaatttttgaaaaatcatattcttgataaaaaaaaaacatagacaatatcttgattttcaacataagagctcgtagtcgtgatcaacgccctttttacctaaaaagcagaaaaatttttttttctgcggtaaaccaattccgaagaattaccattaaattcaattaactcacacgaaaagtgcccacttctggcattgggtcaaacgttagcccacattgccctagacagtttttcagttgttttttcgtatacgccgagtcaccaatataaaaaattaatcctatataataaagttgagtgtccgtatgtatgtgtccgtgtttgaatttgtgtggcgatttgttttgtttttgcgttaaaaatgaatttgaaaaaagtagagcgagggaaaggtgggaaaatagtgcactgtctgattgtctgtctacgcgggcagcggcgggtgagaggggcatacagtgaacagacgcgtgctgctgtgcagcagcagtctgttggacgcgtgcgtgtgtgtgggagaaggagggagtgggaaaaaaagagagtaaattgcaatggaaaagaaaagagagtaaaagaaaggaaagggagagataatgggaaatttgtctcgcatcccttccttatttataacccatcttttattatataaaataattaataaaataatgagcacatttttgtgtttgtttgagtggaaaatccggtatatgaaggttctgtttttgtgtgtaagaaaaaatttgtgtttatcattgtttttttgtctaaattttttttttgttaattgatgtgattttgatattaaagcttttgttttgcttatgtaaacgataatggagaattgtttgattaaaaaaaatgcattataattcgcttgaatgaaaaaggtttgttacttaaaaacgttttttgtacttttccttgcttataatatgaaaagaatctgatttggtttttgatatttgttttgaataaaaagcatgttatgatagtaataaaaaatgaaagaaaaatcctttgatggatagaaaaagcaatataaatgctacatctcatgttttgcctgtgttcgagtggaatatttatatgcaattgggatattgacgtgccacttgcgggatcaaatttaggtggaaagttttaaaaggtcagttttaatttgaatttatggggtgggggcaataattatacaccatagtgttttgatttattatgggttatatttcaatttctggattccttttaaatagttctgtattccgttgctgaggttgagttccggtgattgaaatgtcggagaactgagtcccggtaattgtgttgctgaaggattgatgagattgagtccagtgatttgaattcgggagaattgagtcccagtgattgaaatgctggagggttgagtcccgttgattggaatgttggtggattgagtcccagtgattgaaatgctggagggttgagtcccgttgattgaaatgttggtggattgagtcccagtgattgaaattctggtggattgagtcccgttgattggaatgctggtggggtgagtacagtggatcaaatgcaaaaaattggaccccggggaatgaaaggctgggggttgagtccccgggatgaaatcccgagatttgatcccagggattgtaatggagggaatttggtccccgggttggaaggggggaagggatattcgggattctttggggcggagggcccaaaaaaaaaaaaaatttttccccggggcttctttgttttttccccctttattaaaaaaaaaaggggcccccccccccccccaaaaaaaaaaggggggttttttttttttttttttttaaggggggggggggtttgtttcccccgttttttttttttgggcggggaagaagaaaaaccccccacccccccccaaaaaaaaaaaaaaaaaagggggaacccttttttttggggggggttttttttttttttttcaaaaaaaaaatccccccccaaaaaaaaaaaaaaaaacccccccccccccccccccccgccccccaaaaaaaaaacacccacccccccccctttttcttttttttttttttttttttttttttttgggagaaaaaaaaaaaaaaaaaaaaaaaaaaaaaaaaaaaaaaatggggggggggggggggggggggggggaaaaaaaaaaaaaaaaaaaccccccccccccccccccccccgggggggggggggggggggggtttttttttttttttataaaaaataaaaaaaaaaacacacccctctccctccccccccgcgggaaaaaaaaaaaaaaaaaaaaaaaggggggggggggggggggggggggggggggggggcccccccccccccccccccccccgcgcgggggggggggggggggtttttttttttttttt

SEQ ID NO: 16041 - DNA, 3521 bp, Heterodera glycines
  unsure (1)..(3521): unsure at all n locations
tgtaagttcagtctgtctgtcccagctgatcagcagttaagagggcacacacacattcttagattttgacagtggaaaggtcagctgatcaaatggtcgatgcattcgatcaaatactaattgtgttcttagttcaattgattttaattggcccattctcctcatttccgattaattgcggtacgaaatcaaatttagttttggccaaatatttcccaaaatgtagtgataaggcgctctgattctcacagtactttacgttccgaccaatttgtaccattctcaggtcaatgcatcaattatcttatggtttgataaatctgaatatatctcaacaagttggggaagctattgaaggaaaaaaaactatgggtcgggccggctttgaacctgagtctctggctttccggaccagtgttctaccagctgaactgccgaccatgccttttgcagctcccaaccccgcccatttgctcgatcatataggatcaattgccgcctcaattgagccattaatcttcctctccgggaaggcttcttcctctctgtctcaaatcttatgcatagatattgatctttgatcagtgcttgcccagtacaatccctgtcatgaatcatgatcaattctttaaaacctgattaatgccaaattcagcccacagattccggtcctgatcatattcagtgccctgatcaatcgatgcccgatcaaattccggtcttgaccaacagttagttgcagagtcgtacaccctcccccgctctctgtcacttttcccattcgatcactcagcctttcctcccatttctcgcttcttacgcccatccacccatgcaacgattcccacgtcagtggcaccccgtctgccgttgttaaactgcaaggccccctccccggtggcgcccgttacgctccaaaaagcatttgccgctgccgccccgtcgacgccgccgcccgccgtcatcatcgtcgcagctggcgacagcgcggcgacggtcaccggcgccgcttccgctatctttccggcgcatctcttcccgcgccgcttccgctcgctcgcccgcccgtccgctaaacgaagcatgcgaagcaataggcgagagcgccatcaccatccatcctcctcccatcgtcgtcgtcatcgccgtggtcgtcgtcgtcatgtcgacacaaagatccatcctactcatcagtgtcgttcaattaaatccctgcgatttccctccctcgcccccctctcgggcttaattatcatcccccatgataatgtgattgtgataactgctgataatgatgctaatgctaatgatgatgatgcgattgtctgtcctcctctcctaccggtccatttcgcctcaattgacgtgctgacgaccttcaaccgctgctgttgctgctgctggcgaaggactctccgccgccactcgagacgcccccctcccgccactcccgggccgattgtgtcgggaataattaaatggaattgaattgaataatttgtttaaattgaattgtcgtcgttttgtttaattgtttttgtaattgcttccttcttgcttcgtgctgctgatttatccttcttttgctcctctcttttcaatttcttatcatcattttcgttcgtttcattttctttctttgtctcgctttttgctgctaatttcctttctcccctttacaaatgctttccctctttccctgtctctttttttcttcctttctctctctctctctcttctctctccctctctctcttcctttcctttctcactatctctttctttctctctctcttttacttcctcttctctttctctctttctctccatttcatcctgtttcttctcttttagattaactcatccaaaaaagcttcttcatcttgcgctgccgcttcttcttcctcctcctccacttctgtctctctgcttttcctcgtctcttcttcgtcacgtgctttttggtctttgatcgttgatgtttgatttccttcgtccggtccaagatcacagtctgcgtatcatgatcccggaacttccgcagcaacagcagcagcagcaccagaagtttcatcacaatcagccaaatcggcgcgcccatcgtacgaacagtggccattgggtacaaaaagcgaaattaattaatttaaattataaaaaaaaataaatttaaaaatttaaaaaaattgaactacctaaactaaagttaaattaaaactaaattaatttaaaatttaaggatttaaaattataaatataattataatgaaattaattaattaaattatataaataatttatattaaattaactcaatttaatttaatttaaaaaataatgaatttaaaaattttttctattaatttctttattatatgttaaatccacctcacattgcctgctgatttatttatgattgttcagagttcgtgccgcgaatcggaggatgaaattgccgccatgtcgccgtccgtccgtcgcaattacaaagcgtacacagtgatgcaaaagtccggcttccagcacactgagtaattttttatagcaaaaaaaaaaaggaaaagtcggcgggaatttcgttcggaaaggcaaattcgccgacaaaagtcacgggtaatttgaatctgtaatggtccaattaatatgctcaaaaaaatctctcttgatggattatgggagaattattgagatagttcaattaatggcaattagggaagttaattaacttccctaaatattcacatgcatattttttcatttgattattaaggataaaacggacgaaaaccatttttttgaaagtatttttccatatgcatattttgcatattatgcatatttcgcgatttttgtgaatattttggcattttttcaaaaatcctctattcaaacggcctcctctattaaagcagccctttaacctctaaagatcgaaaaatttcaaaaaaaaaaaagttaattttttagttttttctctaaaattttttaaaaaattgtaatcttctaacaaatggaaatttatgctaaaattttttagctctacccttaatttcactttatttgcatattttgaacgctgataattgcaatgtttataaaaaaggtaattccgatcactccttcctcccttatcagcagaagtgatcattgtcanttgggatcatcaattaaagggggcgattgcgatcagctgttcctatattttattatatttggtagcatttttgtctagacgaagtgaaaaatatatcactggcaaaaaaaaaaaagattttgtgctgaaaaataaggacattaggtcgaacctaaaaatagcttattgttagctaccaatgatagtaaatttttaaatttaaaatttttaattttataaatttaacataattatagagaattctttgagatatctaaggatttttccaagtgtagtgtggcttaattgaacttttaaacattttcatgcatttaacatcattaaatttttgtgtaacataaaatatgacacatttcattcattcata

SEQ ID NO: 16042 - DNA, 863 bp, Heterodera glycines
atacggtacgtgttttagcgagcaaataacaaattttaatttcgattaaattactcaattaattggaaagggtccgccgcccaacctcaatttgtgttaaatgtcgaacaattagcatcccattttaataggtctaccgtagtttataaaattacacctacacaataagaaatatggtaaaatgttaggcctcggtgggtggaaggaaatcaacgccactcgtccactcgcagctttaccattgacaaatgagctaccaaggcacatccgccctttcttaattagacgggtctaattatccccctaattgcccagcaatcttcgtattatggttatggtcattaaagaataaccctgttcagttacattgatcgctcagtgctcaattttttgcgcggcattaaacatgcgtttgaatcgcacactcattttgtggtgcgcactccaattgagcagcagaagagttgggatgtaatcataaaaaaaatttggccactaatgtaagcgtaatttaaaaaaaaacttaaaagcaattaaatgtaaaattttatgaaattttttttgataaaaaatataaaaaaattaccacgaaaaattaattggtatgaagaatttttctgataattttccaattccaattcgtttaaagatgcatttttagacttcaaaggtcctaggaagtgtatttgttcagtaatttctgaatattttgaataccgcgggctttattaggcacaaaaaagacacaaaaagttcatgttaattaaaaccctaattatataaaataaatttcaaattgtttattagagccaaattcagacgttggaccggtaaattggacaccaagcggaaaactggacacc

SEQ ID NO: 16043 - DNA, 2703 bp, Heterodera glycines
agtaatttctgaatattttgaataccgcgggctttattagaaacaaaaaagacacaaaaaagttcatgttaattaaaaccctaattatgtaaaataaatttcaaattgtttattagagccaaattcaggctaaaagatttgtttttggacgcaaaaatgttgtcttcaatctcataaaaatgctttttacaggccaatgtctgattgtgacttcattacttcttgtaattcccgggatttgagtgtttgacatttgaggacccgacattttgggaaacattggcattaaaatgctttaaagaaaattttaaattaatatgaattttccctcccccgtcctatcgtatgccggatctcaaaaataccgtaactttagaaatattttcattgcatagaccaaatccatttgtccattgggaaaaccttttaattctaatagtgatgaaaaattatttttaatgtatttctaaatctatcataaataagtcgggaaatgtcagtttgtcccaaaaaaaattgtgtcctcaaatgtcaaatacttcaatttcaaatcctcaaactccgtactacgtttggaatgatttccccgtctctctgttagattgtgctgattgtgagcttcgcataatttcgtgcgctcatcagctaatgccttatgctgttgttgatgatgcctttcatcgaacaaatgtggcactgttcaattggcttcatttgccgcgcgcggacggccgccccaaatatttccactggtgctccgagttggatgccaacgaaagcatcaagcaactgaaggaggtggaggggagggcactcaccgaaacggggcattaaagacaaacagaaaatgaataaagaaaaaatgttgaagccaaaattcactgaaaaattcaatttttaggccactaatcgcatttttgccgctatttaggcccctaaattggatttttcacccctaaaaatcaccgcctactatattaatcaatgaaatcattcagaaattcatcaatgacacatcgcctgttaattattttgtcaatgcgccaaagaaaaattatcgctcagaggatgaaagccttaacagccgctatgattacggccaaagtttcgtcattgtgaatgagaagacgcaagaattgctgaaacttttggcacggggctggtgttggacattaattcggaatcaaattagttgggactggcagaatgccaaaaaaagatcatatgccggccggtctgaattcataattgcactgaggcatgacaagcatgttgatctcgaatgaatcaatgataataagtgagcaatgttggcttaaacattttgttcaccgcggctcaatttgaattgaattttgtatcttcgttcgaatcaattttttgaaaaaaaatttctaggaaacaaatgtaaaacttttaattagtttttggaacacttcaaagtccaatctttggtggtcccatcagcttccacgtaagagtccatgctcagagaatgtccgccctttgtgatagaaaattcgcggacatcttcggcaacaacaccatgtaggaactttgcgatgtaacggggaggtgcgtcatcacagaaacggaaaaaaccctaaaaaagcaaaaagaaagtaaaaatgcttaaaggaaaatgagaaagcgaaagtttagtcgcaaaaaaattgtcaaaattttgagtttttcaagcggtggacgatgaaatacaacaaaagtgtaggcaagggcagccccataaaatcgaaaatgaaagaaatatttgaaagcatgtcctcaaaatttgttactctaaaaagtgtgaataaaagcgcggtaaggactaaatgaagatagagttagccccccccccccgccgccaaaattagtggtctgactgccaacgctcatgaacacagcataattaatgaatgcttaccaacagaaatctttcgaaatcccctgcggggatttcggccccttcctccggaggatgcatggtgaaagttttgacaacgtcgcctccttcgtcattgtaaatccacttgtaaatggtctctaagccaaaaattccatcgacagggcgcaaggtcggagccacaagccagtcgggaacggtgtcgaaatacgggcccaggtcgtagatgccggtgttttcggcgttacgacgctcatcagcgacagaagcgttacgacggtcagcggcagaagcattacaaacagaagtgattgcgccaatttgcgaattgaaaagagaccacaaagatttgaaggcattcttcgactcatcagtcggtcgagagaaaatggccagttcaatacgcttgcgggacaattgcttctttcgttcggtgaaaaacgcggcgacaaaaccatcgaaaaaactgaaaaaaaaatttataggctgtttaaaatttttcacatttttaagttgagggtgacgaatggatttggaaatagtggcagggtacgtattttcaggttataaaaaaggaggcagcgccatgaaaagagccccgttcagccttaatttggaagggcggcgggaagtgcggatgggtaatagtgccgatggtaccccacacccccactttaaaaaaatttttttttagtttttttctcgaaatagtcattttaggggttttcaggatggaagaaaccgattccaatatccattccgaccttaaatgtaatgaaactacctcaaagccaccaatg

SEQ ID NO: 16044 - DNA, 2129 bp, Heterodera glycines
aacaatttacaacgaagggctgggaaaatggtagggtcataaataccacccagggtgtttgggagtcgctccaccctgattcgctgggcaaaggtttgaacaccgacaatgttgaccacacgcagctgatggatttccagcgtgatgctctgtgtgtgttggatgcgccgaaaaacgcgtgccgccattttatttgcactgtttgggtgggacactccggtgaggaccacacgcgccgattggaagaccagcgcagccacagttttgcccgctgttgtacggatgcgcatgatgatagcgtggaagcgcctggggttgtattcggtgtttacgccacgttgcgcaattgccaaaaattgctctcgagttaatggttgaacatttattttaaaaacaacagtacaattggaaattgaatacatctacaaaacaatggacaaaatttcaagagggaaaaaagttttgtgatctccgcctccaaattcaacgacacacggcaaattagggtggcgcaagcggatgccgtgttttatgtagtagtgcatccggacctttaatttgcgtggtaacaaaaaaaataataataaaaaaccgtaatgccgaggtagcctcggtaagctggggcggagtgagtgtccaggatggacaggtcattacaacgcactggaaaattgcgcgcggacgggcgcaggtgggcagtgcgcagttggacggagcgcaaatgctccacaatgtcccggcgtttctctaggcttttgaaaagcacaagcagctcatgggcactgcatttgaaccgcttgcagaggtagtccacgagcggaacagggcgacggcgttcggcgcaaccacactttttcggagtgcctaatttaaaatttaaatgccaaatgaaaacaaaagcaacttgttgctggcgcctcctcaccaattggagcgagcggctcgcgcttcatctcctcgtcaatcaggctgatccaactgggaaatttctgttgcaataggcatattggcacaagacataaatgtagagcaggcacaaaatagaggaaataccaaagattaaaaaattcttgtttatgccccactctgctttggctggccatacctcgccagagagtggagatagaccctttgttgatacatttggaaatgtcgagcccgcctagcgcattcgaataacacaaaatttgtttgcatttgccaccaaacaatccgcttatgacgcgccgaatgaaaattcacaaaaatttggcaccggaaaaactgcattttttcatgggccagcataataaagtaaacccaaaatgtaaggaaatttaaattggtcatgagagatgtttagttttttatttgtccccatcctttttatgggaaaaaacttttcgagaaaagctgaaaaattttccacttgcatcagaagcagactcaaattcttcaacacacaatataaaaatattacgcaagaacttattttacatcctttttagaaatgatacataaatttttattgtatatagttgcacacaagctttttttcgctgccaatttatggcagttgccaatcaaaagggcgatagttaagcattgagatataaataattcgtctagagataattatctcaccattttgtcgggagagctgaatagatttctgtagcaataggcatattggctcaaggcatcaatgtagagcaggcgcataaatagaggaaatatcgggagattaaaacattcttgtttagcttccactatactttggctgtccatacctcgccagagagtggagatcgtacctgtgtggatacatctggcaatctcgagcacgcatagctcatttgaattacgcacaagttgtttgtatttgacgccaaccgattcgcgtaggacgcgccgcatgagagttcacattactttgactccggaaaatcttcattttttcgtgggccgatcatagttaagtaaacgcgaaaatgtaaggggacttaaataggtcatgagagtatgtttagtgtgtcatttgtcccatcctttttgtgggaagattcatggggagaaaaactcattcgtgaatcacttgcccgtcctgaggccgcgaagcggccggatccctcccacaaaattaaagacgg

SEQ ID NO: 16045 - DNA, 2553 bp, Heterodera glycines
tcttgctatcgaattagcccatatgagtggcctcggattaatccatgccatggctcgatcgagacggggacgcaacaaaatcttgccgccgaaatctagccgcaaaaaatccatagccagctcggcagcttatacataggcttaggttaggtctaagcattaggcatgcttgggcctaggcttaggttttatttttttcaatttttactgtacaaattggcattgactcagtcaaaaagcgactaggaaacgaacaaatggatttttagctgaatgcttattttaaatttcaggcagcgagattttggggtgcgaacatcgagacaataattgacactcgagagtcgcgtccgagacaaagacctcccaaaagtgtcgagaatcttaggcatgaatcattgcttaaaatcccgagatttgagaccaaaaatgtgctaaaaatttgttttatcttaattgttaacatctgatatgctataacatatctgccccactttaggcaatgtgccagcaacaacagcaaactacaatttaccgtacacacacagtttagcggccagcggcagaggcaccagcagcagcccatacgcagtggcacaacagcgccagtacggcggcggtgcatacggtagtaccaccagcagcggtggtgctgggacggcagactacggtggtagcagcggaagccactttggcggtggctacggtaattacggacagcagcaacagcggtacggtagtgacggcatgttgcggcaacatcaaagcaatgacgggccgcagcaaattgatgaacaggtgctaatggacatggtggacaacggcaatagatggtggacaagtctcagaaaccaggatcaattgttgtccatgaagttgaacctttccttggagttgttgcacaatgagtccgtcgtgtagtttctgtttctgacatccataatcgtccttttttgtttcaatttgtcgaaagtatagcttggaatttgaaaaactcaaaatcaggtccaggattcgggaattaaccggacaggcttttaggattaaaaatctctttttcttgactcccgatccggaccaatttttcaaaagtgccaggtcggggaattaaaaaaatcctaacaagatccggtcctgttgtaaaaattgactcggatcagggaattcaaaaaatcctgacaaatccggtcctgttcttccgggcttgaatcgagaggcattacaaaagtcgagattgagtccgtgccgtataatgcagcaaaagataaatttcagataggtcatctcctttcgaaggtgtcaatttctgacattttgtttttagaattctccagccatttccgttaaaattggttcagtgcttttcgtccctaatcccggccaaacttattttgaaattttaggtgattttttagactttgatcttttttgactgccgcaggttaaaaaaaaagcccccatacattgtttggattaccccagtgctctccacgaaatgatagaaatgggtttaaagtgaatttgaacacttaaacagccccaggggcgtcgcagccgttttttaattatgctttacccctctattagcatcaatggcaccacccgcacggcgatgatgccatcaacaacaaccacattgacccgcattacaacaaaaatcggattggcattctgttcccgacgcccgcttcctctctggccgcaactgaacatgaacccgcctcctattgggcggattctgctgctgtcgcagttggtgatcgtctgctgctggttgtgctgctactgcttgcgcttgttgtcttggcgcaacaacgggccactgccgcacttttttgatctttgccgccatttatgttttgataattaattaaggagctcaaacgttgacaattttttgggttttggagacatcacgcaattttttttaaaaagtgcgcatacaaacaaaaaatcatttttgggccatggctggaccctgtcagggtttttccggactcgtgatcctggtacattttgaaagtttgacccggatgtggaatccataaaaaacagctaatcctgtgaaatccggtccgggccatctgggaaatccctgctgatggattaactagattttttgacttcataaaaatttttttgatagattaagaattcgaaattttaacccaattttgaggaatttttgcccagcatttttttaaccatatttcaatgtttttccatatttcgtccatgttttgtttttttttctttaattaaagttgatacccacagtaattttttaaattttgtatttttcgttatttggggaaaacccaatgattcgggtcaaaattttaggtttgcccctaaatcggtgtcccatcggctgacaatgagcctaatttagagacgcaaaacaattagagcccttaataactccccaaagcacattgttccggtgccttttgcatggattctcctgttaaaccattttttgatacgcaacttaaacaacaatatattaatgaatgaataaattctgagagcgcatgctttatgctttttatt

SEQ ID NO: 16046 - DNA, 1633 bp, Heterodera glycines
tattttcctttttgcttcaacatttcttaaattgcttcaaattttgaatcatttctcttttttgttgatcaattggtccttctctcgcattttgatcacttttgataatatttttgattggaatattcgctcatttgatcaattgattcgattacatttattctttattttctttttccaattagtctcaattttgacactgtttttctcttgaatgaacattaatatttaagttcatttgaaaaataaattcgtaatatctttttttttatttttttgtaacagcggagtgtcacgttaagccatcgcctgactttcacgttactaccatttttttttaatttgatcccaaattgcaaaaattgataatgtcttccttctataactctcccccgattttttcaggttattggcctgagtcaactttccattaaaaacataaaaaataaatttaattcttacaatcttcttcaaattgaacggcaaataaatttttaaaaacaaaatcaaagaaaataaaattacaaaaaaataataattctaatgaaactaaaatagctgaaaatttattgtcgcacctatttgggattgaaattttgccataaattttatctatattattccattaatatacaaaataatttttgaatgtaaaaaattacaaataaacttttgtaatttatctaattgaaattagaaaatactttttgctcatttgccttaacattattgttgcaacacgaactctttgcacgcagaattgaacaggtttctgcattgaaagcatttaaaatcattgacatcttttctgacagaagtgttcaaagtctttataatgttttattataaataaaacaaaaaatgaataaaagacagacaaaatttgatgaaatttttaattttttcgaaaaattaaatcatttgacccaaaataaataataaacttattaacacagtaaaaccaatccaattttcgatttaaattatgccaaaaatattatctaaaaactaaataaataaataattttttaatatatcaaaattttcaaataaacatttgaactttttctaatttcgattaaaaatgctttggcttacggagccgaacaaaaaaaaatggttttccttgaaaaatttttcgcgcagcgctcagctgacggaataaggggaacatgaaaagcgcaaatcaaaatgggttcggcagggcaacaatgaatgtatttgtagaggattttgcaaatcgtgactcgttggaatctatactactaattcgatgctgtaaattagtgagtccccattttaaactttactttttattgacacgaaaacttgcgaaaaaataaaatagaaaatggcagaaagataaccttgaaaattaaagataataaataataatgtttatgaaattgtttgcctggccggtaggggtcagttgcgtttgagcaaagcataaaccaccataacatttttctttgttagccagatttcatatatccggcatcattcccaatctctacatggaatgaatactccgaggatataatgctaagtgagcgaacatataacaatatggaagcctgaacatgaaccatattgcaataaaaaattgcatacggaaaactatatatttttt

SEQ ID NO: 16047 - DNA, 1183 bp, Heterodera glycines
  unsure (1)..(1183): unsure at all n locations
tacaaacaaaaaaagttatggtggtctaaacttagttcagacgcaactggcccgtttcgtgcctggctgaccagctcacccaaacaatgaaaatgccgcaatgaaatttttttggatttcatttctgaatttttcatgcaattagcctttagattttctcacaaaaaataatttcgtttaaggaaatgtttgcgcagaaagaataaatgaattttttaattataaatatatttaaaaagcaatcaactacaaaaaagaaaaacttttttcgtgtaacctgtttttcggctaaaaattatcatttatattttcgttttatgtgggttttcaatttttattcatttcacaatactcaaaaaaattattattcttaaatcaacgtattactaataaattggcatcgctaaaatcaatgtttgtgagatttccataagattttttttaatttttcatacgtcattaatataaattcatggattacgcaaatatttacaatgtttaagcacttatttaataatattattgttcatttttataaaaatataaaaataattctaaaattaattcaattctttcagtgaaaatgtcaatgcactattttattgccatttttgcatgcatttctcaaatttttggcactgcaaaaggaatgaactcagaaatgggatttcagcctcattttcaacaaaacccatcatcatttttacggaaattaggtaataatgccttatctgagcttttaaagtaattatttttcagaattggctaatggggtcaaaatgttgataccaattgaaaatgttatagcttttttgaaacagttttcccaacttaattcattgctcaattccgatgattttcgcatagtttgtttgttttttaacattttaaataattaaaaatattttagcaatgcgttgatattcaaattttacaaataaataaagaaatcaatgagataatagagacaaatcagctgaagattggacgagatttatgcagaattctttacaatttgttaatgagttgtaaggaaattggatatgaattggatggaaattctcgcttaaatgccccttctgccgtaagttaaacgcaaaaaatgaaatttaaaatttaatttattaattttgtgtgtaagcttgaacacaanaatggaagcacattatgctttatcggaatg

SEQ ID NO: 16048 - DNA, 1323 bp, Heterodera glycines
  unsure (1)..(1323): unsure at all n locations
gataatcataatatgattactancaatgacatcgaaattatttatccaatccaaaaatcancatgtaaaaagccatttgcaatctaattaattgctaattattttttattaaaaagaacaattgtgggattaagccaacaaaatttgtgcaattttgttgcgaaaaaaattatgatggacaatccaagtgaagaaggacagatgaaatggattttgctgatatggagatgaatgattgattagaaggggaaatggaatcaattaatttgagaaatattttttattttgaattctttccaagaaatatttgagtattatgaaaattctctttccaaacaaaattagctagaatggtttgtcaatttaatgaaatggaatttttttaatttgatagataaatgtcgaaattttgtcaattatcggatttgacgtatcccgaaaaactttaaatttgattgttgtgcacattttaggaaaaggttcaaattgccaaaaccgtaatatttaaccaatattaacgaaattaaaagagtttgagacgaaataattttttcccttaaatacattcaaaaaacacaaatgaaagtatcctggaccatttataattaatctctctttaaattgaatatttgagaaacgaatcactgtaaagttgccatgtcttccatctgttgccccaggcactccaatccgtctccatcttagttgagaattttttttaaatcaaagcctctagcaatcgaaaacatactggaatttctggcaaaattcgaccaaataaatgaaattgaaagtgatgaacatcaaaaccaacaaaaattgaacaagataaccaaaatgagattcgctagttgatcaaattggtgaaaatgaaaaacttaatttccgggtggctcataacaaatttttattttttaaaatatttattccgttttacaaattacaataatttaaggctttaacaataatcactaatttataaaaatgattagattaccaatagataaaaaatatagaatataataaaggccatgaagttgtttcagtctccaataaaccttcaaaaaaaatcatcgatcttcttttctcttataagcatgacattatgcctttggaaagccaaactttgcgagtgttttgatcatacgcaaagcttaatggccgatcactgctactgctattgtactgattgcgcagctcgtcaataccgtacaacaattttggcaagaaaaatgtgtccacattggccacattcacacaacaagggaaacaaaatccacagttctaattgtgacatgggtgaggaccgcaggcagcaagctg

SEQ ID NO: 16049 - DNA, 1782 bp, Heterodera glycines
aaatcgacccggctgggcgcgaccagtcaggtgttataaaaacgaactaagtactgatttttcacctgttccgggccagtggttcgcagtgaaaccaaaagtgcgaaaaagccttcctccaacgaacaagcaaaatttggcgatgcaaaaatttgttgcgacaaaaagttggcgcggcggtggtcttcctcagtgggaataaacgcacgaatggtgcgacttggccctccgaaactgtacagggtgcctgcctctctcgctgccaaagccttaaaaatcacacaataaaaatcaaaaacaattaaatttgatagaaaattcagattttgatttgggcttactttgtatttccattgttttctctttttccgtttcgaaaaaagtaataaaccaaaacattcgagctcatcaaaacccttcgatagaaaaactcgggaacaaaatggagcaattcgttgttcagttcagggggaagtttggtgttaattttgatgaatttcattagtagggaacaaaaaagtgttaataatgggacaattccgacaaaaagtcgaaaaaagggaccaattgggtttctgaaaataaatttatttcaaaaaaggaactcccacgactttaaattgattgtttaattaacgcagacaatttaaacatacaaggttttcctgaagcggaagaatgatggtgaatggaaaggccattaaaatgaagaacaaatgagaataaaaagctggaagattgggaaaagtcttcattttacaaataatgaggattgagtttttcaatcaaagattatattgaatctaatgcgatttttagggcttagacatgactggtgccggcgaacaagctcgggctaaaatgcagggcttagaaattccgggctgaggagaaaatataattttagcaaatttattttaatggtcccagtgaaacaccacacatagaggagtaaaattgtttcgatttcttgaaaaaagcgatctatgcataaaatgtgaattttttgaaaaatgattgttcgaatcagggttcggggttcaaattgggcaaaacggatgccacaattggttttcccaacaaatttttgaaatctggacgcagatatcagacaagtatcggcaaaaataatcattttttagtatataccattgaatatacattgttgattcatacataaatatttgaccgaagcaacaagcgtaaatattggcttaagaaacaacaaaaagaattaagaaacaatttttatttgttaaaaacattcatttgttaatggggtctttttgttgtccaccttaaatgacggactctgctctttttgggttatgagaatgcatgaatgagtaagcaaaggcagaggtcactaaccccctggtttatattctcatcatttgcattaagtcattcattcattcagtagcagcagacagagaaaaaagatgaaagaactatgcagagaaaaaaaaacaaagaaaaacagacatagaatttattgattattttctgaccatgactcgttgtactaggccgattcgcactgcctcgattggaattgtccatctgttacctatataagtatatgaactgtcagacgtgtcagtgtctgccccgcccacataaaaagacgaatcgatttattacgaatcgggtttttatcaaggccaaaaagattgggattggatatatgtatgtaaacaaaattggaataatatgtaccttaggataatttaaaaaaccatcaaatacatcgaagccctcctcttcaaaaaataaacctta

SEQ ID NO: 16050 - DNA, 3331 bp, Heterodera glycines
aaacaaaaattcaggcgatttctgaaatgcctgttccgacacacgtgtccgaggttcgatcatttttgggaatgatcaaccattaccaacaattcgtgaagaacatgaggttcatccgacagccattggacgaattgttgaagcaggacaaagtgtggcaatggtcggcagattgtcaaaatgcttttgagaacgtgatcaagattttgaaatctgatcagttgctgacacactatgacccggcacaagagatcattgtatcggctgatgcttctgagcatggaataggagccgtgatctctcaccgctttccggatggaagtctaaaagccatcgcacatgcatcatcgtccctgtcagcagcagaaaagaattactctcaaatcgagaaggaaggcttagcgattgtttttgccgttcaaaaattccacaagtatctcttcgggagacacttcgttctgcagacggaccacaagccgttgttgtccatttttggcaacaaaaagggaattaaggcttgcacagcgaatcgattgcagagatgggcaatcactttgctcggctatgacttcgaaatcgaataccaaaatactgctgattttggtcaagcggatgttttgtctcgcctaattgcgaagacaccagtgccggacaacgaagtgatcattgcaaacattcgtgagagcaatgaaacgggagtgttgaattttgttacgaaaactcttcctctcgatcacagtgatttggctaatgccgcgaaaagtgatcaggtgatcaaaaatgtgaagaaatttgtctgctcacattggccaacaaagaacaaaatggccgcagacattgttccgttccatcgacgacgagacgctttgaccatcgaggatgaatgtctgctttatgcggacagagttgtgattcccgcatcgcttcaaaaagatgtcctacaactcctgcacagaggccatccagggatgaaacgaatgaaagctctcgccaggcagtacgtttactggcctgggatggacgaacaaattgagaattttgtcaaaatgtgcaacgaatgcacaatggaagcaaagatgccggtgaagagtgagcttcactcgtggccgaaagctgacggaccgtggaaacgcgtacatttggactacgccggaccgtttatgggaaaaatgtttctcataattgttgacgcgtactcgaagtggcccgaggtcttcgaaatgcgttcatcgaattccgcggctacaatcgacaaattgcgatcactctgtgccagttatggccttcccgaaattttagtcacggacaatggcacacaattcgcttcaaaagaatttaaggaatttgtgaccgaaaatggcatcaaccatctgttctccgctccgtataatcccatgtcgaacggacaagccgagcgttttgtcgatacgttcaagaggacatgtaggaagatcaagggagaaggagcatcggaaatgttgaccacatttttggcaacataccggaccacgccttgtgaggctttgccggagtgcaaatgtccggccgaaatgttcctgcaaaggaaaccgcgcacgactttggacttgttgaggccaaagccaaaggcaccgataattcgagacgaggccatggagaagcaattcaataggcgccatggagccaaaccgagatcttttgccttgggcgataaggttctcgctcgtcatcgtctttctcagccttggcgtccaggaaaaatcacaaaatgtaaaggtgtgatttatgacgtcgaatttgttgatggaaagtatggacggttccatgccaatcagttgcttgtgagaagcactgacgaaaacggcacaaacgcattgaacgtgttcaatgatgcgtttgatttgccattggcaccaccgctggttcagcatggaggacaagcgcaattgcctgtagtggcacccgctgctgtcatcgcaccagccgtggccgaagaacccgtcgtggaggaagctgatcgagcccccgaagtgcccgctcaacgacgatcacagcgaaatcgacgaccgcctgatcgctacactccatcatgaacggacggatcagacggacgaatcgaacggacgtgtaagacggacggatcattggaagaaccgaggaaaagattttttttattggggaagatgttgggatcggtactattttgtccgcccattattatttttctctatttctcttccctccattctctcctctctctcttccctggttggtcccccataaataccccgcgccctctgacctccccgtcattcatttgtcacccatttattttgcttatattgttcaatcaatattcgccctttgtcctccgtctctcttctcttcatttatttatttatttgtgtcttcccaacttgaataaacctttatttattcacttcgccggtttggggtttgacggcacaacaattttacaacgataaaacaaattaaattaaaataagtttatttatatttatttacgtaatgatttttggggtgatgtggggggaaattccgacacatttgcaactttgcaatggtttttggggatttttgaaatggtcggaaatacaattactggaaatattcgggaatgcaaaagtagggacccaaacaaagggagaaagagtcgatgagaatgaagaatttatttgccataatacatttttagaaaagaaaattaattttgtcatttattaaaatttgtggtgatgatcatcacaaaaagtgcacaaggtagtgccgacaattttgagaagaattaaatgagcattaaatataaaagagataaaatatcgttcaattgttcgcttttaaatcaggattaaaacataaggatatcaaattttgttccatttgttcattttttctgatttgcttttatatattttagaaaataaaaatgcattttcacagttttctgggataaatgcatattccgccattttcgcttttttagttcctattttaaaagtcgggtccccaaatgtctggtccccaagttgcaaatccccaaaagtcgcttcacgtttttgattaacatccatttaggtgctttttgaataacatcccagcaccggtccgggattcccggctcggtccccgtcccgcttcaacactacccaaaaataaaatatacggaccgccgtggatatattttggatagacatgacccatatccgcggatatcatgtcacacattgaaacgctttcttcttaaaatatttttcaattttttagcatcactcattttgggattttctcaatccattttgcaattttttgcaattttttctttttcatttat

SEQ ID NO: 16051 - DNA, 3790 bp, Heterodera glycines
cttcaataaaaactctaagtctaaacagtcattcaaattttgcattttttaaattttaaatccaaaattagcacaaaataagcacgtaaggctgaaataagcatattatagctttctaagacccggcccctccaaataagcacaaatcttagaaataagcacacttgggaactctagatttcacaaaaaaaatgaacaaattttgcgattttgagttccggcagtgccgatggggcgccgccgggaaaaactccgtgacaatcaccaaaatgatgatgaatcagcatagttaagagcatatttatatcgaaaatttaagtagctataaaatgcataaacagcaataacaacaacaaaaaacaaacggaaatggaaaatattaattaaagggaagaaatttcaaaaaaaattcaacataaacctgaaaattatgtaaagcaaatacgtgtattatggaggcaataaaataataaattaacaactgctgaagagaattcagtggctgctaaaggaaatgccaaatcaattaattggatggcattaggcgacaccaacaaaaattattaaaataatataaacaaaatgaataaattttcaccatttaatttttataatcattcataattttgttaaaataaaacataaaaattaagcattaatattaataaaatcataaggtaacaacaaataataatgatgatatattcggttttggtgattatttttatttctttcatcggttcggcaaagtctgtgaatttaggtgatttaaaataaatttaaaaaatatacatttatttttagaacaaatttttaaaaatattgacgagaattactcaaaattgttcaatcttccactcgatgaaaatgaaatttctgacagaaatttggaagcttttcaaatggaccaaaatttgaagttacagttggaagcagcaatattttacagtaatgcaaaggaaatggtaaatttgcgacaggatgggaagccaaagaaaattcgtgaacaaaatgccaacacattaaaagttttggttgaaaattttgctgcgtccagcacagtgtcccttgtaaatctgtgccatttgtggaaactttggcgcactttgggcgacacattgggtaacttttattaaccattttttgaaaataccctttggataggccaaaaaatcttttaattgaaaatttaagtggaaaatcccaaaattccaaagaatgtaaaaaattatttgaaaaatcgcgaccaaattgatttgaacggcgtggaatgtgatgaaagcattggccgaaaccgagtttttgtcagagacacggcacttgcgaatttcagtgcaattatcgcactgttgcaacttcaaaatggcaaactgacaattaaatttggaattgacgaggaatttcgaatgatgtatggaatttgaaaaataaatgcattttttcgaatttttgtgcctttttccgcttttttgtacctatttcatgccaattttttggcgtttttaataattacttaggcttaaaagtggaaaaattatttattatcatattatcagaatttttaatatttaaaaatatcaattcaactcaaaaacaaggttcacacattttctagttttttaaacaaatttaatgtagtttttttgccatattctggctttagatatttcataaaaagttttaaaaaacatttttttggcaaaaaaataaaatccctttcttatgcataaattttttatttaaattcgctgacaaaaggctcatacatcaaatttgcgcttaatattccgtaattctttatttttcagagatttgccaaattttttcaatgataaaagggcgaaaaaagagtcgaattttgcttttcaaatacgacatttacgttcaatggacaaaaataaattaatgattcgaatgaaggacaaattaagggaattaattggcccattttttatgaccaaattggaattaattcgaccgattgagatgaatttcggtgatttttattgaaaaataataatttaccgaattatttttaaattatttccctcaacagatattgttggtgacaatgaattggcgatggattatgctaaatttttgtcacaagaacatttggttgaggaaaaagccgtaaccaaaatatcagtgagaattatttttggcagaattatgcaaattttcgcccgaatttacgccatttgggagacaccgaaaatcaaaatattgaaaaaaacaattttaaatttgtggaatggaaaagaattgcaaacgattcacaccgatttgaaaatgccgggcctgaaagcagtgaccaaatatttcgaattttacctaaaattgttacgcattttcaattccagccaaggcattggcgagcaggaagagcaaattggggggttgttgccgactcaaacattcgccaaatttacatgggaatttgcggcaaaaaacaaaatgtttgagatgacatgggtcgcactgcttgaagaccatgccaaaaacattttgcggttgaccgagtcgaccacaccaaatgcattcaccgcacttttgaaggattcgctgatgaaggaaaagggcacaaaggccaaattgaacggcttttttacgaacaatacggaaaagggggacgaaatttacgaagcattggccaaaaagtaccccaaattgaagcagttaatcgctagagagggtttgtgtgtgcagggcttcggattggattccgaaggatttaccctcatttttattgcttatttgggggtcgaagagcatttttaggaaaatttttgtgttgttatataaaaaatataaacaataaaaaataattggcataatgtactttgtcagcttcaaaaaacattgagtatttttgatttcctaaaaatttggattaatgatagttttttatccattaaaaaacttttaaattcgcagttcagccctattcaaaacagaatgttttgcggataaaggaatgaatattaagtgatgatttcaaataaactgaaaatattctctccttttctcacaaattaaatttcataagactttcaacaattaaattttaaagcctacttaattgaaaataattcagagctatctgatgatcagattcgcgatctacaaattaggaattacatccgatttttaaacgtcacaagcagccgaaatgagtcgatgaaatcgagattcaagctcaatctattgctttattatcaatggtaaacattttggctgctttaattggggaaagggaaaagatcactggcaaattgaaaaatgagggatgccagttttgtgaaaatatattttcccctgttttctccatcatattaatagtaaggaaaaacacttccttttttgtatttgcgttcaaaaattttttctatgattttttaaaaacattttaaaatttttgtttacaatttggtatttatttggggcttttatacattttaaacaaatttatttaagaaaacttttttttttgacagggtgaagcaaatgagagatggtcaaaattcagcagaaggaaagaaagaatttgatgcaaaaatgggccaaattgaaattacgatggatttggtggcggatgaaaacatggcaattgaagcatatttagtgacagtggaagcgaacataatacaggaacttgagcagttcaagcagaacaaatttctggtcaacaatggcacgccaattaaacggcacaaagaaaagtggacgaaataacggaaaggtcgcccagattcagagaggcattgaaaggtgcaaattaaaacaatgg

SEQ ID NO: 16052 - DNA, 1228 bp, Heterodera glycines
tcgcgcaaaaagcgcagcacaaacagcgggtcggtgccctcaattttcaggatggacactgaagatatcgggcggatttgcctaaatgccatgaatatgtggggaaaaaaaatattaaattgtagccccagaagaggaaagtaccgattttcaaccataaatgctttaattttattttacatttttctatttgttgtgagacgagggtttgacataccgccctgcattttaaattttcataaaaaaaattgttgaaaaaatttttttttgaaaaatttcggtttaaattttttttaatttaaagaggagggggggggggaatatttttcatcccatttttcggatttataattaatgtgtttgtgtttggtatttacttttgcctgtgccaccggagtcggtctcggcactgtccccgccgcccgcggcaaccggcgacttcagcgactcgggcacgcacagcgcgatgaacagcaagtcgagcgcggcgatgccggtggccagcagcaccaccgcgtcgtcggaataggcacggctcagataggcgcccaacgcctgtggcacaaatcaaaattttatttatttttgccaaaatagaaattttttcaaaaaccaagcccttctcctccattttatgagtcaaataaaagctatcatgttagcactccaaatcaaaatgtttaattatttaaaaaaattcgcaggtttagcaaaaaaaaatttttttttttttcaaattaaaaccaacatttttggttttcacgccgtattttccaataatttaatataaatataaaataaaacttgttacaatgtatatcggaatgtgtaatatttttattttgattttttggaattaaaaaattggaaaaaaatgccaatttcttactggagatgtgaccaacgaggcggcaaatgtggcggacaccaaaccgcacgcagttgtccgctcgctgcgctccgttatgtccgccacgtaggccaacacgacactgaacgtgacggagaacaggccgctcagggtgaacagtgtgaaataccacctggaacgcaacaaaaaaaatgattggaaaaatttaaaaaaaaaaatttttttttaccctggaaatttttttcaatcaaacaatagccaaaaaagtgataaatttaggcagaattgaaagaattttcttagtttttcataagggtgggataaaaatatatgttcatggaaaaattgaaatttttt

SEQ ID NO: 16053 - DNA, 2546 bp, Heterodera glycines
ttttttttttttgttgggtgccatttttcccgttcttttttgtgtgtgtaccagggatggcacggaattccgagttccgacatttttggggtcggaattccgacttccgaaaaaatttatgggcctcggaattccatccctggtgtgtaccatgtcgaaattttcaggcacggaatgggcacacaggtgaagaaaacggtgagcaaaaggaagggtttgcggccacaaacgtcggacagagcgccgatcagaggcgagctgagaaaggagagaatgccctgaaatgggggacaatttttgtcatggcatttgttagttccttgaatttttttagtttttccatgaattttcctgaatttttttaaatttttccttgaattttcctgattttttaaagtgtttccttgaattttcctgaatttttttagtttttccttgaattttcctgaatttttttagtttttccttgaattttcctgaatttttttagtttttccttgaattttcctgaatttttttagtaataatgtaaaaaatcttaggctggaaattttttgaaaattgattttgcataaatacaaaccttaaggcccaagatgagaccgttcattaagaatttgttggctggaaatgtttcggccaacacattgatcaccggaacagtcagaagaccccacgagaaaaatctgaaaaaaaataaaatggaaattgaaaaaaaaaaatattgctttgaaaaaatagtcccgtttttccataaattcccattaagattttacggaataattgcacaattaaattagccctcagcattaagaataagaaaacacagtcttcaattttattaggaatattaattctgttgtttgaaaattaatagtttttttacaaattcattgacgattaaatgatcagatacaatcacttttaatcgcttatttaaagctgtttaggcgatcagtgattaaaaaaaaacacttaattttgaacccgattttggacaaaggcgcaaaaattttgaatattttggacaaaggcgcaaaaattttggacaaaggtgcaaaaattttgaagattttggacaaaggcgcaaaaattttgaagattttggacaaaggcgcaaaaattttgaatattttggacaaaggcgcagaaattttgaagattttggacaaaggcgcagaaattttgaagattttggacaaaggcgcaaaaattttggacaaaggtgcaaaaattttgaagattttggacaaaggcgcagaaattttgaagattttggacaaaggcgcagaaattttgaagattttggacaaaggcgcagaaattttgaagattttggacaaaggcgcagaaattttgaagattttggacaaaggcgcagaaattttgaagattttggacaaaggcgcagaaattttgaagattttggacaaaggcgcaaaatgtttgtactcgagaaaaatgacgattaacgcgtgcacaaggctggcctcgcgccgtacgcgtgccgaaccgacagcggcggtgccgagcatggcggccgacgcggcggacattcgtcgacggctgacacagaacagtgagcgggcacgtctgctcatactgtgccaaaaaagtggggagtgaaattagtggaacaaaaaatttatatttttttttattaaattcataaaaactttggcagtcaatttttggcacagccttagcctatattttaaatttttccataaaagagccgagagaaaaattactaaaaaaagaacgaagaaaattattagagctcacaatcagcctggacttggatccaggtcaggtctggatttttcctggatccctaggtccaggccatatttttcggcaacctggaatttttgtccggaaaatccacgtccaacatggaatccaggtccaggcttttttaaaatgccaaactctaaaaatacaagttttttttttgactttttatcagaaaaatttgctatacatacagtgatttgaaagaatgacgatcacaatgacatcagcagcagcagaaaacagtgaaagttcgcaatttttttatccgtgacgtgagaatgaaattaataatatcaccgatttggactgtttaaaaaatatataaattcaactaaaattaaaggctattcgccaaggctcccagatctgaggctttagcctcattttgtgttttttggataggtcaatgtggcttttttttgaaatgaggcttttttgagaattttgaggatttttgaggctttttgtggcttttcttagaaattttgaggattttgcagaatctgttaaatttttaattttgataaattggcattatgtttttgacaattcattcaacttttctccgcgctaacaaaaatctttaattttcttttcttcaaacaaaattttgttttttttttcatggaaaatgaatttatttttatgtttggattatagaccgagatttccaaaggggcggaccggaccggcctgatattttctgaagaacccggcttccggcaccggccttggaaaaccggagaaac

SEQ ID NO: 16054 - DNA, 2095 bp, Heterodera glycines
  unsure (1)..(2095): unsure at all n locations
tatancggtactacnnttgacacggtttcctacaataagcctacaaatattgccgttttctctccgctagccgaagttgaatttgtccaagacttaaataccttcccagttgtctgctttaaaacggggggggggggggcgttcggttgggtcaatggcaactcgtacgaaggcagctcgtactttactaaaataaagcctaggcccaagcaagcctaggcctaacataagcaattgtacgagttgtcatgacaccgttcggttcggtcggctttacgtcccaattttatgccaagaaatttaaatgttgccattagaattggacattttgagaaaggcctggacttggatttcctggacaaaaatcatgccatgaaaaatcaagtgttgtaaagggctggcccaggccttgacctggattttttgaaatttgtttaaaaacaaaagaaaatttgaaaaatagggacgctgggattctgaatgtgtaaaaagggtttggccctcatttggggacacctctccttccataccccgttttgccatatcctcctcctcctttggcactgctgatgggtccttccttccttccgtaccccctgcttttcctccccccccgtgccgtcccttccgttgcttttttgtgctgtttgccacctcaccttctccttctgcaactgttcgaagatgggcagccattcttcgaatgccaatttcttctcgcccttgcgtttgtattcttcgcccgccgctttccaaaccatcgcattggtcggcttcagcccacacgcgcgtgccacgtcgccaatttgcgtggcgtcgattttgccctccaattctgaaaatgatcagtaaaaagcaaagccaaaacatttcaacagaaaggtgatcagaaatttgccctcggcggataaatttgatcggaaattgcctccattgaacataaaatttggtccaatttgatatttggtccatttttgctcggcttttgccttaccctcatcgtaaaggttgaagatttctttgagttctgaaattaaaaaaacacaatttaaatggcaaaatgttgttgataagagcacttttttacctccttgggacggcatttctctgctcttccgtttggtaattcttctgctgcttttgttggtgaaatgttttgtgggactatgtgagatgagtgtgtaacggcggaagaaacgggcaaaagaagtgcgggggcggacagatcagtcagcggagaatggaggcggggggggggcagaacgatgagacgaagaagacggcagagatttatgggacagaggagagaggaggggggggggggttgagtggttttagctgaaggagaggaaaagcggacgatcagcagcaaacagagtagaggagggggagatggagtggtgatctgctaaggttggcggcaaatgcttcttatgctctacgtccgatcagtcgacgctctcctctctccccctctctctttctctctccccctctctctttctctctccccctctctcttcctctctctcttctctctatctctctttctctctctatcttcctctctctctctatctctcttcctccctctctctctctttctctctcttcccttctctctctctttctctctcttctcttcccttctctctcttcctctctcttccctccgcttctcaatgtggtgagacaacagagcgccacagaggcaaaagcatcggatatccccggaactgcttaaagcatggacgaaacggagaaggtggagaagcgggtgctgctgttgggccaaggggaatgaaagaatgaatgagtgattgaattcgaatggatcgcttcgatcggtggaagcggcggattggaatttgtgtcggtgtctgctgctgctgtctctgtttgctgattttcatttgcatttgccatgcctcctccttcgccctcctgcattcacacattcttttccgtctctttacttctcttccctttgttttttggccaatctttatttctctgtcgctctcccacttccccgctctctctctctcccaaaagctctctcctccgctctctccttttctttgttgcccttgcc

SEQ ID NO: 16055 - DNA, 1681 bp, Heterodera glycines
  unsure (1)..(1681): unsure at all n locations
aagatggcgtgcttcagttggacgaattcatcagctggcgatgctcacttgatcagatcaacgaggcatgggacaaatttcagaggggcgaagggtaaaataaaaataaaaatgaattttataaattaatttatttttattgaaaaaaagaatccgttcaatgatttccgtgtcaaatgaatgaacgaacggaatggaagaacatttgaacagaaataatgataaaaaaaaagatgggagaaagtgattgaagatggacagacgcacatcgattgatcagagaattggcaaattatcgccatttaaatatttaaaatttaatcacaatatttattttaaatttacaaattattagaaaaaaggtcaaaatgatttgaaaaataaaagtgaaatttgtaaggaaaattaaaaaatgaattgccaaaaatttctcagcttgtaaaactgaatattttcttctgctgttaaaaaattattttttttatttaaataaaaatatttacagaaatttctttctttattccatgcgcatattttttctatacatatttttggttgtcctatattattttttaatctttgttgtaggccaatttaaaaaaaaagaatttggcgggggagggcgtcgggtcgacaacagccaaaatgcgaatggggtcaagccatgcaaatcgatgacattaaaatgaataattttgggccaaaaattcagaaaaaattcattctaactgcacaaagtaattgcgaaactccgaatgctcctgaaacaacttggccagcaaattgttggcattttattcagatcacagccgactagcggatctgagtgctcaatgagcggcttcttcgccagcacacgttgttgttcttattggcaaaaaaaaaataataaaaatattcaaaaaatgattagtggccagagattgcattgattgtggaagaatgtcccattaatttcaacgaattttaatttatttttaaatacacaccctcaaaatgagatgcagaaagtgcgcaacaaacatttcacttcaaataatgcctaaacaaataattttgagctaataaatgggattaagcagaaaaaaaaaaattaaatttggctaattctgcagaatgtgtatccctaatttaactttgttgttttgtgctaaaaattggtatattggggattttccgaggtgttgatctcctgattatgaatctgatattggatttgtcatatgacattgtaaatcaatgatttatcaaatctgttattttttaagtactcgttttccaatgaaacaccacaaatgaggcaaaaacttcagttttggcactccttttgcctttgagtattagtcacgcaaatcattaacactttctaaatttaagcttttccattggagtgttgagcagatgctctttttgctacggagaatttcttttttcaaaaaattaaatttaaaatatttttcttaatgaaatccatcagattggcccaccttcaccatttcgcattaggctgaaaaagattattttctggttagcgttagcaatggcatttgcgaacaaataagctgtcttcgcccctgtacttattatattaaaaaagtatttatttttgttttttcattgacttcctccaataattaatttatttcaccanaatttacaagtgcccgaaaatggtcagaag

SEQ ID NO: 16056 - DNA, 1279 bp, Heterodera glycines
aaaatgaatctaaaaaattaaaaataaagtcttgtattcttacaactttttgataattaacttgataaaaagcaaatacaaaaaaaaagaacctacacgcaggggaaccgaacctggtgtttaaaaaacagtgcctggcgcactaccactacaccacttgacactatgatgaagtgcaaataaatatttattttatttattcactaaaaaactttggcacggaataactcggcactcgggctcattccgcaaaaaataaaatcacttttcttaagaacccatgggtgctctatccactgaccaaatttcattctgaaatcccacggacaccctaggaccttcctttgtcagcattcataaaagttttgctgcagctgacgcaatctttccggtagttgtcgtccggtgtgcaaggcctgccgacaccgattcgtccacagtttgtgcagcgggccttacactaccgagaatggtcgttggcattgtcaaatggacattcacaaggaaaacagtagcaatcacgcccaaacacagcttttccgacaccgcagcggattccatcaaagtgattattgttgtaaaaaagagagatcgatgtatcgaagttgtctggtccatatttatagatgggcttgtactcgccagatgctccaaagacgaaaactttgaagattttattgtacgttgcattccagtaatctacgatgggagggatatgaacggcagcgtcgtattcgttgaggttgaatgggattcctgcggaagccataagtcgtcgtacgtcattgcgttgccggtcaaagtattgattgagatactcggaaaaacgttgtttgctcatcatatcggtgtggtaaatacggctaagttcgagggcatagaaaaggcagaaagagtcgttgtttcggacacgcaggagatttgcttctttaacgatgtgacgaacattctttggggtacgaaacccacgaccgcgaatttgttgttgtcgaggaagagtgctgacgtcaagtgttgttgttgttgttatggtaaaaggtgctccccatagcgacccctcacgcgactttgactgtgccacctccagtaaacgattcagaattgcgtcgacggtattcgaggtatattggcgtattggggtccagacgggtgggttaagaagttcggatgaaacggtggctccaagacggtcggggttgattccgatttcgtgggcgagtctaacagcggacagaatacagttggtgaatatcgctcgcacgagatactcgggattgcc

SEQ ID NO: 16057 - DNA, 2637 bp, Heterodera glycines
catttctggacatattccgaagttgaagaattcgcggaaaaggatgacgttatcgaatctgccaccaaagtgcgagaaaatagacgatggatacctgatttaattagcaaattattaaaaattagttaggaaaatcttaatcactttttatcaaatcccgagagaagccactgcgcaaattctgtcatcggtgattcgcacacacgcattgagtccacttgagtgttgttgaaggcacggtgtgagaacgtgatggtgcggaattcaccgcaaattttgcatgccgtacggccggacagtgattgacgccaagtgtttcctttgatgcaaattgaacaggccacgtgggctgagacaaagttgacgatgtgtgcacgtttgtttgggccaataatggtgttttgcgttgtttcgcagtcgaaggcgatgagacggaatgccttgggatgcttcggcttgagtttcttgatgaaacaaccccgccccttgtcatggtaattgcggcaagtccaacagaatttctcctcgcatacgtgtccctttcttccgtcacgggtattccgttcaaagtcccacacgacaccgcacttcttgcactttttcgatttggtacagtaattagatgtgaggtggtgttgatagcattcagcattcataaaagttttgctgcagctgacgcaatctttccggtagttgtcgtccggtgtgcaaggcctgccgacaccgattcgtccacagtttgtgcagcgggccttacactgccgagaatggtcgttggcattgtcaaatggacattcacaaggaaaacagtagcaatcacgcccaaacacagcttttccgacaccgcagcggattccatcaaagtgattattgttgtaaaaaatagagatcgatgtatcgaagttgtctggtccatatttatagatgggcttgtactcgccagatgctccaaagacgaaaactttgaagattttattgtacgttgcattccagtagtctacgatgggagggatatgaacggcagcgtcgtattcgttgaggttgaatgggattcctgcggaagtcataagtcgtcgtacgtcattgcgttgccggtcaaagtattgattgagatactcggaaaaacgttgtttgctcatcatatcggtgtggtaaatacggctaagttcgagggcatagaaaaggcaaaaagagtcgttgtttcggacacgcaggagatttgcttctttaacgatgtgacgaacattctttggggtacgaaacccacgaccgcgaatttgttgttgtcgaggaagagtgctggcgtcaagtgttgttgttgttatggtaaaaggtgctccccatagtgacccctcacgcgactttgactgtgccacctccagtaaacgattcagaattgcgtcgacggtattcgaggtatattggcgtattgggatccagacgggtgggttaagaagttcggatgaaacggtggctccaagacggtcgggtttgattccgttttcgtgggcgagtcgaacagcggacagaatacagttggtgaatatcgcacgtaggagaaactcgggattgccaggcaggtcttcaatgatgtaggacgattttgacgattggacgttaaactttttgttgaagacgctttcggaatctagtttacggacgtagtccgaggcagggcgaacgcgttgacgtttgggagccattttggaaagcgatagagaatagaagaggttagagaggaatttggagcttaaataatgctcgggtcagaggagtaagtgcaaggaagagggcaatcaaatatttaaatagtcatggtaaaaattcaataataataagagagagagttgaaaaggagatttttaaaatttaaagttacaaaaatattatatttttgtgtgagttgattatagaagtaaaaaagtaattgttattggaacgagcgggtgagaaaattaatattgaaaaattatgatttattttgttagctttaataagtggtaggtaactaatggattagaaagtaaataaataatgagcatcaggaagaaaaaatgggaagcctgactggtaacgcgcataggatcgggcgcatcaggaaaaaacgcctgattgggattgcgccaaggcacatcaggtataaaaaacggcctgacttgggaatgtgccgagaaagattcatcaataataataatattttaaattatattctgaatattcggtaaggaaacacatcttgacctgaagagcagcgcactgccacccatgaagcacaagacgacagggcacctaaacagctcgggaaattagtcaagttaagcgaatgacctcaagccctaaaaggcaattgctgccaggataaacggtgcttatataaaagacaaccgccctggttaacagcaaaagtaataaagaaaagttattttaattcaaaaaaaagagaaggagggatggggtaggaatgagggagcaggagctaaggaggcacatctagacatccggaacaaatgaccagcggaagtgaggatttggcttgaaatggtggtcaatttataggcgccataggaatgggcggagattggagcgagaagcgagagcggcagttgttcatttcgcgttaaatttaaatttgaattt

SEQ ID NO: 16058 - DNA, 2372 bp, Heterodera glycines
tgcttaccatcccattgtttcgtttgttcatgcccattgtcagcggatcgttcatttgttttgcttcagttccgtcgtcaatcactccaagcaaagcaaaactccgcttctaattaatgctaatgcgctaatccctccccccccccagccgcctttcttccatttttcttatccgttaattcatttcgcctttctctgaacgtcaaattgaattgaattcgctgtgcttttcaaagtgtttttggtctgctgctgctgaacaattaaagaagacaaagaaaggcggcagaacggagacgaaaagcgaaaagggatgagaattcggcgagtgcggcgccttttccaccaccgccactccccccaaaatccgcgcgacgtttgtccccagcatttttcaacacattgtgagctcaagaagaaattgtgccattctctgcacaaaacaaacggcacaaataacggcgaaaagccaaacaaaggcaaacggaagaagcaacaacagaaacaacaataacaacaacagctggggcagcaacgccttctctttagccgaagtgtctgacactttctgccatcaattaacgtacatttttgaatttaaaatcttttaaagttaaattggatacgattcattgttttgtgtttcttattgttcgtccgatactttcaccgcttttctgtcacttctccccaatgtttcggtgcttctcccctttccttcctcataggattctgtgctttctccccctttcttaggtttcgatgcttttcctcttttccctttgcttaggattcgatgcttttcctcttttccctttgcttaggattcgatgcttttcctccctgcgtctccccgtctccgttcgcttcgccgtccttcgcttttgcctttccttttgttccttccacttcttcactttgccattgctcaacgcgacctctccccgtccctttcgccttcccccgtcgcttttcgtcctcaaacttcggcttcttccgatggcacttcgcttggccgcccttcggtcacttttccttcgcttcacttatctttagatgattttgcacattccttacgcatcgaaaaggaccatcaggtgggcaatccgatgcgagcagcccaaaaagtgccaagtgattgttgaggacccttcccatctgctcgatgtgttcctcccctcctcatttggccattttcgtcagtttatcgcccgggtgacggacatttccatcgtcgagtgctcacttccttttctcctcatttaaaatttgtttcaaaaccccagggaatttcgaatgcgcgacgcaaatcgcacctttttggcctctttggcagattcctcggtgattaatgtgcacggattgagcccgggccacaaatataatgtggccattttgggacgacgggaggcggagagcagtttaatccgggaagaccaagtgagcagccaatgccaatgtcggctgaactgcgcttttgcaggtgctgatggaccctgtccccttggacttcggcgttcacggcaattcgacggcaatcattgccacggcgaccaatgtcacaatgcgggcccagaagccggacagggcactgcaggacactttccgcgtggagtaccaccgattggacccgctgaagcgtttccccattttggatgtccacgtgcgattaacgttccagcactttttctgtttgtttgagccccaacgttcaggacattcaagagcaacgagaagtggaactgtacttgggcaatttgtcgccgggaagagactacgccggtgattaaggaaagcttttgatgtcattccaaaaaactaccttcagtttccatcacttcgctacgtgaggaattgccgagccaaccgtggcgtggcattgtaacgacgagtgagtttggtcgaacaaacaaatacgaatccaggggacggttcgaaaagagggcgggctatattcgaatggcaatttgtcatcataatttgccattctttaaggaccacttcggcccgggaatttgtcggtggctgagctgaactcgacctgtgtgttgttcagctggctgttgccgtctgattctggcacggatcgtttcaaaatcgcatatggcatgttgcacgggcccaacagtatgaccaaagtgagcgcatgaaacagaacgccaaacaatagcaacttttaaatattggatttccagctcgagactgcctttcccaaccaacagacggagctttgccagcacattttgcccggccgtgtgttcatttttgcggtcattgcggaaaagtcgcgtcaaaggtcggagccggcgactctctcccgcacaattcggcttaagggccgcgcgaattgagtgttcagcccgacttgaaaa

SEQ ID NO: 16059 - DNA, 1896 bp, Heterodera glycines
acatgatatgagctaattaataagttagcctctataattttctatctatctaaaaatgccaatttattaatatacttcattgtcattttgattagttgtcctaaattggcaatgtttcttccttttcagctcaaatgcaccaagaattcatgaagtcattcatggcattacttctccaacaacaaagtcacaattggataatgcatttggtggagaagaaaaaagcaaaaagtaattaaaaattgtcaaaatatttttaatgagtaatttcattttttcagcgtcatcaatgccaaccattgttcaacaaactattccaagcatccaagtcggccaaacccaacgcccggcgggagggaggagcggtgcccttcgtttggccaaatttccccaacccaacgcagttcaattttgcacgaaggagtaattaaatataaaagcattaatttattaaataataataataataaagtagctgtaactattcataaatatttagtacatcaaaagaaatccttgatttagtctttgcaactttgagaacaaatttaaatgagaaaagactcaacaaatgatttcaaaaatatataaaaattgaagatgaaaatgcatattattttatattgttcactttttgcattagatttcctttattttattaaatttctgtcttctatgttcaggattgtgactcggaagtgacaatttgtccaccatcggctcggaacagtgggcgaagtgcagcggtggcagtagcgagcggaaacggcgcaaaaaacgatgaaaatgccgtttatacggcatcatccccccctcgatgcacaaccgactcatttcgacgaaagatcaaatccatggaatgccttgggacattggtaagcaaaatgaatgtttttttgttctgttcatttttggctttatttgaaaaatggggcatgaaaagctttaaatataaaaattataacagatatgtaaacgagaaatccagtagggagggggaggggggggtcggagaccaaaaatttcaaagtcctccattttttgcttttcaaaactttttggcggcgtgcttttttaaaaaattttggtgaaggggggtggggagaggtccggtggtctgataggcgccgccgggaaaattttttggaaatttgagtgtgatttgttaacagattttcagcaaaaaagcaaaaaccttgttaaattatttaatttttttagtcagggggtgtcgactccctccccccctattaattaatgttattaaaagctaacagttcacataccgctcgccaataatcgtacaaaaacggcacaaaattcaggacaatttttcgacgatgacgccgaacaaataccgtaaaaacagtgccgacccgccggtggattgcaatggcagtgacgaggacgaaaatgaggaggacgatgaaaaacagtgccatcaaaaaagacgacaacggacagtggaggagggacaggaggaggaggacagtgccaaatatggacaacggagtctacaaaatttgcacaatttgcaccccacggccaatcgaattgctaacggggcaaaacagcagcaaatagggaaactgacaaaccaaaataacaacggcacatttggtggaggaggaggggtaacaacgcattggagcacaagcggcacactggggtgaaacgaaacataatttactaattggcaattgttgggaattttatagggttgcacgggcccgggcacccgaccgggtcgggtacccgcacgcccggttttttgaaaatccaatacccggtacccgacccggtaggtccgggtaccaaaaatacactggtaagaatgggggtttgagtgaaaattagtcaagaaaattgtttttaaaggcaaagattaaaaaaaaa

SEQ ID NO: 16060 - DNA, 1098 bp, Heterodera glycines
atagcactttcgaagccatcaaattatttatttttagttggatttgttcattattgtccgatggatcgactcccaagtgtccccccttctcattctggggaaatcgttaagtgtcctctgattagaatgcaaagtttcaaaaaatttttgttaaggttcaaaaaagttacgtacaaaacacttaaaaaaactggttttctaaacatttctggccataatttttttgaaccttaacaaaaaaattttgaaactttgcaggctaatagaggacacttaaagctttcgaatgataccaacaatgttagatttggtcgacaaagaaaaacgttttagtccaaaaacttggctggcgccgaaacgacctagtcccgtaccccatttggtactgtacctgtacagtttagatatcacataaaaaaaattttttttttttcaaaaatacactcctaacaaataagaaatgaaaaattttctcaaaaatttattttcttggcaagaatttttaattttaaaaattatttggttctaatcggttttatgcgtcccatgaatgaccacagtttcttaggccataacttttttcttacttggtcaatacctatattcttggtattaaacaaaagcttaaggtctatagaagcttttgtaatcatgtcacttcactatttcggacttagtcaataacttttgtcaaagtcgactaaataaaatcattctttgtatcattcaatagcacttaagactcaagaaaattgggtaaatagatcgatcgaaaagtccagcaaacgaataaacgcgaatggttggggggtgaggaagcgaagagagcgaccccttgggcagggccgcttaaatagacattcgaaaaaatgggcggagtgacagacggcatgataatgcgatgagaaaaatgggacaaaaaaatgcgcagaaattgtgatgtgaaaagtgtgaacaaagaaatggcgcataaaattaaaatgtaaattgggagatgtgaaaagttaaggaattttgaaagaaaagactgtgtgcaaattgttttgctcaaagtttgggccggagattaaccagttgatgagaaatgaatttgaaaag

SEQ ID NO: 16061 - DNA, 2045 bp, Heterodera glycines
acaaaatgtactgcttcagattcaaaaaacaaccaaactgttaggagggcacaacaaacaaaacaaaaaccgtcattgaacgctgtcaaaaattgcaaaatgccatcattctctgaattctattacatatgtactttgcgattccgttaaaaggcatttaaccaattcaatgcctctaattggatttaatttattgtacgctttgcctttgaccagtgagggagggatgaaggaagggaagataaaagcaagcaacaggaggagaagcgggagagagagagagagagaagaaaagccaaacaaatcgagacaaacaaagccaatcaatgcagtgcgcatagtgtggagaggggagagagagaggggggaagagagagagagagagagagagcaacaataaacaaaatgagacgacaaacaaattagagaagggcagcagacacaaaaaatgatttgtgatgatccaaatcaaaacaaaaaataaaaatcatccatccatccatcaatcaatcaagctttgccatcaatcggtgtttccaatattccgttgccgttggtctgcagttgtttctgctgctgggccttctgctgttgtggtggtggtggtggtgaagctgatgacagcggcggttgttggtcaatcgacgcggcgagaaaaagcgcttaaaaacaaattcaaagaaaaaaaaaatcaaatttttcaaaaaattttagccaattttttggatccagcaggcccctgatttagaaatgaaatgaaattcatataaaatttgtcttactactgtaaaattgatacaatttttcagaaaatttcaaccattttctcatttggtgcaaaggctcgaaaaatttttgcaaattaacacaataagaatttttcaaaaatttttccaaaaagttggaggggtgaaacgtggtgcaccctaattttccatgcctaccatgattgtcggcaatggacacgcccaacactcgatatccgtccaaatgtgccgaagtgatctgacgcggcttcgacaccaccttctcatcctcttccttgatgcccagcccgagttggccaaccgtgtcgcagccgaaaccgaacactcgacctgaaaacaaatttttatcgaaaaatcaaaaaaaaaaatgttgatgtggaaatcagctatgaattgtgagtccaaaatgtagataaattttgtaattgaaaagtgttttattatgggagcaccccaaaatctctccaccaaaatttacaaaaaaaaaaaaaaaaaatttgctttttcacaaaaaaattttctatcgagaatcttattgctagaaattttttttctgactgaccatcatccgtccaaaatatggtggcgcccagcgttgcgtccacgccggccacggtgttcactccgtccggcaatgggatgtgctgcagtgtgtcatagcgccagtgctcctcgtcatggttgccctgaaataacatttatcttcaatttttttaaacgttttcttggaaaactttcggaaataattaataaaagcatcaaaaattttcgtgaattttttttagaaaaatttcaaaaatacacaacctgccacgtgtcgaggcccaacgcgttgtccgtgttcttgccaatcccataaatttggctgtcgtccccactccgacagatcacatgctgcacgcccgccacatgggtccaccgtttttcggccggaaacgcggtggcgcaagtgagcagtgccaccttgttggactcctcttggccagcggcgatggtggccggcgactttggcttgggcggaccgattccaccgtcatctgaatatacgttgtggaaatgttttaattttgtttaaattttttggagacctgcctcccccgggagcaactcccccctccccagaaaatttaaaaatttttttttgtaaaaaaatgcaaaatttttttgagcgttttttggaaagttttcgaaaaaccattaactcattataaaccctataagcaatggcaactcctccagaagagaaacttgcacaatgttgaagaaaggcaattcgta

SEQ ID NO: 16062 - DNA, 1596 bp, Heterodera glycines
atatatatatatatatatataatatatatttatattatgtattttttatttttatttttactgaattatctgaagaataaaaattaaattccaaaggagaaaaaagtggtaataaaatttaaaaaattatggcgtttcttaaagcatcaattttttttttctaaagcattttaattaaaaaaaaggaatttcattgtaagaaaaataaaatgacaaggaatttttgaccttatacgggtcgaccacttggacgtaaaggatggcatccaaatccagctgaacattgtccttggtaattgcttcttgttgtggaatttcaatgcacatttccttcaaacagtgccgataccgtatctcgtcgatgagagggtatacgatatgcaccccctaaattaaattaaaaagatttacttcttgcaataaataaattattttccgtattattgttttataaaataaaatcactacggcattaaaattaaaaatattattgttataaatttaaatatttattattaaattaaattttttggtgtttaataaataccgaaaaataattttaaaaattttaattttaatattaccggctcaagaatgcgatggaattttcccgcacgttcaacaacccaagcatattgatgaggaacaaaatgaagaattgtattgaattttccacctttaaaatgttttgaatgcatttttatctgtaaaaaaattaaattaattatcttttattaaaaaaaatttgtattttttaaaaattaattttattaaaactttctaaaaatataatgaaaatagaaaattcattcattattatttccaataaaaatttaattatttcactgaaaatcgtaattataaaattgaaaattccgatctatactaagttcagacattaaacaaccgatgaaatttaaaattaagtgttcgccaaatttaacaataaatttgaactgatgaattacggaaatcaaaaacttgtttttcttccatttattggaggtaaactgttgaaatgaaattaaacaaaaaaagaaggaaaatttagtattccatcaataaaattttcaaataactttaatgacttaaagaatgtgtgctcatctatttgggccaattttcgttctaaagtcagtcaggaatttaaatgaaataattttatgtatttaaaataaaaaaccaacattttcaacaattcttttttgttgttgaaaaaaaatgatttttatttatttattttttactattttaaatcgtaatttaaaaaagtgattttaaaggcatttaaataaaaattctggaatgttccgtaaatgcctaaagaatgtggcggcgttcttgcaataggaccatcagttatcaaagatgggtgaatcattccataaacaattggtacataaattttaatcgttaataaaaattagaaattgtgccaagagataagaaatatttgaattaaaataaaaaaaaagaaatagtttttaatttatttttcgttctctttaaaattttaaatgaaaaaaattagattgaaaaataccagttttaactgattaaaaaattttgagaagggtggagcacggcgatgcgcag

SEQ ID NO: 16063 - DNA, 2741 bp, Heterodera glycines
  unsure (1)..(2741): unsure at all n locations
aaaaggagccgcctcacggcnggggcagcaccaaaagccccacattttaaaaaggaaacggccgatttcacataattttttcatctttgctaagccaattgaagtccgacgaaaactgtcttaattatttgcctcaataaaatgtctgacaaccgaaacgaagcggaggagaaaatggcgaaagcaatgtaaaattaaaatgccaattttcaatttcaatttttanattttgttttccttttttcagttttatctctggcgacggttggctttgtgtgttcgaattgcttccggcttcacaacttggccttgnaattgcgatgatcagccacccgtttgacttctacgtgnatgaacacttncagactcgctactggactctgagatccatgaaaatcaaaatgaagttcgaagcggatggcacccaagaaatggatgttggccatgccaattggaatcgtttggaatacgcaaaagcccgttgcaaagaaaagcccccgatttcaaggccctttcattgaaggggaattttgtggatttttttttctgtttgtaaaaaaaatccccttcatttttcccaggggaattccaaaaacaaaggggatttccttttttccccccccttttttctttaaatttttccccccccccccccccctttttttttccccctccaaccccattttttttatacaccccccttttgggggccaattttttgtccaaaatttttggccccataagcccgcaaaaaaaattttgtgggctcctattttttaaaaaaaaaagtatttgccgggggttggggaaaatatcccccgctaatttttcccaaaaagggcccccacatccccgggggggaaaaagcgtactaaaaggggggtttcccccccaaatttcccccaaaaaaaaaaatggggaggggaaaaaaaaaagagggggggaaaattttttttttcctccccccccccccaaaaaaaaaaaaaaaaaaaaaaaaattttaaaaaaagggggggtggttttttttttctcccccccaaacaacccaccacaaaaaaggtgttttttttttttttttttttttttttttttgtttttttgtttggggggggggaaaaaaaaaaaaaaaaaaaaaaagggggggaaaaaaaaaaaaaaattttttttttttttttttttttttttttttttttttccccaaaaaaaaatatttttttataaaaaaaaaaaaaaatttttttttttttttttttttttttttttttttttaaaaaaaaaaagggggggggggtgtgaaaaaattttaaaaaaaaaaaaaaaaaaaattttttttttttttttttttttttttttttttaaaaaaaaaaaaaaaaaaaaaaaaaaaacccttttttttttaaaaaaaaaatgggggggggggggccgggggggcgccaacccccccccccggggaaaaaatttttttatattttttttgtttttttttgaggaaaaattccccccccaatttttaaaaaaaaatggggaaaaaacaaaattttttccaaatttatttttgggacccttccaaaatgaaaaaaagggaaacggggcaaaaagggtgtttgggggcccattcccggcttttttttaaacccattttttccctgggggaaacatttgaattgggggtcccgggggggtaaatagcagggggggacctgaccaagccttttttttagattgggttagccttgggagagtggtatgaaaaatgacgacatggaaaaacggagaaaatatggggtactntccgttatggtacaccccccgaaacttttttaaatatttttttctagtcttattttagtgctgaaaatgaatccggcatgtttttttgatccgacgtcattacaaagaaaatctcttacattataatccgaatttataatgctgtgtcataaaaactaaacatcaattgaatggctcgcttaagtacacaactttgcgggtaagatcaacgatcattttcacgtaaaatcgatttcttgtaaatgacctcggatcaaaaaaacaattccggattagttttcagcgcttaaaataagtatagaaaaaaaagaataaaaaaaccataacggaaaagtatgaaatatgtgttataggtagggtgtccaaaatatggatataaaatcgtcaaatatggcataaaatatggatataaattcatgaaatatggccataaaatattgaccaaaaatcgcgaaatatggatataaatggcaaaaatttgaaaataaaattcctaaattaagaattaaaatttcttctaattcgaatgcaaaactttcaaaaatggctaaaatatgttattaaaaatcattttaggaaaaaatagtaataaagctaaggtttaattagtttttagccaaaaacaacattaaaagcgaaattttcgcttttatccttttttgacacaaaatcaaatttttaaatttgcattattcaatattctaaagagaattttactaaaaatttttttttttttttggaaattttttttcgggctttatgggtcaaatataaatatagtataaaatcgaattaagaaattaaagcactcgctcagctgctgttccatccgcttctctattgaaccccctaaggctgtgaagccctccctcacccagtacattctcccgacactgctctagcggactacaagtattttgtccgaaatgagctatttttgaaattttctt

SEQ ID NO: 16064 - DNA, 2366 bp, Heterodera glycines
  unsure (1)..(2366): unsure at all n locations
cgtcncattcgttcaccaattcaaacggcaccattggcattgacggcacatgaacataaaaatgaatttggtaactgacggaagaaatggcattggcacggagaaaatgctaaataatttgaaaacaaaaaacagtgatttgccaaaaatgtaggggccacaccagggatggcatggaattccgatttccgaaatctaacaaaattcctaaattattttacagttcaaattttctacgtattattatggaattaggttatttattagcaaaatttttaacatttggtctaaattaaatatatttgtaatgtgctttttaaaattatcatttaatactttttatattcttgccgtgtgaatacgatccatgtcgtttaaactagggttgctccccgacccttcggtgggcaaaatgtcggggccggggaccgtcgggggcatatgtcgggggtcgggcggggaggggttaaatagtcggggatcggggaccccgatcggggaatgatgaaaatttattttgtcaaaaaaacaatttttattttttcaattcccgtaaacaaaattttcaaaactcaaaaacttctttgtcttcactttcatcatctgattcagattcgtttttggtgccagtaaaagtgcatccaagttgacctttacaatcaaaatttgtcgaacagtattgccggaaagccttaaattagcaaataaattaaacatatttattgatttttgacctatttcgaagtgaattggtaaagataagtccagcttttgagaacagcctttccgagctgactgatgtagcaggaatgctgtggaccatccttgcaagttttgacaactcgggaagacgagcagcgttttcatgccaccaggaaaataagtctccgttcacttctaacctttggcctgccttaaagcaagcaagttcagcttcaatttttgatcaaaaaatctgagtcaggatctccagaaatggtcgaagggatagaaattctacacggtgattttggttgggcccagatgtcatctaaaaaattaaattaaagatttatgtgtgattttgccgtacatttctctatactctcattactgcttggacttaattcttggtaagcaaaggtcggatcaattcctgacccaactcgaccaaagtcgtcaacatcaaaataagcatccatttctgttgtcgggcagaccaattcttaagggataaaaaattcatattattttaatgacctaaattaataataattcaaccaactttcttttgcaaattcaactaattgcttttcaacaaccctccaatttcaaagtcgttaatttccaaatttggcaaattttctgggacaatgtcgaggcgcgacttttttgatgggccaacaccgaatccaagtctttctccttcaatggttaaaagaacgtttaaaattttctcaaaaaggtattttcgtggcaagaattttaatttaaaaaattatttttttatgtacctattttgtttttttgcccttaaaattcccagccctactcatttgcaatgcaataagtgaataaaaattatttttacttaatttttgtctgaaaattatgtcactattcgtcactatttcggactttttgtcactatttcttcactattttggcatttttactcactattttagttaactattttgggatttttcgtcactaaaattcacagccctaataatcaatatatttaaacttaacctattttaagaataattccttatattatcattattttagaaattttataaccatttatttaaatattattacatacttcttttgttatgaattaaataaaatttgacagattatgtttaaatatttcaaatataatttttaacgtcatttactatttttgtaatttttgctgtttgaaaacaaattaaattattttttttccagctttgtagtgcaaatgttgtatcaaacatttttaataataaattattctaaattggtaggttttatcaaaatatatttaaataaatttttgctttttaggattggtttccagtcttattatataacataacttttttataagacaaaaaacattttaattgtttattttattatacagaatttactgaaaatttaatggctaaataaaacaacttttatttatatttttaacaaaaattgaaaatatttgaataattttatctttaaaataccttcaaagttttctggtcttaatgacaataataaaaaaaatggttatgaaaaaacatgaaattatatgttcatttgaatatttagaaaaagaaatgttgattaactattttttaaaatgttatcatacaataaatagaagtaaaataagtaataaa

SEQ ID NO: 16065 - DNA, 1395 bp, Heterodera glycines
atttaaatcttttaaaattattttggttttgcgtataaatttccttttatttctgttcttttgtcctcttttatttttagcgcctgtaataaaaaagacttggcaaaaattaattgcttatattttacaatataatttaagtcaaataatttatatggtaattattggtagttttttaaaattcttttttttcttgcaatcggcttttttctttgctcagaaagtttaattaagtcaagtttttacaaaaattatacattaattttttaattaaattttaaaaacaaattaagttatggtttccatcaatatttaaaatatggtaaattatttttatattgttaactttatgtttgaatcatgctcagtagtatcagacacattaattccccccccccttcttaatcgccctcattccttacaaccaaaaaaatgtttatttccttcgcaggaatttaccaatcaatgctctctctgttcaattactgcacgtctctgtcccttccaaacgagtcgcgcagtaattgacagccaactccccctccccctccctccaatttgacaatcaccgccaatcgttccgtcttttttctgctgttcacttttgcttcacactcacaaccccactgcgcaaccaagggatgcgtctgtcaattgcatcattactctatacatatattttttctttatgtattcctaaaaaccattcgttttcagcttttataaaataatccttatttaaaatcattttttaaataaattaaaatcactagaaggtcgataatttaatctttattaacggaaatttcatgccatctcgcaatttttgtccatattttacgaatccaattaaactcatattccccattttttttttgcctttttggtgattgcctgcctattcgctatgttatctgaaaaaaacgttttttcttaaaatttgagtttccttctccctattattttacttttttaaaatctatgactcaacacattcacattttttattgtgttttttaaaattttaattaccataaccatttattagcctccaaaatttcgcaggcagtttatatagccttgcgcgcctcaattggcgcgcgctaaggctaggcgccttcgttggcgccgactgcatgtgattaatatttttaattaagttaataaatggttatggcaatttctatatcaaaatctcgcggccagttatatagccttgtgcgccttgattggcgcacattaaggctaggcgcctcaattggcgccggctgcccgcgagactgttaaatagattagaaaaatatagatttgtatactttaaattttcttgatgaatgctttgagttaataataggtctgagtaatcgattaaattttttaagttttttaaagttt

SEQ ID NO: 16066 - DNA, 3640 bp, Heterodera glycines
ctgggataatccccgccctccccggggttcattccctttaatcaacgaaaagtttttgaatttttgcgaaattaaccttcttaatttgcgcttggaggatgggaacatgaacagcgccgcgtgggactatcttttcctgcacaaatttggaatggtaaaaaattaattttatgtatttttatgttttaaaattttttagcatgaaaaaatgatgaaggaggcattcatcgccgagctgagttcagtgataaacacacacaatttaagccgtttcctttacgcttacaatcgacggacgaacatatgcgaaataattggcaaaaaattggcaaagtgtccaatatttgaaacgaaaaattattaattaattgattttgaaatcgaattttaagtaccgacgtgctccttattaccgggtcgcgcgcgccgcacaacgaagtccgtgccaaaatcatttaataaattgaacatttaatttaatttttaaataggatgttcgacatatgttcgaaaacatgcgccgtgataagagcacgttgcttgtcatcgacgaagtcatagacgtacttgctgaagctgttggtttttgtgaaattattgtcaaattattcaaattttgtttttaaattgtgtgtttaatagctgttaagtttgtaaatatgaatttgataattagccaaactcctaattaggcatattaactcatggatttagcccagtcgtgttgcgcgctcgctgatccttttctgtaagggcttcggcgaattgagcggcgtagaaacaccgggcattggccgtttgcgatcggcgagcatgtgggtattagactcggttaaatgatagtcttgaaaaaatgatagggccgacaagcactgcccgaaaattttttttttttttgaaaagagctaacaactttttgggctacaaatttcaaggtattttctttttcactaatatataaatgtgatgacaaataaatttaagtttttaaattcataaacaaatcgcttaaatttaataagaaagtttaaaatgatcaaatttcaggagcatggaagaagctgatcgaccaacgcgcaaattttcatcgccacccaaagaaacgatcgctgaagacggtaacctacagaaaaaagataccgtaaaaattgctcggctgacactgaaaaaggcaaccgcagtctaaaagaaaatgcagaagaaaatgagcttattataagacaattatttatgcatttatttgttggtctcttgacctattgatatttggtataatatctattccaaaaaataacggtttttggtgatttttattgtaaaaaaatgaaaattaagcaaaaaaaataaataattgctcggcactgagaatgaaaatccccgaattaaaaagatttatttatttatttttgcaacaaaactgggcaaatcaaaccaaaatgatattcttgagaaatgtaaaggaattgctgagatttcgtcccgatagtgaaaatggcgatgattttttggcaattgagtctcaaaaggaaatgaaatcccaaacacattaagcatcttcaaataaagccgtacttcctagcaaaccgctaattgctgataaaataagatataaaattataatttaaaatttccattattactaattttttgccatataaaatcgataaaaaattacatatatcttaaagatataataattttttttgttaatttgaaattatgacgtatgtatgatatcaataaaaatcaatccaatattcatcatatgcataaaattttatagcaaacgaaattcatttcatttattcattaattccatcaattttatttcattttcattttttcttggctaattttatacaagaaattattgcgagtaaaataatatgcttattaatttaggctttaatcattttcagcctaatacatattacacaatcctgacttttcatatgactacttttcccacaaccgtcgccttcctcacaattttcctagcgcatttatcgctattttatgatgcgagggtaaattaattgattgtttatttcaataattagtcttttttttaattttcagtgtgatgattccttctctgatacattcacctcgcacatcagcttatattgatacttccgctaaacaaccgcaaaatttggtggaattggacttggaagaagtgcgcaagttgcagcaattcatcggacaaaatgccatcaatcacattgttgttgaggatggcatttttgccggaatgttctcctgtcaacagaacatcgaattccgattagaagacgaggccattatgggtgatggcaaaatgcatcgaatgctgttctcattcggagcaatattaagtgccgaaattggtggaccagaaaaaacgccatatgaaaacagcaaatatttgcgttcacttttgaaagcttacgaatgcgcgggaggggcattaaaacaagttgaaaaaaggcataaaattctattaaattataattatatattttgaaacagattatttaaaattaaaaacaatattaatacaatgatttttatttaaatgtttttttatttatacgatttttaaagtcaaataaatgatgaacccgccaagcggtcgttggtggccaaattacgtaattttggaaaaaggtgggatagttatatttgatgaaaataccgagtcccgatctcatctattttctgtattgtatctactcactggcttccgtctcggttttcaagagcattatttcattacagatggattttgtttttaatattttcgttgatatagatgctaatgaaagttaaaaaatggccgtcgacgcttgatgagtcctcaaccatttcataaatgcgaaaatttgcgggattaatcccgcggggtcctgttccgcaaaaattttgagttccggtccacagcgagattcacaaacttgaaattttcgggactctagtagatacaaaaaaatatatgggagctgtctgaggacgcgggggtctaatcgctaacagttgagaattggtcggaatgggtctctcttctgtcaaacatggctactaatttggccctctgcatagtcaccatagcatttcgttatatcgcaatttaagtaaaaaagacgctaaaaaattactgtaaatttaaaaaatatataaattatattgatctaaataatacaaatatgaatgttgatctccgcatacaaaaaagattgggagccgtcgggggcggggggggggggtctcatagctaacagtttttcaattggtcaaatgggtctctcaagcatggctaataatttataattggtcgaaattgatctatcaagcatggctaataatttataattggtctaaaatgatctatcaaacatggctaataatttgggccttttgcataggcatcatagtatttcgttttatgggaattacttaaaattttttcattaacagaagttttgaactcccacaattgatcgatcctacaggtaaacaatttcaacgaagcttacccctttttgtttttctgtttcagtgtcccaaattttgcaattttaccggcattttgaaaaaaattcaattgtcaatttaaaagtggaaataacatagctactgctgactgataagaagacctgca

SEQ ID NO: 16067 - DNA, 3753 bp, Heterodera glycines
tttttttcttaaaatgcttaaattgcgattaagaaaaattttaggacctgctgaaaaatgagattcaattaaaattatacagtgtgacccaaaatgatacattcacctccgaatttgtgtttttagactgttctaattagggctaatggtttttgcctatttttcctaagcttccagtgatctgaaacgcacgaaaaacatttttttcggttgtttttgagctacttctaataaacgacccaaaatttttcaaaaatacgcccctaagaaataaaaaattttctcaaaaattcatctccaaaatttatttatttactttcttgacaagaatttgtgattttaaaaattatttagctcaataatgatttggcctaatttttttattttttgaataaattttgtcattttacatacctaaatttgaggctttttagtgcctattttggcagtttttagagcctaaaaatattagccctagttctaattgactaacttggtttgaattgtacaaagcaatgaaatgtgtaattgactttttgagaagcttcaaaaattaagcttacatgaattatttcaagtttttggggcgacattttccaatattatgaatttttgaaagtgaaagtatcgttttgtgtcacctattttataaaaaattggtggatattgaagaccaaaaaaagaaaaatttcttttatcaattaaatcaattcttattatttgcgtctttttcattgctttgcataatttcaaacaatttcctcaattaaaacattctaaaaactcaaattagggggtgaacgtattattttgtgtcacactgtaatggttactaaaattacctgggtctttaaaggatctgccctttgatttttcaggtttttttgttttctccaattgtccacttttctttattattttctccgatcttttgagcacttcttaaattatatgtgatatgtatttttatggttttaacgccgcaaagttttttaattagcagttaataaattcccaaaaaatacaaattatgagaattttttcaaaattcatatttcctcaaataaataaaagtaataaaataaagaattctcgaatgaaaattaaaagatttgattcgaaagtatttttattagtcggtcgaaatctctgggtctaaaacattttcgttttaagaatttttatgggaaatttaagagtttttgcctcaaatcttccatgtccccaagaatccggcaacattccattccgttatcaaaaagcaataaaatttacgtgataaagtaatgccggccaattgcgtcaaatccatctcttcagctgattcattctcacatttttccttggagcttaaacagcctccgaatatttcataattgaacaaagcaaaaataagaagcaatacaatttttatattcatttaattttattcagcgcaatttgtaattggattaaaatgaaaaataataaaaaatgtttccccaactgaattttatgctaaaaagcgtcaatattaatcaatatcaaaaaccacttacgtataagcatttaatgtttagctcatccctatgggctgatactcgaatatattcgagacctaaataaaccccaaaagttaaatttttctcgagtcgttagttgggctgagattatcgcagtgttaaataggcacaaaacgccataaaaatcaactaaataggcttagaatcacttttaaatatttaaaaaataatttttaatatctattttttttgcaaaaaaaattattttttagagtacatttcagaaaattttttttaatttttcagaagaaattttataaaaaatgaaaatttgtacgaaaattgcgaaattttggattttttggggcatttaataaaattttctttaaaaatcctcaaaaattcaggaaaatgctaaaaactcagcattaaaaaacactaaatatttatatacatttacaattgaaatataatcaattctttcgatttttttgatatattttgctacctaaaaaactttttttttgtttctcctatttttatgcctatttaatgcctattatgagatttttcctgcctttttagttgcctatttcgcgattttttgtgcctagaaaggaatccctaatgaaatcaattgacgttattttttcggtataaaaatttcctctttatttgataataatccgttcgccattaatccgttagcaaaatatggattataaaagacagttttacgtttattgacaaataaaatcctctcagattgcgtcggttcgctttcatcttctgatttttagcttagctcatcaatggttatcgcgtgatttgcaaattcaactcatttgcttttctaatcattgcattatttaaatgcccaaatgagcagaagaccaagaataatgcaaaaaatgtaaaggcacaaaaaattggcagagaaactttaaataacaaaaattcagagcaggggaaccgacgtgggggaaacgatgggggtgggtaaaaacctgcgccgtttaattcacctcaataaggtcctcgccagtgtaccgcgtcggtggctcctgcgcaggaaatgccacggaaaagtcgtcaatgtgaaaagtgccgaacctgccaaacaaagcctggaaaaatgttttgcattcagttttcataaaaacataaattgataaatgaccataaaatgaaaaatgaaatcaagaataaatgagaataattttttgcccatctaaatgaaattcgcttatttcagtcaatgcgctcgtccagcaagtgaaccgaatttgcaactgtaagagatttttgtaaaaattaattaaccaaaaaaaccgtccatggtggcgaaaattttttttcattttttgggggtacaactgtttaaagggttttcggttgtctgaggatccgattctggcacccatttgattttataagaatagcttcattttttctaaactcaatattgttttattttacatgtttgactgaataaattctcaatagatatatatgtataacggcagaagtgtcttaaaattctttttctttttgggaatgattttccagctcatttcccctttttaaattatcattttcatttggatatcatcttctgtatcagtcacagattaagtatagataaattattaacagggatgccaaaaatatgcacgaaaagtggccaaaatatgcgcataaatatgcaaataaaattgccaaatatgcaccaaatatgcacaaaaaaacttgaaaattaggggtgcaaatttaataaaaaaatttttttttcactagtgcatttgccaatgagctacatttcctttataaaattctccttagcaaatatttgacattttttaaatcaaaaattttctcatgaaaaataaatttggggaaacaatttttgaaaaaattttccaattcttagtggtgtatttttaaaaacatttttggtcgattcttaggggtgtatctttctgtattttttaggacctatttttaggggtgtattttccgtttgtactgcatttttgttaacaaattttccaaaaaatggcaaaatatgcataaaaattcataaaaacccaaaatatgcataaaggcccaaaatatgcaaaaatatgcaaataaaagtcccgatttttatacgcaaacacaaaaaagaaagtgtttttcgtactatttagagcatggagaagccaggaaaaaaaaatatgcatttgcatacttttggcagccctaattatta

SEQ ID NO: 16068 - DNA, 2712 bp, Heterodera glycines
gttgacttttgtaattcagttcagaattatcagaatagcttgaaagtttgcatgaaaatactttgacataagccctatcaccctgcaaaatttcagattttttcatactagtaaaacatttttacaaagaaccgcctgtttttaaaacttgaccaccaagttggcttaggctggaaaaagcggattttcttaaaaaattctgagtgcataaaaatttctgaaatttggcagggtgttaggactcgtgctaaagtattttcatgcaaaatttcaaactcttctgaaaacaatgcattgagttagaaaattccgcttggcgatttgtgcaagtttttagcacctaaaaatccgttccctgtccataaccatatttaattctgattattctgatagcgtcagaataattatgattaacttatcagcagaataacaaaattgttttattttgtgttccaaaaccataaattaattctggtcttcattaaaactttatcaatgttctcatgagccagaataattctaagttcggtgatgctggcagacgccgtgattcgctttttaaatttttaaaatcctcataaggcctattcaaaattatctatacgatgataaaaaaatacaaattaggcgcttacttcccatgcgcatatttccgatgtcaagcatggaaatttcctaacaaataagctatttcttcaaaatttgttgctgactgacggtgccgctgagcccaaaggaaatttatgaagttttaggtgaattatgaacagaattagtcgacaaattatgattcgcaatttagagccaatttaaagtgtaaaatggaattacctgaaaagttgtttaaattaaataaaaattaattttttccttcgcgcttcacctcctcttctttatgtttcatgtttttgcccgcattttctgctttaaattattgaaaataatgagaagtattttgatacaatcgtactaaaatccctgtggtaatagtacaaaaaaaacaatatttacaaaattattgcttcgtgctttcgtggcattggtcctgatttttccactctcttcgtgatgggtgttttcttccggtcagtctgtccaacacttgtctattgtcatcctcttctgtttctctgttcatcttcctactctgtcctcttttatcttcctcttccccttccgttctcctcctcatccggtcttccctttcttcctcctcttcttcccccttttctttctcttcctctttttctttctcctcctcttcttccgtttctctcttcttcgtcttcctctccatctgatgtatttcttcttcttcatccgtttcttccacctctttttgcttcatttttattctctttgtccgttgcacattttcgcccattcttcccagcgaattttgctcaatttctttcagcaaagtttcgttccatttttggccatccgattcccacaacgcaacggaggtgcagcgttcgactgaaatttggaaagttttttcatttttatctcggtttttctgcggtgcggtgcctaccgtccgttccccaaaatgtttggaaaaaattcaacagaatactggtaccaattataccaaaattaaatgggaccaaaaattacgtccgatcagtggggagcgtagttgttgtgcagtgaccatcactttgtgcgtgccgttcctcccttcccgggggtcccttttctgccgcggtgctggcacaacggccgattcgagcagtactttctttttgccaaaatgccgcaggaaagtggcacggaaggggcgtgagaagttgtagtaaatgacgaagttgagggacgagttgaacaccaccaaaagattggaaatatcgatgatgtaattgatgcgccatgacaatgcggtggacagatgcttaaaagatggttggttgtgctggtgcaaaaatgtcgatacagtacactaacaaatggcgcaggacgggaccccgcgcaggatttttcgggatcccattccgcaacccgcatttttttggaaattgtgggattttgcgggatattcctatgagattcgttctcgcaaaaattttgaattccaatcccgcagcggaattcgcaaaattgaaatttccgggatctaaaaaacaattcataaattcaaaaataactctgtaaatttaaaagttaaattaaggctaaggagacacaaatattttctattaaaaaaccattatgagattaaaatggtcagaaagaatcatttatagaaaatccaactcaattagatgagctgatcatttgtcatcagatggaaaatttctcgagattgattaattaccgatacggaacaacggctttttatacatttgtgcagtgatttgcatttggacaaattaccgtttcaaaaatgttaatgagcaaggcaattgagttgcagagaatgaacagcaacacgaccaaaatctgagttcagtgagcaataaatttatggacagtcggaaatataaattattgtaaattcaatatttagtcactgactaatgcggtagaaatttaaattaggccccaataaaaattgaaaatgccatttttgtccaaagaacccatggttcaccagtgccatgttgtcctcggaattgccgcgtttgcagatcaccgtgccgacgatcaccgccgtgttcagagcgatcagaataaccaaagggccgacggcgagaaaaaaggcgtacaaat

SEQ ID NO: 16069 - DNA, 3063 bp, Heterodera glycines
tttttcaacaaatcatttgctggcggtgttgcatgtactgatgcttatgtcagctggttctccatcaactttgctctattttggctgaaagaatggacagcgtgcaaatcacatcaatcttgaacgaaaaccgggggaccgcacgagtctttcggggctgcttcgccagtgatcaattaccgcctccggtcactctacagtatcctgcagcgctaattgtgaaccgggacccacattacaagggagggtctcattggtgtgcaatttatgcgaagggaatggaagaaccagtgatttattatgacagcttagcccaaaaaataccatctgtcattgtgtcatcattcctgaataagtttccaatgggcctaagaaaaaatattcgttcctatcaatcccaattagtgtcaacgtgtgccccacactgtattgtttttgtgtatcatatgtcacaaggtcattcatttcaacaatttattgagaaaatggaaaaatcgacaaattccgatctgtatgtaatgataatgatgaataaattggtcaagtaaaatgcttagaaaatgctaaggaaaaaatgcaaattgtcaggttgactaagctcagggagaattctgacatacccagcatactttttcaagtgtgggttgaacagccaaaaaaattcaaaaccatcacttcggacctccggaaaaaagccatgagaaagcattacgttcatcggttgttgcagaatccacggcaaatgttgacggtagaaaattccacagcaaatgggccgtttcatgagccaaggagttggtgagctcattgcaaaatcgagcagaagcccaaacaaattcccaatggcaattgactaaaaattttgtgttgtcattaaaaatttaaaaattttcgcttacatttgttgcatgggtcatcacaaaataagtctcgaacaaattcgttcccagtcgtccgtagcacaggtagtgcaggagctcatttcggctgaggtcctgcggcagttcttcctgtagaagcagtctccccactttcttcttcttcggtgtccttttctcctcaaacatcacatcgaataatgcaataacacccttctaaaaataatttatgtaataaaataaaaatggtgaaaataccaaatattcaaagcacttttggcgctgactacggaaacactcgaattggtaacaaacaggaccaattggagctcgcttcacactggcaaataggcagactaatggcacgaaactgatcagctcgctgttcaattcagccggcaggcgtcgacgaagtttgggctttttctcactcattggaaggttcaaaggattagggcgtttcattttccaaaatttgaataaagaatgatttcgatttcttggtgggaataattttggtgcgcaagtgggcgtggccaaagtgcacacatcgtacacccggtcattttcccgattcattttaaaaattttcatctttttttgcacatctgctgttttcctctcctccctcacttatcttttgctttatggggaccatattatttaattgggaattttcgggaccgtataattaaaattaatattttgctgttaaccagggcggtagctataattacaaaaagcaccgtttatcctggcagcattttgccttttagggcttgaggtcgttcgcgtgacttgactaatttcccgagtcgtttaggtgccctgtcgtcttgtgcttcatgggtggcggtgtgctgctcttcaggccatagttggtttatattttttgactattttccatgcccaaatatttattattcattcaccattttacgccattttccatgccggcgctcgcatataaataccgagatttttgctcactcctcaccctttctcagattaaaaaaatggacaatcatccctgaaaacgatcctctaacttttccattgaccatattctctccgcacctaaaaggccccgacaaggcttcctgatcaatgaactcttgggcgtagtccacttccttggatctgttcaacaaggcgaaggaacatcaaaacaggccaaggactacgttaaaaaattggacaacagcattgaacacgtggccaaattccactacgtaaaagtcaagtcaaagttcaccattacggatttgccaagcacgcctgaggcactgttggccggaattttccaacactgcatcgacgaggctattgctgacagccgtgagcgcaacatcgaacctacacacctcggctgtatgatcagcagccctctgttgaaaggcggcgacatcccaactccagtgcgacagatgactaacaacactctcgacaccattctcaaccagttcaaaaaagtggcgcagtccaaacaacagaaaaatgtatcgttatggggtgagccgtttaccgtcaccataacgacattgaatcgcaatggactgccacccaaacgtcgagtcaaagggggagctcgtcgtccagtcaaaactgccgttcatcaccgaattaacgaccaatgtctgattaaaattcgcaatcccgatgaccactactgccttttctatgcgctgcaggcaacaatggtcgacaaaacgtgcaattggcctcgctggaagttttcccgttacttgaacaaccaatacggacagcagggacaacttcatcgtgatgcagttgagctcatgaagcaggtgaaagcaccaatggacttggatggctacgacgcagatactttcgtgcctctcattgttgatcactggaacaatatgcagcaacaacaccgctttgctgtgttcatctttggatcgttgggacagtataaaccgatctacaagtacattgacaacatttacgacactccgctgctgttgtacttcaatgaggaccattttgatggtgtgcagaagcagggcggtctttttgggcaaccatactgcttggagtgtgagcgcccgtaccgaagaatgtcgacacacagtaaatcatgtaaggcgcgctgtgtgctgtgctcacgtgttggacctgctttaagatgtccatcatccgccggcttcttcaaaaaatgtaa

SEQ ID NO: 16070 - DNA, 2321 bp, Heterodera glycines
tgcgaaaacccctggagttcacaacaaaaaaaagctcggaattccttttttcgaccttttttttgtggaccagtaaagcgtacgattaccgaaaaccctctcaaacaaatgttttgtaagcaaggtgtaattcctcttttccagtttttatgccctttgttgaccatgcagactgggaattggtgcaaacttttgggacccgttcggctgcggtgcaattttgcgttgacgaaggcgcgccgcgccaccatccaaatggaatcagattcatttacgcattctgcacatatcctgctgggtgcggcgggcagtttcggatgtgagttaatgtggactcaaagtatataatgtacaagggttaggctgggggtgggggaggtcatgccgccacccgcatggggtcagcgggcgtcgataagcaataagagaagtgtttggaattttgacccaaaaaggcgaaaaaatgtttaacccgaaggtacaaaaaagttctctaccatataaaacttatttacgagtgtggtcctaaacaggagaattgcattttaggcgcatcaagcaggtcctaagcactgtctatttcgaagcgtgtgctgaattggtcaaattctccgacttttgcgccaaatatcgcgtccctttgctccattacctttggtaattttggatccacatgttggttatttattatttgtctagttttgatttagtcaaaaatcattgcaacatcaaaaatccctggaaacgtgttttcacgactttttagaacagaaaaaaaattttaaccaaaaaaggggcgaggggaggcaaactttactattataattggattctgcgaccattaaaaccccaggatggtataaatcgaataaaaaacaaaattttccttgaaaaaatggggagctccgtctatgaataaatgttggtttttgcggagccaagacaagtcagcacttattaagggcacccatcaattgggaccttgttgaacatgttggccaccgcgtgaccggattgccattgattgaaaatgcaaattgcgtttggtatcgcgataatggccaaaacaaaattaccgttgtgtggtggatgcccgttgtcgctataaaatgtcagttgtgataaccttaccaaattatatgttttttgatttcattgtttcaggtgcttgaaacgaggttttgggggctttgtgttgatggaatcagagggcggacacaatgatcactgatttttttgagcacatcggaggaaatgagtgttcggattgccagaattgctgaactgaatcgagcgaaaacaatggaaccatcaaaatattataaatattgcttttttgtttgatgaaaataggccaaataaatttattgcgtgactatttgtttgttttctttgccataggattattctttttgaagatttattcaattggatatttattgaagggatttgtccccgtgcgtgtcccaaatatccaaccaaataaaaatatatagcatgcatccgctcgcccccctcgcaagttttttggaaaaatgtgccgcaaaaatgttaaaatctgatttagtgatcccgaatgcactgaaatttacgatttgcttatttcctccccaaaattgttaaaaccgataatggaagatgaaaaatataataattagagctcgacttttgaggcatatgcctttttttctgcgcactagttccgatatattgagcataataacgcatttttcactctttccaggacagagttcgaaaaaagcaaataaattttaaattaatctttttttgaagatcaatccggctgttcggtttttggagccctccgacattttgtctcaatgggtcgtcgcttttcctggtcatttggaagaatcgactgtcaggtgggtcgttgagtttatattaatgtggactcaaaatatataatgtgcaagggtaggctgggacaccactttcatttgtgaaggtgtgttttcgtttttgaaattccgaattagggggtgtattttataaaattttagccgtttcgccaaaaaattaatattcactttttcaaaaatcgtaaaatgatgacccggcggtgctgataggtagagaatggcaaatcaacctttttattagtttttgcggggtatcaatttaaatgttgatatttaattaaatcaactaacattatgccatcaacgcaaatatcaacgtaatttttaaaatttgcgaaaattttttaaaatttatatgagcggtttataattttagtgcgagagataacgcaaaaatgagagagtgctggatctcagtcccagtcatacaaaacattt

SEQ ID NO: 16071 - DNA, 1934 bp, Heterodera glycines
ctttccccattccctcccaaactccatccgggataaacggtgcatagttggtctgggggcacagtgcgcatccctcactatgtccactattcaattgtccggttctgtccaaccaaatgtcctggagcccaataataataactggaatagtttatggatcattttcagatgtttttcctcatccgtgcaacgaaattttcaattcaacaccgaaatttggtcctccttttcatgataacaatggctcaacagcagaaagcgcatttcacgacttttatggaaagcgtagttttgggaataatatatgcaaatgacagtgtcaaaacggcggagacacagagatgaaatatttttgggtttaattttattttttgtattatatatattttttttggcatttatttacgcatgtcatggaatttgttataaaatcgaaatttccgcaattttctttttttatacaatatagggctggaaacaaaattttgaaaattttagggcaattttgtgggccgacggtgccgagataggctaaaaaggccagtttgaggattttttccccaaaaatcatcctaaatcagcaaatttctcaaaaatcaacaaaaatcagcatcttaaaaaaaatcagatttgacccttgaaaagcagccaaatgctgataaatctgcagttgggagcactgctaataactttgctcgaaagtatttgcataattttcagcgcatatgttataaatagatctcgacttttgaggcatatgccttttttctgcccattagtttcgatatattaagcataataaacgcattttccacttggtttgaggcttctacgttaacttttattatgcctttttttgcctttttcgggattttcgtgccttaaatgccttttttggcattttgcccttttggtgcttttttggcgtttttccggttaaaaaaccagaaacttttgcatttatgttaactcctttatatacgggcactttagaagcacacccacgtataattaattacgtaatagcaaattaagaaactcccatatcatttctataatgttaattttagcaaatatagaacaattttttatgttaaagttgtgagaaaatttgatttaaatagtaatttccggttgaattttaagaaatttggtaaaaaaatgttttaattagtgcaaaaaaataatttaataaatattaaaaataaaataaattttttttttatatttgaatatgtcaaatattacctcttacaatatcttaattaacatgaaatgaaatattcttttatattaaaaaaaaatcatactatttattaacataaatttagcgagctattttcatgggtgtctttaacatatttaaatccaaatttttatggaataaatgacaattaaatgaatgttttcatttttgttatgaatttacaaataaaattggaatgaatttaattatacgcacaaataattgaaaaaaaaattatttttagcaaataaataaattagctgactatttattattcttttaagtaaattatttagtcagggaggaatcaaaattaattttgcctagtaaaaaaactcaaattaaaaaatattgctaacgcaattttatatccatagatccaatacatgaaatttgggattttaaaaattattttatttaaataatatatttaagagattgttgcactggatgaagaataaaactatattaatcatctttttttcaatcacttttacgagaaactttgcagaattttattaaaatactatttctcaaaaattgattcaatatgtatcaaaaataaataaatcagtataaaaagaaaaaattcttactaatatttttttatgaatttaaaaatgttaattttatttattaaaaaaaataactcaattttgtcatttgatgtttttttagcttgaataaa

SEQ ID NO: 16072 - DNA, 928 bp, Heterodera glycines
gctcaacttcgtctcccatttcctcgaaaatgctgcgagatcgagaacgacggagatgctcacgttcgccaaaatcatccaacttaaaaattattttgtctaaaaatcattttttgaagatggtatactaaattgtcaaacttccataatgctcaataactgatttcaaaaataaaaattcaagacccttcaaaaaaccacaaaatgagtttgtcgaactcgatttaagtaaaaagcatttaaagatacatcccaaagtgcttttttctaaattttccatttcttaccccaccagcggccccagaatcagcgacaaagtcaaggccagtgcgactggaagtttcaaagcggtcctcgcgcaaagtaatgtcatcaattcggctttgattcggctgatagtcttttatcgggcccaaatcgaagtcatggatttcaggcaaattgtcataaaagtcggtgatcacctgatgacaaaagagatccatcgtgataatctttttgatgaaaatgaataaatttctatgcccacctccggaatgtcgttgttggtgctgttggcaattccgctggtccctccactctcccgtggttctctctctcgcaaatcgtggtcccttgcgctgcccccagtcgctttgaatgccattttcagcttcagaaacgcctcgttgcagtcagtcatcacataatgtgccttttttgagtaaatgcgcacaattccgagaagcaaatgaccggtggttcgaagtgaaagtttaacctaagaaaaattggtaatttacggttatctgtgcggagattttcagaaaaattttttttaaagaaaacttgttttaggggttttcagggtcggggaaaccgattctggcatccatttaaccaattttaaataattgaagcgattttatgcataaaatatgaatttttt

SEQ ID NO: 16073 - DNA, 2062 bp, Heterodera glycines
gcgactgatgcgacgactgtcgttgtcgcagttgtggcatcgtctgttgttcggtcgtcggacttctgcaaatgcctttcttcgggggcctcggcggtgccaccgacctccggcaaagagttgcagcatcctccagcgcccatcataaagttggacaacggcgactgttggtagggcatttgctggtgccgacccaacggcggatggcttcgaggcggaatttggggcggtgtctgaagtgccaaaatggtcgaatttggactgcaactcagtagcaaagacaaaaaaaaagtatgtgcctacttccggtgttgtaatgccaatttccacgtggtcatccatcgtccgaccagttgaggaaggcgaggaacactccggcgggtaaacagcgggcaatttcttgcgagcaagcggcggttttgccaacggaaaggcgggcaacgcggcggacagcgatgggccgagctgtggcaaagtgggcggcggtggctgtgccactcgctgctgttggtgctcctcaagtggaagtgataacattgccgacatttggtgatgtggcgccggagccggcggttttcgaaacggttccaagtggtgaagcctttgctgctgcgattggtgctgctgagcggcgggaggaaaagtgaagtgcgactcgccagcggaaagcggcgccggaggccgtcgtcgttgctgttgaagtaacgcggcacttggcgatgtcggcgaaccgcccgaggacatttggcggtgctggtgaaaagtggcggcagccgcggcggtgggagcgtactcggagatgaacgcggcattgatgcggccgcaagtatcaccaagccatcgagggaattggccttaatcgaggaaaggcaattaattcccatctcttttgactctcgacaatctcacccggactgatgtcaacgatggcaaagttcgggtcctcggccaatgccattgacatggacgagccggaagcggagccagcagaagccggactccgagtcggcacattaatgtgtgacggggacagcaatgcaccaccaccaccaccaccactgggcgcattgcacggcgagtggggcgaggaggcggacgattttgcactcgatttggccgtagggaaacgatggaaagtgccgccgctgctgccactgatcggagtcttttgctgcttaacaccgggcgatttcaacgcttcgggagggtgttttggtttctgaaataaattttgtaaaatcatttttttacttagttttttaccgcatttggaatttctccatttttcggttcgactttatgtgattggttgtacaggtaattctcgaggtcgtctttgtccttaaagccgttcaaaggattcagcgactcgaggaagtgctgaaaaggacaaaaaattaaatccctttttttgattcatttctgaggaccataaatcgcccaattcgtccaattgtttcgtttgttgttaattttcgtcggggttttttctcctcctcaacaatggaggagaaattgtacttaggccgttttgagacggaattattaacacggaatgatgaaaaatgttttttggcaacgcaatttgccgttatgttgaagcaatcgggcggcggttcggaagccgctttggcatggaaaggtttgcatgacggagaagcggctgacctaatgaaaagcaccgtaaggggatttggacaaagaaggtccttttataccacaccattttctgtgccaatttttgtccgtttctttgctgcgcggcgtttgtgccgacaatgcctctggcgccgttttttcggcaggcaatttgccagaggcaaattttgggtaaggaccaacaacagcagcagaagggactgccgatgttgcagcaaatagtgattgtgctgaatcagcttccggccctttggcatcgaataacaaatagtcgtagccgccgttgtgaggaggcaaacaactgctgaagatgggttcagtggcaccgcagaacaaagagaacatggccaccattggagcgattattggaccaaatggaagaacaattaaggacgacaattga

SEQ ID NO: 16074 - DNA, 1225 bp, Heterodera glycines
tgctgatcacttcaattagcagtgatcgagagtctcggactattcctttgcctacgagttcctcttgaccaatgctgatcacttcaattagcagtgatcgagagtctcggaaaattctttgatcgagagtctcggaatagtctttgacctcgagttcctcttggccaatgctgatcacttcaattagcagtgatcgagagtctcggacaaagaagtgatcgagagtctcggacaattctttggcctcgagttcctcttggccaatgctgatccctacaattagccgaaattttcagaaaattctttggcctcgagttcccctgggccaatgctgatcacttcaattagaagtgatcgagagtctcggacaattctttgatcgagagtctcggacaattctttggcctcaagttcctcttggccaatgctgatcacttcaattagcagtgatcgagagtctcggacaattctttggcctcgagttcctcttggccaatgctgatcacttcaattagcagtgatcgagagtctcggaaaattctttgatcgagagtctcggaaaattctttggcctcgagttcctcttggccaatgctgatcacttcaattagcagtgatcgagagtctcggacaattctttgatcgagagtctcggacaattctttggcctcgagttcctcttggccaatgctgatcacttcaattagcaggatcaagagtctgggaaaattctttggcctcgagttcctctgggccaatgctgatcacttcaattagcagtgatcgagagtctcggacaattctttgatcgagagtctcggacaattctttggcctcaagttcctcttggccaatgctgatcacttcaattagcagtgatcgagagtctcggacaattctttggcctcgagttcctcttggccaatgctgatcacttcaattagaagtgatcgagagtctcggacaattctttgatctcgagtctcggacaattctgatcacttcgattagctcttggccaatgctgatcacttcaattagcagtgatcgagagtctcggacaattctttgatcgagagtctcggacaattctttggcctcgagttcctcttggccgatgatgatcacttcaattatcagtgatcaagagtctgtggaaaattctttggcctcgagttcctcttgggcaatgctgatcacttcattagcagtgatcgagagtctc

SEQ ID NO: 16075 - DNA, 929 bp, Heterodera glycines
  unsure (1)..(929): unsure at all n locations
gatcgagagtctcggacaattctttggcctcgagttcctcttgaccaatgctgatcacttcaattagaagtgatcgagagtctcggacaattctttggcctcgagttcctcttgaccaatgctgatcacttcaattagcagtgatcgagagtctcggaaaattctttgatcgagagtctcggaaaattctttggcctcgagttcctcttggccaatgctgatcacttcaattagaagtgatcgagagtctcggacaattctttaatcgagagtctcggacaattctttggcctcgagttcctcttggccaatgctgatcacttcaattagcagtgatcgagagtctcggacaattctttggcctcgagttcctcttggccaatgctgatcacttcaattagcagtgatcgagagtctcggacaattctttggcctcgagttcctcttggccaatgctgatcacttcaattagcagtgatcgagagtctcggacaattctttggcctcgagttcctcttggccaatgctgatcacttcaattagcagtgatcgagagtctcggacaattctttggcctcgagttcctcttggccaatgctgatcacttcaattagcagtcatcgagagtctcggacaattctttgatcgagagtctcggaaaattctttggcctcgagttcctcttggctaatgctgatcacttcaattagcagtgatcgagagtctcggacaattctttgatcgagagtctcggacaattctttggcctcgagttcctcttggccaatgctgatcacttcaattagcagtgatcaagagtctgggaaaattctttggcctcgagttcctcttggccaatgctgatcacttcaattagcagtgatcgagagtctcggacaattctttggcctcanagttccttcttggcc

SEQ ID NO: 16076 - DNA, 1471 bp, Heterodera glycines
  unsure (1)..(1471): unsure at all n locations
ctttttatttttcaattntggcccatccctgatatatatttttctacacctaagattatgtatattcattcccttatattcctttatagatattttaaaatgttatttataatttatacttaattttcatttttagcatgaaaacaatatcttaaaaaattatctatgattgatttagaaaaataatgaaattgacaaatagaaacttaaaaacactaagttactaattttcaatttaataatttttttgaattttaagcgcaatgaatactgaaaatgaaattattaaaaaatatacaaaaaaagaggattaaaattgcgcctgatgtcgattgtcctcgaaataaaattaaaaaatgaaaattaattgaaattttaaaataagtttatattgtatgtcgaaatgtcaacaaacttaaaaaaacgaaaaatgttattgtaaaaattatgcttattttgatgaaatacccgatgaatttaattaacaaaaaatgaatgaaagattactaaaatttaaaattataccttaaaatacatgcatatcaaataaaaaaataaatataagatatattttttgatttttgacttttttacgaaaagaaaaagtttttaaatcctgaatttgatgacaactttaaaaaaaattgaatacaagaattagaaattttgacattttgacaacacagcctgaaaatggatatactaaaaatttcatccgcctcgagaaattaccaaaaaaataatgataaataaaataattttacatttatgaaaggaagagttggcttgtaaattgtacaaattttataatgattattatatatattttttatttatggtttaaataattgctgttcgccctattcgaaaatagcaagttttatgcgttaaagccacagaaatcaaaaataaaaaaatcgaaaatgataagataaaataaaaagagccataatatttatttagtttttagtaatatatatttgaaatctaagaatacaaaatttttccattataatttactgtaaaagcgcatacaaaggacctcaggtgtccgtagagtttcggaacctaatttggtagatatgtagagcgagcacacatgggtttttaagaaaagtggttttaatttttgcggaatgagcctgagtgccaagatatgacgtgccaaagttttataatgaataaacaaaccaaatagttatttgtgacacagtgcagtgtccagtcgtttagcggtaatgcgctaatccgcgttttttaaccccaaggttcggatcccttacacgcaaactcattttttaattttaatttttgcctttttatgcaatgcaaattatctaaaaaagattttctattaacaaaaaatttttaccaatttaacgtataagatattcaataaaaatattagaaaaaaaaatttatttttaacagaaaggcatgtataaatcattgcatattaatcttaaatgat

SEQ ID NO: 16077 - DNA, 2332 bp, Heterodera glycines
caaagaacataaacaattatttcttttctataattatacaaagccaaaaactttggcacgtcatactcgggcactcagactcattccgcaaaaaataaaaccatttttctttaaaaacccatggggtgtctctgtctcttatccccaccaaatttcattcgcaaaccccacggacacctgaggaccttcctttgttaggttatcaaatttaaaaagagcagcccggaacgaagaaataatttaatgaaactctaaaaaagtgtcttggctcccactttttctattcgaaattttctcaatcccataaaaaaaatcagggatccggtctgggcccggtcgaatacccgattccgtgtataattaatttaatttaattcttaataatttgaatatttacaaaattgagataaacgaatttaaagtaatcaaactaaatcgcgatcattcatttatccatatgtaaaaaatattattcatagttagggttgtcatttttcaattttcaccttttcatgaaaacagtgatcctaagtgaaatattagtatcatttacccaattgaagaaagtcttggggaatttcgtaattcgtatgaatttggtctaggtgtcctcccctaccatttatttgttctaattgcgagcaagaaaataagaaaatgtaaactatttgacgtattacttattaataaaataattattatacattcgaatataaaatttattttaatatacattggaatatcagacccttaaaatgaaaattttttattgttattgataaattgagctcgttatattttagtaaaaaaatttacattaatattatttttttatccttaccagttccacaataattatagtaaatagcaagtaaaatcacaaaacataaatgttaggattttaatttaaatattttgatcaagtacgaattttcacgccctaacagaaaaaaaagttaagactacctaaaattttaatgaatttattaaacatatgtaaaaatatgattgatatttattcttaattaaaattttatgtgttcaaataaattaatgaagtggaatgttaaggaataaattaattaaaacaaataaatataattcattatataaatcaaataaaaataaaatctgtaggcctttaatgcgcacaaaattcgaccgaattgggcggcataatagattaacaaattaaatggttaactcttaaaaaaaaattaattttgattattgcatttttttcaaagatagctaaaaattgaagcacaaaattttgataatgtaagacataagctaattaaattgccgaagcatttaagcacatttcacattcattttaatctttcttttcattttcattttaatttatttattttcccgttagcgatcgatccgacactcctcccctttccatttatgtctatttaagctgtgatctctctattgatattcacttaatcatgattatgtagtttatttaatttatgtaatttttgtgactttatttaattgtatttaattgtaattgttatttaaatatttaaattcattgcgcatttattttatttatttgttttgattttatttgtaattgttttccatgcttttcctgaaataaagccagtccagaatggaattggaattggaatgagttggggagggaagtgggattgatcaccccaggaccccctcataaaaatgattggatttctaagggttgggagtcccaaggcctaattcagcacgttccactggcatgtgtgttattataataaataacgcacgttcaaaaaaattaacttgtaaaattttaaattaaagatgaaaaaataaaagtggagctaaatatttgagagaaattaaaatattcaataaatgtttttttccattcgatggaatcaggaaaatttattattctaaatgctgactccttcatttttttatcttcttttaatgaatttaaatatttacatcaacagaaatttgatgattttaatttatccgtctttaaggcgaaaataaaacattttatgactcaaatgaatattattttaaattctggagagtgttgcgattagcaagaggaatactaattaattatttattttttgctacatattctttacctatttcgccgataaaatcaaaattgcgcaaaattaatttatgcaaaaactttgttttaactggtttcaaatctgagaccagggacggtctaaaaaggggtatgaggtgtaagacataagctaattaacataaattgccgaagcatttaagcacatttcacattcattttaatctctcttttcattttcattttaatttatttatt

SEQ ID NO: 16078 - DNA, 2926 bp, Heterodera glycines
gggggggaggacgaatgtgagggagggacactttgacctgctgacaattcatccattctttcattcattcatccgttgctcatccttatttcctcctcctcttcttttgcctgttctccctcttctcttccttttattccaagctcattcattcgtgcgcaaattgctttccagcattcattctcgataataaattgagcagaacacgagagttattgagggggaggggagggaaaagggaggggaagagggaagaaagggaagggaagaaggaaaaggggaggggaagtaaagaagggtgaggggaaaagataggcgagaaaggaggggaaacggaaaggaaggggtaaagagaagtgaggaagaacaggaggaggaagagaaggaggaggagcagagagtagggtgagaaagaaggagcgccgaatgtctccagcagcacatcagcagaaggattaacttacacaagcaatttacgggtgggcaaacaagtgccgaagggtgcgtttgtccaatgtccccttttttatgcttttcccccgtccaatgcaaatgggaggaggacactcccctccctcacatccattctcggctcggcatttattcaatcgttcgctgggcctttcgctcgtccattgtccgtgccatggcattggccattggcacttttcgcagcactgtccaaatatggcttggccacttctgcttcttctttctctctgtttcgctctcgctgttcagaggactgccgcaaatgcaaaggcagagaaaataatgtgaaaacatagagcattatccctctctctttctcttcttgtctctaatctcatcaaagcctcatttggtgtgaaaaagcatcacttttttaaataattccattggattcccaaaattgcttttggtaaaattcggaaataaatgtaccgcagcaaaagccacaaataaatttataatatatatgtaaatattgtatatctttggacactcaacgcctttagacctgtaataatttagtctaaaatgcaagaaccaaaataatttctttatggaagcgcccgttataacgcatgtgatgacagagcaaaagtgtggcacccagcgagcggcgccccacttattgctgacgctgccgtagtcgactgtcccgtttttggaaaaaaatattctcacgaacgcaatttcaattttgccacttcactcaagcagactataacctcaaaaaaatcctacgaattcatatatgcattaatgacagagatcaattagtgtttgtaggacattcatgcgctttacaattcagtaccgaaggtattggccacttaagtcccgcatctttggttcctcggcttcttctgatcatttccttattattttcccattgatcactctctcctctctttctctcctcctcatcttttttgactactgctgatcacttttctctttcttcctctctttctctgcctactctctcctcctcgcccattcctttcggctggctgatcgctgcttctccgttcacctcttcccaatgtgatttatccgtttccttcgccacaattctgctgattgtgagttctgcactttcttcgtccgtccgcctttttccgttcccatcggtgccaatttgatcgaatgaattggtggcactctgatgagttgccaatctgtccgtcgtccttcctcaacaaaatgtccgaaattggctgttctgctggccttccctggggtgatgggtcccccgttgcccttctcccccctccccccttggcccatctccgccaactgtgtttgtgctcgctgctgattcggctcagctgtcaaacaccgatcggtccgaccgaccgggctcgtttatctccaaacaaaaaacatttgatcgattgatccctcccctaactctcccaccaaaatcactccctcactttcgccctccccacccgcccccactctgtacaaattctgcgtacattttaaggccacatacaattttattgctgagatttctccaaagggttggttatcaatagggatcggattttgaggtgcttgaaatcaaaaagtatactaaaataagtgcataaatttaataaatcatgaaaacccaaaaataattgctaaatcagtaaggagggggcttttttactcatcggtgacagttttttgttgtcaaatcgctggattatgaaattaccattgaaaaataattaatttgagtttgccttgttttattgaaaagttaattagcattaatggccaattttaataataattaaatgtttctgacttccgttttttgattgagttttaatatttaattcattttaaaatttatgaagggacatttgggcattttctttttctccattttataatattttatttttaatgcaatgtttttgtgttcagtttcgtctgtacattttcttcttgccattcccgaatttatctttttaattgttttttttcttcaatttaatttggccgaccaataaaagaccaatcgcaaaaggatgagcaaaagcgagtgagttttatttgtggtgatttttcataggaaattttgcttaacattttccactggtcaacattaacaattaggcaatttttctcctcttctccaaccacaaagccagccccaaaaaagcattttcagatcattcattcattagccttgtccattctctcccatttccattgagtgatctttcgggggagggggggggggggggagaagcaatagcaaaagcattgtccgctgcaaatgcttaataacaaaagcagcaaatgttgtgcaaattgggacaatgacaatgaatggacaaatggatgaacgaatgaacggggggagggaataagccgatgatttttgcggaccgagggggggggggaatggtccaacagcacaaggaatcactcaaagtca

SEQ ID NO: 16079 - DNA, 2335 bp, Heterodera glycines
ccgcatgctattatgtggaggacatggagcaaaacagcagtgaaaatcaaggttttatgaaacgggcggcacggttttcggatggtcgaatgtgtgaaacaatggttaagctgaattttgatctagcgcatcagaatgcacggatgcttaacaaccaagacattgtgttcacaattcaccgaaacagcgatgcgcttcttctgcaaacgccgccttggaagaccgtacatgctgatggtacggaaacatggaacgaaaacactgatgagtatcgtatccggctacacgataggcgtgtttatgtgcgcacagtagacgcaacaccaagcctgaaccttgcaattagtaaacaattggagaattctttcgcaaaatacgcgcttcgtaagggggaaatgcgctccgtctttttgggaacaggtcgaaccgagctgtcacataacgtgttcacctcaacgctgcctcgccgcctgatctgcacatttgtctcaacggatgcctattccggcgctcgtcatctgtcaccgttcaaatttgagcatgcgcatgtgcgatcgctcagcgctgaggcaaatggacaaacatttccctccactccgtacctgttttcgttcgagggagggcctgacaacaaacaacaacgcttcatacgcgcattcgtggacatgtatgctggccttgggctcgacgaaacagacaacaataaaacagtgtcaattgatatgcaacgattcttaaacggatgggcattttttgtgatcccgatgacctccaccctagaggatacggcaggatttgagctaatccgtcagggtacgtgcactgttaaggtccaatttgagcagcctataaaagcggacggttatgaaatgttgatcctcggcgagtttgactccatcctctccattaacgcagatcgtgtgctcagcacagacggaagtgtataaataatctggacgcttgctaaaatgaattcgttgcaaattcatttaattctgaacagattacaaaaaactaagcataaatttattggcgtcttcccgtccaataaggttccacttgaacgtaaaagattccctcactgtatggtaataaacactggcagagagggtacaaagggtgaacattggatagcatgttacgtgtcaaatgcacgtactgttgaatattttgacagcttgggtgctgaaccgaatgcggatttgtcatcatacttgaacaatttttcaaaaattcacataaacaaagagcaaattcagtttgtcaactcggatgcctgtggtcatttttgtatttattttctggtaagcagatgctcaggaaccccatactgtaaagtgatggaaacgctacgtcgcacacgaagtgttgcggattttcttgccaaatggtttgtccgaaacttggtaataagtcctgcgctttaaacgggactgagatggcggtgttgtgacacgtacgcatacatgtacactatcccttcatgtataaaagggcgggcgattgagcattgtagcaaatcgctttacagaaaaaaaataatgatttttgcattaatttggcttctaagcattactatttgccatttgtctcggggcgaatggataaatgttgagctgagcgttgacacgccaaatttttttgacggctccctaagatcgttttccaaacactcaccctctgcctatctatttgggtacaatcgcaacacagcctgcacagttgaaaggataagaaatgtcaatctgctatacaacagcgatgctatgtggcgcatcacgctgactgatgttcacacattcatgcgcacgggagagacaacaatagaactgacacctgacgcattgccattggcatgttttgaacatggcaatcacaacttttttattttcgacctaaaaaatggagcaaatgaagtggcagtgatgcgtggtcaaaaacaaaaagttgcacatcaactggcctcatatggacgcgtattatttgaccacatcgatgctcggctgtatttggtagacaagagagaacggcgcatcaatgagctgtccatctcagacttggcgcaatggtggctgatgaataacactgctgctgctgctgttacaggaaatggcaataacaacgctacacaccagcttcgaagcacttttgtcggattgttgcccgagcaaaaaacggattatttcattgcttcaaatcatgtgtacctgattaggagaagacgtgtgtataagttccgactaggtggctaccataatcagtcattctcacagctccagtttgtgaccaactccaacgacactcgtttcaattttcttctgttgaagaaaaggag

SEQ ID NO: 16080 - DNA, 2441 bp, Heterodera glycines
  unsure (1)..(2441): unsure at all n locations
tttatatttccgcaggggttttagaaaagagacagaattagcataaaatagcgacacataaagtgttggccacagtgccgtacagagactgcaaaggcgtgcagaagacttccttgcttatatatttccgcacgggttcttagaaaagagccagaattagcataaaattagcgacacataatgtgttggccccagtgccgtacagaggctgcaaaggcgtgcagaagacttccttgcttttatatttccgcacgggttcttagaaaagagccagaattagcataaaattaacgacacataatgtgttggccccagtgccgtacagaggccgcaaaggcgtgcagaagacttccttgcttttatatttccgcacgggttcttagaaaagagccagaattagcataaaattaatgacacaaagtgttggccccagtgccgtacagaggctgcaaaggcgagcagaagacttccttgcttttatatttccgcacgggttcttagaaaagagccagaattagcataaaattaacgacacataatgtgttggccccagtgccgtacagaggctgcaaaggcgtgcagaagacttccttgcttttatatttccgcacgggttcttagaaaagagccagaattagcataaaattaacgacacataatgtgttggccccagtgccgtacagaggccgcaaaggcgtgcagaagacttccttgcttttatatttccgcacgggttcttagaaaagagccagaattagcataaaattaacgacacataagtgttggccccagtgccgtacagaggctgcaaaggcgagcagaagacttccttgcttttatatttccgcacgggttcttagaaaagagccagaattagcataaaattaacgacacataatgtgttggccccagtgccgtacagaggctgcaaaggcgtgcagaagacttccttgcttttatatttccgcacgggttcttagaagagagcgcagaggcagggagatgggccgagcggtgccatcgccggtcgttcccattcagcagcagaaaaggacgaccccgaggcgcttccccctccccttccaatgccctcccgtcgtgccctgctcattcactccctgccaatagcccatcggcagtgcattttgcctatgccattttacgttccgtatttgccacaacttttgctacattaaatatggcccatttgcacaaccatttaattttgccaattttttaaagcacataaaatcaaaggctgtttcccctcaaatgctttgtttggtttgtgtttaattaagcctgtaatccgatgctttctccgatgggccaggcgggaagcgtggggggaagggtggggagccacgcatgttgtggtacacgcatcgattatggaagccgcgcatgcactagcaacgaagtccttgcgcgaagcgctcatgtaaatgcatattctttcatctctcacaagccaactgtctacaccgagcaattctgtgcaaagcatactgtctacaccgagcaattactgcgccacacgctagtttatactactatagagaaacgttgcagttcgtcttaaaaactaatttgagtcgaacggctgtcgggaggggtctgaaagtggtggaagggtcttacaactttttgaggcgcattcaggaaaactataggttttccgctccggtggccagttgagcgccagcggcgctgaaacggcccgaaaatttttttgtccgtctttggtggcctgtaactttgcgggaagaagcgggagccgaaaatgcttggaggtaggattttaagttggaatgtttgggaaaacttggcgcttatttggcggggctatctgtaaatgccaatgctgcagaaaatggcaaaatttggcacccaatttcggcattttcagtttttcgggaataactcgctgggggttaagcggagcgggttggcgccgcttgtgcatttgtgtagtttttaaagctgcatccgatggcgttttcagattttgaaaattttcaaaatttttcgagctaggccccctcgaaaatttttcgtttttgaattttattattttttgccgatttttcccaggaaaacggagaccactttcaagcaaccgtttttcgagctctatcgattggtggctttttgaaaaaatttcaaaattttccggaaatagaaaaattttttggcctgaccgngacatttcagtccccggcctataactcgtcaggtgtttgatttaacgaaaaatcgtccaagagcttttttgtagagaatttcgagctctatctaatgtgcttttatcggtatttttatctttaatataaaaaaaaatataaaataaaaatgaattttaaatgcaaacccaagggggaccccatggattttgatttcatgaaaaatttttttgctcccaaattggccaaaatactttt

SEQ ID NO: 16081 - DNA, 1894 bp, Heterodera glycines
  unsure (1)..(1894): unsure at all n locations
tagcatttttaaattataatattatataaaatcaatacctatccataattctaagcagtatggtaattacgtaatttgcatttaatgcgcttcattacaacatctcaattgccactctctccgatgccaattttgcctctctccccaggtttgatgccgatttgtatctccattgcgtcatctcatttcatgccagttttttctcccccttcccgattttcatgctaattttgtctctccccatgtttcatgccaattttctttctttccctctctctaacactctctctctccgatgccaattttgcctctctccccaggtttggtgccgatttgggtcggtgccggtttgcttcatctcattttatgccagttttttctcccccttcccgattttcatgctactctcaccatgtttcatgccaattttcttcttttcccttgtttcatgccttatttcggccctctcattgtcatgccaacgtgggatttattgaaaaataatatgcaggataattgtgcataaaaagcaattgctgtttcaaattggcatcattttttttctcatttttgacaatattttgagagatcgttatcattgcaatgccaatgcattatcattatttctttatttcttacatattcatattcatttttattaaaaatataagcaaaaatttagggttttttgaaattgaaatgttttccacagtttcatttgcaattatattgattatagaaggaggatgaaagtttttaaaaattaagcctaaaattcaaacataacatataccagggttaccctttgtccttattttaagatttgtccttattttgagggtccaaatcttacaaattttaaatgttcttatttgtaagatttgtccttatttaagctctttgtccttattttagtcttattttttttgattcagagagaaatntagattttaaatgataatttaaaagaaatgtttttgaagcgaattaatatccaaagtctttcttttgcttgaattatttactttatgcgtggtccagtgggttgtgatcttggttatgttcttcattttatcgttggatcagttcccctccaatcaattttttttcttctaatttttcaaaattattcctttatcgatggaattcaatcataattctaacatttaaaatcaaaaattttgtcatttttggacaaaatctattaaccaagtgcacgaaaatttcaaaattttcgccggcggcgctcccaaacccctatttttcttaaaaaattggctaaaaacagcaaaaatttggaatttttgacaaaatctgttaaaaattgcacttaaattttaaaattttttccggcggcgcctaccggcaccgccggacttccccccgcctaaagaaagtattttgaaaaaatgctgcaaaaaaaagccttttgaatgaaaaaccgcaaaaattgatcattttttgatgaaaatatgttaacaaatcagaaagaaattacaaaaaaattttccggcggcgcctatcggcaccgcctcgaccccatccccgtcgcccattcctcaaaattttttggaaaaagcatgctgcaaaaaaattgttaaaaatctgattttttgatcccgaatgaactgaaaataatttacaaattgcttatgttttccacaaaattgttaaaatccattttcggaaatgtataagtttctcatttctaagcagaaattgctcagaaaataattggcggcgagaaatgttggtaatgcttgattctgttgaataaaaatgcgatttaatgttttggaagcgtgttttaaaaaatgtccttatttttgaccctaaaatcttatttttgaccagcgatgtccttatttcgggaaattttcaagggtaaccctga

SEQ ID NO: 16082 - DNA, 1996 bp, Heterodera glycines
tgaattctctaagaaaaaatttacccggccattttgctgttcgcccgcagcagcgtcgtaatgcgtcgacaggactcctacaaaatttttgtgtttttaaaaatcatctttaattaattcaaattttacctgtgtcgcttccacacagtcccgtctcagtctctgctgaaattttgttctggtgaaggagcacaatgagtaaacttaatgaatgaagtttaggcaagccatcccacacaaagggaggaaaaacaattttgctttttatctaagttttactttacaaacattttttacaaatcgaaccaaaattagttgaaattttcaataaaataactgaatttttcagctgttttttcaaaatatttaaattgcaatgtggacaaaatccgaattttcagaagagtgcatctccgcccttctccgttgttaatttcaaaattgcatcctttctttcaattcttttttgtttgataaagtcggatcaaagaacatcaattgggtcaaagctccgatttcttgcgacgcaaattggccaaatttcacgggcaactcggttttggaatgattttccagtgttaactcaaaaggataccccaatacgtttttttggcttggaacgcaccggaggagagcccttttgggtttgaatccgaaagtaatttaagcctaaccctaaattcacattaattatttatcaatttgttgcacattttcctcaaaattcgattttccatgttcttttgctgttcaccaaatgctgtctcaaaagaaccaacaaattgctgctgataatgaacaaaattaatgcgtcagtggaaattgtgtcagtagaaaatgcatcagtagaaaaaagtcgaaagtcaaaattttcgaaatttggatttttcttccaaatcggtttaaatactcggaaacaaactgaaacccatcaattcttcaataagagatcatttatgccgtttttgaaccaaaaatgctaaattcgaaaatttggactttcgaatttttgttcggattccgtccggggttcggaatttgaccgaaatggatatcggattcgtgatcagtgattctgaaaacctaaggaacttggttttttataacaataaaatgttcgctgacgcattttctactgacgctttttccactgacgcattttccgggcgccacccggcgccaacgccgaaacgacagcgccgaaacgacccgttctccaaaattaaataatatttatcgtcatcaagatattaatttcgcaaatatatttcaattcatagagtcaaactcgaacttactggactgacagtgatacacatgggaaactcttttttttggggggggggggggcggaggtgccgaaagactataaattgcaatttttgagttttacaaaaaaaaacagcataaatcaacaattttgaaaaattttcgctttgaaatcattaattaaatggagggactaattaattaacaaacatataagcaattaagcaataaaatttcaaggaataaaaagtcacagactcaaaaatcaacatatcgccataaatttaaaaaaaagagattaaattcaaaaatattggcaaaatgtttaacaaagattttttaaatttttggccattttttaaagttaggggaattttttttttgaaatgtaggctaattgagaacctttagggctgttgaatagccaatacgagcaattacaattaattattccccaaagagccgggctatcgcccagttaaaatccacaagttaattagtgggagaagaagcaaaccaatgcagcagaaaaggccgtgggatttttaagtgaaagctttcttaaaagctattcaatttcgttatttatttttgtcagttagagaaatggcttatattgtatcaaacgagtttaaaaaggaaaaaatagcaaataaaattaaatttattaatttttataacaggtggggaccttaggctaaataaaataagtgagaattttaaattt

SEQ ID NO: 16083 - DNA, 2824 bp, Heterodera glycines
agtttccgactcatttcgttttttgttttcttaaggaatgcttttagaccggcgcaggcggaggaattgggcgtacttatgcacttgaatttgcacgcagaggtgccaaagtgataggttagtttagataatattacaatggaaaatgttattacaaaccaagtgaatgacttgggaggggaccgccacggaaaatccgcgtcgacttcggcagcagacaaagtcgtagccgaaatcctagcggcaggaggaaaagcggtgccaaactatgacaggttggccatgggaaatggcaccctatgaagcagccaattggacagtgttgaaaatggagacaaaattgtgaggactgccatcgataattttggtcgaattggtcggtctttataatgcacaatatgtaaaagtaccttcttgggttctcacttcagatatcgtgataaacaatgctggcattttgcgggatgtcagttttggcaaaatgtctgagttcgattggggtttgtcatttttatgcctttggcaattttttaaatgtttctttttttatattgatagattcggtaatgaaagtccacgtgaaggttctaattgttctcactgtcttaatttctctgttttacttttcctaagggtgccttttcggtgactaaagcggcgtgggaacacatgcgggcgcaaaagtacggacgtttggtgtttacttcgtccaattcgggcatttatggaagtttcggccaggcgaattatgcagcaggtgagacgaaaaactgaaaaactaacgggttggcatgaccaaaaaagagaccgatggatttcaaggagtagtcgaaaatggaatcttgaagaaaaaaaaacacacatcataaatacaaatattttaagttcaatgactcgataaatagtgcagcaacccgctgaaacgccttggactaattttaattgtttagcgaaaatggcactgattggtctatccaacactttggcgttggaaggagcaaagtacaacatcgccagcaatgttttggtttgtattcccactatattctattaattttaattgctcatcttcctcattttgaggtgccaactgctggttcgcgaatgactcaaacagtgatgcctgaagaattgctgacggcgatgaagccagaatttgttactccgcttactgttttcctggcacatgaaagttgcaacgccaccggaagagtttttgaagccggggcggggtggtatggcacaggtcaatgggctgggcttgggggatagggaaggccaaggagcggaaaatggccagaaaactgtcaattatttgagcattttggccaaccaacttttacataaacgaaaattttcaaaagttagaaaaatctatgtaatacaaaatttttgaagcgctttcgaaccgtaccaagaatgtttaatttggtttgaaaaaaatcgtgatgcggtcgacgttttgttcttctccgcttcgaatcacagtgtgaaaatgcgtttgtttttgttttagttgagcagttccgttctcgaggaaaagttatcgcagaaccaaccgtggagaaatgtcagtttgacattaaaaatgcgcaactttgacaatttttttcagtggtcgaaaattgggaggaaatttgcgatatgagtggggcacagcacattgggagcatgcgagaagtgatggagaatttgatggacgccctcggggtgaacaaatccaaaatgtgatatggcctttaattaggccccgtaaagccggtaattaacctaaccaaactttgtagattctgagccaaattaataaaagtgccataaatgattttttgagatgattcaagaattttgttgagaaagatattgacaacggctaaaaagttgaagggtgggcgtgggaagatgggatattcggggcacgaccggacatttggacaatgggcatttcgacagacaacttccgttttcttggcttatatcgactgaattttagcattccattttcctaagaacttcaaaaaatatttggttttttactaaagtcatttttattttttaaaaattctttttctgtcgtaatgtccgctgtccatttctgtccgaatgccattggagcattcggggggagtcgaatcgcgaggctttgcccccggggctttgttccgccgtttgccgctctccctgctgatattcttttctttctgctccctccctcggcttcatttcagtccgctgtgctgcagtcggctgctcaactgttccaccatcggatcactgctcgcttgacggcttgtcgagcgccgaatttcctgccaaaacaaattgaaagcatttgcattttgatcattgcaattgtcggcttcgcttttacttcgatgcgttgttcgaagttcgaatctctcgaactcgcactcatcgattgctgctgacgattcgcttggcgttgactttcggtcattgcttaaaagcgattgttcgttacgctgtcaataccaaacaatgacagatcagagaatgatccgctcactttcgtccctcaactgttgcacaaatttcaatggacttggcacatttggcggggatgtgtagggcgggtagggcccgaatctgtgattggcaattgtccaaaagaggggagtccgtcccatcgatggcttacgattcctctacggtctgtgtgtagtgttggcgggtgattgtccgcgtggtctccaggctcgggtcgatcactgtcacgggcgttgtggtcgcgtattggtggatcagctcgcgtgggttcgtcacccggtagtccttcttaatctcatagcgcattcccggctcatat

SEQ ID NO: 16084 - DNA, 884 bp, Heterodera glycines
cccaatccgttggtcgcaggggccttgccgaagtccaacggagtcgaacggcttgagccatcgtatggtccgcctccaccgttcggtcttcccgctccccgtccccccattcgcggcccaccgtctccctcccaatttttcggatgtcctgctgctccgtcttcggcgggtcctcttttccagtccttcggtgccgttccggtgtctcctccaaatccgtttttggttggaggaggagcggattgtgccgacgttgggcgaacggaggggcccagctgatcagcgaggctggcgaaggcgtccggctccgatgcgcgcgacccgcgccctgcgtccgaagcgggaaattcattggggttgtcgctgtgcccgtagcctttcaacgaatcctccgtgggagcttcaaattcaattctaaatcctctaagttttacgttccaattgacctcctgtgctccatgtcttctccgttatgcgaaccccgggccttcctcggtcacttttctcaacaattctttgttggatcacttccacctttggcgtaagatcgcgcggcaatcgcttcaattcgactccgtcggcggccaccacaccgtcgccgatcggagcatagtaaaagcgtcgaggctttatcgatttgttgacaagcgccggatcagtcacaagctgagcagagaaagggagggatgagagacggaattcggattggtcgggtgactaattaagtagtggtcactcgctaatctcaaaatgtttgatggttcattttcttagtaagttcaagccaaatcacctctcctcccttccatagcgttggcgtgtaagcaacgcccgaacccacgcggtcgccgtatccggaaaacggagtttcccgttcctgtgaa

SEQ ID NO: 16085 - DNA, 3219 bp, Heterodera glycines
  unsure (1)..(3219): unsure at all n locations
tttattcgcctcggggggggggggaggaaattagccccttgaagttggacgaaaaatgtgggagagatgcaaattgaaggacgaagcaacggaattgggtgggcaaatgcaacaaatgacaaggaaatgagcgaataaaaggccaaaggttggcacagaataaaagcaaaaattggggggaaatgggaaaaagacggaatcagaacaaaattaattggcaggcagagaaaggcgggcaaagattggggggcaacccaaaaaagggacaaaagcattttcgtaattatcatttgccgggcttcccccccccccccccccaacagctagctgcatattcaaatgcccaaactaacaattagcatcgatcgatgacgggagaattcaaatttctatacttagcatttgcctcaattttttgaacttaaattaacaaaaaaagaatatgagtgcttttacaccaacttaaaattttttgcttccatacttttgcaccgccaaaaatttggtcaatttggttacggcaccttaactttttgatggcttgactaatcaggatagtttttctagattaatgttagtcttttgttttggcagagggaataatttcattcaaacacttaaatcttggaaaaccggtttttatttaaaaaattttttgcttccatacttttgcatttgactgtattaaattttgaaaaataaagccaaaaataacaactttttccaaatttttaatctattaaactcgatcattgcactttcacccgcgcaacgtccgcacgattcggcatatttctgctcgtgcattcgctgcccgtttcatcgtcacaggcagcactttgcccgaggcgaacaacgaacgcacggcaaggcgaatgatgttcagttgtgcccgtcaatggtcacagttaaataatcatattgaattggattttatctatgatgtagccacagttattgttgcatttgcaaaataatatttattcaaaaaggcaaatgtgaaaatattcattcatttgccaattcgttgactttttttacaaattctttttttacaaattgcggtaaattcccaccgccttttaacaaaaaaagtaattattattttcgactttgtttgccaaagcacaattgacagaatacttcgtggtcgagtctgaaacagaataaatttcaaatattttatttaaattttaagttgaattaactgtgcttaaaacaagataatggtggggactagagaccggaaatttcaaatttgcggatcccgctgcgggactggaactcaaaattttttgcgggactggatcccgcgggattaatcccgcaaatcccgcaatcccgcaaatcccgcatttaaaatttgcgggatcccgtgcgggattgcgggattttggaaaattcgaaaaaatttcaattaaattcaaaaaatttccaaaaatcaaaaaatgctgaaaaataaatatttaggggctggcgggatgcattaaaaggggctgatgggtcgactaagatttttcgattggatccgacggtaaaaagttgatcggaaatcaaattattaacggttcataaatttgactatttttttcttttcaaaaccacttttttgcggtgcaagaaatcggaaatttttcaaaaaatatacaatataataaaaaaatttctaaatattttaataggctaaattttttaattcttaaccaagtaaaaggtatttcacaaatgtttttagtatattcgcttgaaaaaattattcaattattttatcaaaatctttttttgtcatttttcattattttagaacatttttgggaaaaggagtgactatttacacgttttttacagcgagattttttcaaaaactttttgggaacttggaggagagtacggcggtgccgataggcgccgccgggaaaattttgttaacagattttgtctaaaattgaccaaatgacgcagtttttgactcaatttctacaggattattaagtaaaagcctatccggcggtgccgataggcgccgccgggaaaatttcacaaattttgaatgaaatttgcgatgaaaaatgagttaactttaattaaatttattatttaatttatttaaaaatatttggcattctgtcttagaaaaattttcaaaaaaataataaaatcccgcataatcccgcacaaaaaatcaaatttgcggatcccgctgcgggattggaactcaaaattctttgcgggacgggatcccgcgggattaatcccgcaaatcccgcattttccaaaaaatgcgggattgcggactgggatcccgcaaaatcccgcgcgggattttgcgggatcgcagtctgcaaaatttaaaagacataatgtcaaatatttcttctgaattaatttatacatatgaaagagttatgtcgattcattngagctnntggccatttntagattctatntaaaaagattaaaattgtttattttttaattgtgnnataatttcatttattnggtaaaatgaaaatgaaaaaaaacatagataaaaaggcatataaacattattcacaaattcgctgcttcatcacttcaaatccctgggtttcagcaacatgtttgaatatgctgaattgatttgcagtcgattggataaaaaagcgaatttggcagaacagatttttcagtgatggcaaaccgtccaaaaaggcattggcataaaatggtcggcacttttcgtcgattctgttcaaataccgaacgtaaatgtccatattcaccagtttctgctttctcttcaggccactttggaattctgacttttgacccaataaactctaaattacttaaaaaattaaaacggagtttctatcaaattgattgttgaaacatttttatgcaattaattgaatatttagtttcaatttaaaaacatttatattttaattttatggggcacacttcaaattctttgacctgcagtcctcaggcgccaaatgaataattacgagtcaaacatttgaagtgtggccccataaaagtaagtataacatttccaatatatgtataaatccctctctaataaattaaattattttttattaggtaattaattagtcaattacccccccccctttatttgccaaccttaatattgtccataatatcgtccacaatttctgcctttccgcggcatttcaaattgaaacgttggccaaatctttcaatgatccacat

SEQ ID NO: 16086 - DNA, 2075 bp, Heterodera glycines
aatccaactaaaatgatgctaaaaatggcaatttttccaattttggccctttgtaaaaaaattcgaaagccggcacaacatggacagattttgtaaatgaatgaaatgccgccaccaaaaaacgaacaggaaatgtgtgtgagtgtgtgttgtgccgtcctcctccgtcggcttcttccttttcattttgtccgaggcaatttgcccgggggggggcgaaatgtcgacggcacaacacaaaaaagagagggggggggggaaatgccgttggcatttttggaagaaaaattaagcacttttttcgtggattttggtggacccccgggggcataaaatggtgccgtcaagcgaaattaataacagcaaaaaaacataaaaaccaatggcgacagcaaaataaattgtgttcggaaatcaaaagaaaatttttaattgctttttcctctgcccattaaaattttttttgtttttaatttttttttttttttaatttttgccggtaatttttaggaatttgaaattttggcattgtgatgggtttagagtaggtagggggttaaaccccgaccctcggggagagaaaagtcggggaaagaggaggaaattccccgacaaaagttgcaatattcagcaccaaataattttcttagttcaaagtgtgagagaattctttccagatttttctgacacaaaatgtataaatttttcttttaaatttaaagaaatttgaaaatttttttttaatttttggcattttgttgggtttaaagacagacagatgctggtatgcacaatgctaaggatatttatctgtagctagcgatatgtggatagggtagctgcagataaaaaaatctgcagataaaatccctatgcacaatgctagcgctaactatctgcagctgaagatttttttatctgcagatacccatccgcagcaactctctcgtcacacatctttttatcttttctatccctcaagagaaattttctaactcaaatttggttagcaaaatttttttgcataaaaagccgtaaaaacttattcctgggggttttcgaggtcgctgatcatgaatctgacatttatttcaaccaattcctaacccgaactcgaaaggtcgaattttcggtttttgttcaatcatcatgaaatgtaaatcaaaaaattttagaggtattaaaagtcatttagtacaatttttcaatttttaaacttatttttgggattttaatcgacatttctatcgaaattatcctcatctcgatgaggatagtgattttaatctgcagataggtagctgctaccctatctttagcattgtgcatatgtagcctagctgcagctgacgctaaggattatttgtaaaagaaactgtcattgtgcatgcggattttaatccttagcattgtgcataccagcatcattgtaccgctggggattgatgcgaaacatcaactgaaatgaggggggggggggaagcattgaaaaagtcatgcgaatcgaaaatgctcttcttactagcgcctcgagatttggaggtctcaaaaagttcggttccgacacagcatggattggactgagatgacaatggactccaccatgtgcaccagggctgagccaagctcggcttagcactcgaagcagaaggcgaagcccaatttttattcgaaggcaaagtccgaagctcgaagcccaaaaaacccgaacgtttcgaagttttcgaagccgaaacttttcatgtttttttaattcctaatattttttcatcataaaatttcagttaaatatcaaatttaatcaattaacagaacggctagagatcaaccaacccatttttaataaaataaaatatattgaactttttgatcaaaatgtatttagaaatttgaaaatttttataatacttatagtattcacggtttttgactcattttaaaaatgaaatggaacttttgggtgccggcggtgccgttaggctccgtcgggaaaaatttgagtacaatttgttaacagatttacaccaaataatgaccaaattttgcggctttaagctactttttaaaataaaata

SEQ ID NO: 16087 - DNA, 3025 bp, Heterodera glycines
  unsure (1)..(3025): unsure at all n locations
agcaaatttttactttttcactagttatagactaagaccaaaccatacaaataaaagccgtcggaccccaactgtccatgaagttaaaaaaagacngcaccgcaaaaaaaggtagtttgatgtcaaaaaaatggacaaataataaaattaaaatatttatataatatttttaaagtataagcttttatttcatgaaaaaactttaaaactctcgcctctcgtcctctcgtcaactctcgtgttttttgggactctcgcctctcgccaaactctcgctctcgtctttttggagacaagtcacacccctgctgtggccctatacctatcaattcctcaccgtatacatttactatgtgatactgtatttagccaaaaaaattaaaaagcattctctaacataatgactcacttgctatacattcgaatgaaagccaacgactgtccgggggtcgcttttatccgatccggtgggtgctttttaattgctgtgctgaagaagtgcctggggtaaaaattggcacactgtaaaatggcggtttagtatacaatcggactgaaaaattactgtatgtccgctatttttattttccacgctatttcacaggatgtgacatctcattcatttcggagtcgttcgcacggaaggccaaccttttgggaaacattgaccgttccgattgcgagacaatattcgtgccggcttttcgaggtggcaaattgcttggctggtgagtgggtttttttaattttgaaaaaaatcaaaaaaaaataaaattttaaaatgtttttctttatcacctaggtcttccaatatttatacttagttttcgtttcacgttttgcagggtcaacgatgttcaagttcgtattgatgagctcaatttgcaatttgtgtaccgtttgggagtgatggcggacaaacatttgggaatgtaagtttggcgtattgtcttttacatatttaaacatttatttatttaaaaattaattttaaggtattgcccgaagaagttcgacatgctgtatgttttaaaagaagaatatttttccctacaattataagaaattgaaaaattattgggtctgcgccgaaatggcagcgccgaaacggcacttatgacccagttttaagccaaattttccttaaaaataataaaatttagggaaccggccactttggcgccagccattttggcgccaaacgctataacatttttatttctcattcaaaataaataagcttgatatcattttaaagcgcttgatagtccctaatagcctgcaaaatttcaaaaaatttaattgaaacacaaaaaagttatggccaaaaaacctcaaaaaactgactttttctggccattttggcgccgcacgctatatcttttgtcaaacagaatttattttttctaatattttgcaggctaataaagaacacttaggcctatttaatggtatcaaaattattttatttggctggataagaaaaaagttataacactttaaagttcgcggcgccaaaatggcccgcgccaaagtgaccccgaccctaaaatttattccaatttccaacacagccttgcatcggatttgctgtatgccattgaagtggacatcgaatttagcaaaaaagcgatcactcgcaaggacaaaatggccaaatttttgaccgaggaggaaattcagcgcgaaatggcggacacctactgaagaaacgaaagaaagaaagatgaatggacaaaagtgatcggaatttatgatcaaagaaacagaaatcaaacaaataaacattttggcggaatcattttcatccagaatcactttttttaaacgaaaaaatttcattacacacggaaaacacttggtgattccctcctaaataaattggtcagtaacaaatttctgagtgagtttatacaaccacgcatacatatgcaatatacatctactaatataatggaatatacaatggaatacagcattttatggaaggaaaagattttgctgatttatcatatgccacgacgacgactcgcataacaaaaaaaatgccatgacgacgactcgtataaccaaaaaaaggccacgactcaattttgtgtataaaaaatttgattttttttgaaaaatggattttgactttttgttcgaatccgggttcggggttcgaattgggtcaaaatggatctcagaatcggtttttctagccctaaaaacccctaaaacaagtttattctcaaaaaattggcgttttgttgttgtttaattttgtgtcattaatttttttgtttgcttgtcatttggtgtttaggattaccttacataattgtgttagtttatgcagtctgctactgctgaagtttatctgcctcatgtattgatttgtcctcgccttttttcatttggatggaagaaacgattttaacttttcttcgacatttgtgcatatttgtggacgacgacaccaaacgtcgtacatactattaggccaactcgtactaacaaaatgccccgttcttcgacaaaaaaattgtcattacttttgtcaaggttggcccaattaggtacctaaacattcttggtatcattcgatagcccttaaggttttttatttccttgcaaaatgaaaaaaagattgataatgtttaaaaaaaacaataaatgtgttactccctgacattttttaaatttctcccaccaacattgacatttttttttgggggaggggggcgggtgggatttcctccatgttccctgacttttctctccctatagttcgggatggattcaaacataaattgtaatttgaatgctttttcacaaacaaagtcattgacatcgtcgtggggtatggtatgggcccctaccatatcaattacggcaatcatgtcttttattggtccctaaaaaaaaattttttaaagtttcctgaaaaatctaataacatatttctaggggtgttttgatgcgatgagtacgattcaggactcctttattggcgagttccgaaaccgaattcgaacatttt

SEQ ID NO: 16088 - DNA, 1210 bp, Heterodera glycines
tagggcctagttaagctgtaaaaaaaatttggggctatttgaatgagaatagaaagagccaggtttgatgaagttttggtaatccaaaaaaaatccaaacatttaaaaatctataaaaaatttaaaaatgagaattcatgcgagattttctggaaataagcttaatagggcctagttaagctgtaaaaaaaatttggagcgatttgaatgagaatagaaagagccaggttcgatgaagttttggtaagccaaaaaaatatccaaatatttaaaaatctataaaaaatttaaaaatgagaattcatgcgagattttctggaaataagcttaatagggcctagttaagctgtaaaaaaaatttggggcgatttgaatgagaatagaaagagccaggtttgatgaagttttggtaagccaaaaaaaaatccaaacatttaaaaatctataaaaaatttaaaaatgagaattcatgcgagattttctggaaataagcttaatagggcctagttaagctgtaaaaaaaatttggagcgatttgaatgagaatagaaagagccaggttcgatgaagttttggtaagccaaaaaaatatccaaatatttaaaaatctataaaaaatttaaaaatgagaattcatgcgagattttctggaaataagcttaatagggcctagttaagctgtaaaaaaaatttagagcgatttgaatgagaatagaaagagccaggttcgatgaagttttggtaagccaaaaaaatatccaaatatttaaaaatctataaaaaactccccataaatctgggcgcatcggttcggggggactgccccgaaaacaaaaaaatcgattttttcaagtgtccgtttggggtactcaaacaattatggggagcaaaaatccaacgcagaattaaagtacaggctatagggaagctattcccgaaggattcggtctccccataaatctgggcgcatcggttcggggggactgccccgaaaacaaaaaaatcgattttttcaagtgtccgtttggggtactcaaacaattatggggagcaaaaatccaacgcagaattaaagtacaggctatagggaagctattcccgaaggattcggtctccccataaatctgggcgcatcggttcggggggactgccccgaaaacaaaaaaatcgattttttcaagtgtccgtttggggtactcaaacaatatgg

SEQ ID NO: 16089 - DNA, 2037 bp, Heterodera glycines
tcactaatctttttcctcactcacactctctctttctaacattctctcttacgattaattttcccctctccactctcatctctctctcttccgcactctctcattcctctttttctctttaactctcttcctcattccttttactctaactctttctttctctctcctctcatcctttttctcatctcactctctcgatttacaatctcttctacctcattccgcgatctcttcttccttttctttcttcctttattttctcaccccgccttttttaatctttctctctctctctctctgcttctttctttctctttccctcgctctctcccgggctccttcttctctcactctctcaactcgttctcttttctttctttatcttccctcttttacctgcctccttattctctcccttcaacacattttcttttcacccgcccattctctctcttactctcccctcacactattctctattttactttcccctttctatcccttctgtcttcctctctcctctcactctctccgcttcctttagcattctctctttctatcaccattcctcccctctctgttctctttcaccattcattcatttatttgtcattttccttttgcttgaccttaatcaatattatttgtgtgccttgtccttttatttggaataaacatttgtttattctctacggactcatcggcataacagaaattaatggagaaagtgaaaaacaaaaaattaaattatttatttcatttaaattatttattcatgtgcatatttggcttagtggctaaaccttctgcctttcattatttgtcgcatgggttcgattcctcactgggatataaaattttcaaattttttgtgggctttcaaatgataccaatcattagtcgaaatgagaaaaaaatgctacaaaaaatgctattacacttctggtcatacttttcttggtaaataattattaaggaaagtgtttgttagcagcaagtcgccataaacatatgaccagggttcccagatgtgaggctttagcctcattttgtggttttttggaggtcaatgaggtgaaattttcaaaatgaggctttgaggctttttgtgggtttttgagaaattttgaggttttgtgttttttttgttaaattttccaaaaaccacaaaattaggaattttttattgaaaatctgctaaaaatatggtcaaaattctcaattttttcccctttttggacaaaatttgttaacaaatcacattaaaaattacaaaattttcccgacggcgcctatcggcaccgccggcccccctttgttccccaaaagttttttggaaaaagcatcgcaaaaaaatcaacttcggtttttcatgcttagaattttacaaaatgctcaaattgatcatggacaatcagaaatataacatttgaacattttaagcctgcccggcaatagcaaaataaaaagagaaaagattatgcgaaattggcaaaaaaccaaaaattaattaaaatattttaaagtttctaaaataaaaatgtttcattttagtaatgctgtcaaatttatctctacggtaaatattgatcataggccccaaactcaaaaatgcttaaaaacggtcagaatcgatgtaaaaaagtttgaaatggatagaaaaaatagaattaggggcgcgcttgcccattttcaggatgaaaagtgccgaaaatggagtgccaaactcagctggggctcaagtgaccgcactataaaaagcattcaaaagacattttaaataatttttctagggtaatttgtggcgctgatcacgaatatgacctttattttgcaaaattccgaaccccgaaccctaattcgaacaaaaatttgaaattcataaattaaaaagaaaaatatttaggggttttcgaagttgctgaacacggatggcatccattttgaccaaattcgaacaccaaaccctgactcgaacaaaaaaagaaatttaattttcgacaaaattcaaaaataagcctaggcttaggactaggc

SEQ ID NO: 16090 - DNA, 1342 bp, Heterodera glycines
  unsure (1)..(1342): unsure at all n locations
gattggacaagctacgaaaaaataagagattaatgatnntaaatggatggattctgtgagtgtntcnaagagttaattataatcggttgactaatgcccggcaattctcaatactgtattattttgcaactaaaatgaagtctatataaaagtcacggtcggtttacggtaatatgggacgtcacctacagtatgccgaaactgaatttccccgtccatttgaccggttcatattcaccatagcttggcgagcaatgttcgcggttagcgcgtgcacgagtcgcggcatcagtgccacaaacccgtccgcgccgcgcgccggaggcattcgctgcaacagcgtgcgcaacacgtccagcaacaggggcaacagctgctgctgtgactccgacgaaattagcttatcagcagctgctggagaagatgaagcggaaaagcccgttgttgttggcttatcagctgaagcggcggtgccaatgccaagcggtgccaacgcgtcgacaagcgcgtccacaatgagcggacagagctgcacatttttttaaattagtccgattttgccgttatgtctttaatcgattattccacctggccaaactcgttgagcacagtgtcaattgcgatgtgctgagggtcagcaacttggagcagtgggccaaggagttggagcagtgcacgccgtttggtggccgaacagtcggcggagctggcgaattgcacaaaaatgggcacaaattggcagaacaaactgtaaatgggtacgtacgagtcactattttcgagacaattccgactaataatgccgcaatcgctttggagttttactcgccgactatcaaagacataattacccaccgctgtcgccagaaaagcgtccgccggtaattgcaccgttccggacaggtggagggacggtgcaagtccaacaagtcggccatggcctgttcagtatcgaactcagacgagtcggcatcactcaacgccataaaatgttcgaaaaactgaaatgaaactccaatcggtaagagaaaaaaagtggcgccaagatggccagtgctcaggtgaccaaactggcaaagaaaaatgagagccgagaatttggtactcgaaagacaaaatcaatcaatcaaaaaaaataatgaatgattaaacaaacggcgacctgcttcaaccgttccgcaacgattgccgagttcggctccgccaccaacgcattgcgcgtctcacagcacgcaaccgaaggcgcagaagcggcacagaaatgcggacggatcggaggcattcttagaaataaatttccaatttaatgtgagccattaattcttttcaaattaaaatatta

SEQ ID NO: 16091 - DNA, 1334 bp, Heterodera glycines
gacgacgacaattttgagcgtgtccagcaacacaaaggaaaattgtttctaaaacagtccatgataaaattgacacaacagttcgattgagacaatatttatgaactttgatttttttttaccatttgcggcacatttttgtcctgtgatgccgatgacaaaagcagcaaccaaaagcatcgcaaagcgcgtaaaagtgcggcacaattgccgctattattttgcgccaaattgttttgctgtttgctaatgattgacactccttcggcacacatcctcgcgtggacaccaccatcgttggcattgtgaccagcagaagccattgccaaagtaccaacgtcttggagaagcagggcaatccgatcggcacggcggaatccatcctcctgcgaaaatagaaaatatatgccatcaaagttagggagaagttgccctttgcccttccgtgccacactcgccgaaacattcgggagaaagaaactcgggatcagaaaatttttgtttcaatacaatacattcaagggtttgataaggccgatctcaagtaatcagcagttcttcacatgatccccattagaagaagaacgggatcggatcccgccgggacgaagccggccatttccgtctcgccagtttaatcccgacaaaattttgagtattgtaatttaatttttttttcttttgtgaccaaaatatggaaaaataggattttgtttgagtccttatacacgtgtatggcttaaaatttagtcaaaaagttatggattcttgcattgcttgggacggaactggcggggcggaaccgctccgggattttcttcgggttcctgttagtctcggtcccgtttttgtgagcagggcagggataacgccagtcccgaaagtgtgattttcaagcaagaaaatcccggtccattgcccaattttggtctaatcctggtccaatttgttttaaagtccgcactcgatttcccaccatttggtcacaatcatcgtctttttgctgctggatccaatcggatgtccaactgatcagttgctgctccgcaaaaaaggcaaaacattgccgtcgttcctcccctgttgtgccgtcctcgtcgtcggatggtgtcaatgccaatcgttttgccatttcgtggacaccgacagacgcggcactttccaactcaacagaaccagtggcgatagacaatgtgttcaataaaacaaaaccaatggctgcactctgtggggataatttggaggaggggacaaattgaccaaaattgtatatgaatttaaaaaaattgatggcatttcgcttacaaatttttggtcgttcccccaagggtttt

SEQ ID NO: 16092 - DNA, 2040 bp, Heterodera glycines
  unsure (1)..(2040): unsure at all n locations
aggaaacatcgtccgaatgattgataattatcttacaaagtacataaagcaacttctgaaaaattatgcacatctgaaaatttatcggcaattntcgcttctctctccagctcacagatcagagttttttgattgtttccgacttgggaattgacaatgtaaataaagcggaagaaatgtttgacaaagtgtcactgtcccttccaacaatagcaaaatcaatgcttttgacattgacaatgaaagtacattgtgggcagcgagcggtcggagctcacaaagaaacgattgcttttgtttgatgaaagaaaagtgagttgtggagaatgggaggaaaaaggccgtgatgaccaacgcccgggggatgggcgatgaaagcggcgggtgaagcagagggaaactgagagacggggaaaagggtccatagccaacaaacactcttttctcctctttttctttctcacctcctgccacattttccgctctcttttcctttctctctctcacacaaatgtaaaatgaaatcggtcgggaaatgaaagccaatttacccggtgtgatcaaacgtcgaatacgaacaattgcaaaagtttttcttcattttttgaataagattaggataggtaaaatacctatttctgctgctggtttcattttcctttttctgcgcttcactcactgtgcaggaaaagcctagttcctattacttcctttttttcttttttataattcactttggcgtactatttcttcccatttactgatgaaaagacagaatttattccgttcgaatgcataccttatataatttttacttcattttcagaatggaagttcccgccgactattctcttcataaacacacttttccaaacgggacgaatggtttgttgggccatgggaaatgattgcaaaaagtacttttattcattttctcttgacattttgactcatgcttttggatacgattgatgctcttttaagagatgtcccagcagcggaggcagcaaatgtctcactcgagcgatgaacggagttgccaagaggaggagacggaggaggagcaggacgaagaggcgatgctttacacggccaaataccgtcatttgctcgagtattacaagcacatctccgaagttgtcattattagtggtacttattaaatttacggtatcaaaaagccaagaatttgaaaaaagtcttagataaagttgaaatggaagccggttttgtgctcgcaatcagcagtagtgaacttagcataagaaaaatattgtcagcttttttttttgcttttgattctgtaaacttaataagtaatttatttgctttgtttttgaaaagcattaatttttttgaattctaattaagatgaataatcgtctcagacatcgcatttaccatgtgaagaaggaaataaaccatctcaaacagttgaaacggtattacttttactcatttttttttgtttttattttctctcaaaatttttgtttttaggcttctttgtgagcgtttacttttccgaagggttgaaattatcgacacaaatttggaaatccctgacaacgattcgggcgtacacagcgccatggaattggttggggaggtgtttaatttatttcttgttttgttattccctttggtaattattgttcaatttgttttgtttccctccccacatttcttcccatgccacagattgcgaatgccgccgccgccgccaatccctcgcagccatccgccgccagtggcaatgcttcgcacggcaccgctggtggcagcgccggaggcggtgggcggaaacgaaagcgcggcgcgacgtgcggcagtgacgaacagccgcaaatggcgacgagcggaggggagggcgcaaaaagtgcgtcgtcactgttatttgagttttgttggaacagttttttgcttcttcagcgatgccttttcatctcggcaaacaacaaacgacgccacgagcaaaaacgtcgcgcggtggcggcgacgaggcaaagcgaaatatcatcaatatcatcgaaagcattg

SEQ ID NO: 16093 - DNA, 1572 bp, Heterodera glycines
agtaaaagcgcgagggggagcgggtcgaagtccaaaatttcgtgggagtaaacccatgcgaattgatgatatatattttcttattttgctgtgaaaagtatgggattggcgccgccgggaaattaaaagtttgaggcaagttttggcacgtacattccttttacagtttcttcgtcgtcctcaaaatgccaacatcgtcgacatcttccgccgcctcttcccccacccgctgccttggtcccctcttcgtcctcatcggtttgccatcaccacccacaacaaccaaatgtaagtaacgggtgtagttttttgtaaatttccatttttccgccgctaaccattcttattctcattgtcagcagtgtagttgttgctgtgtcagttcctccaacaacagcaattacgaaccgttgtccgaatctgatttatccgctgaggaattggccgagcggctcatccaccggcgctcatccatcgaccatttactgcccgaggcgcccgagccggacgacgacgccgacgctggtgaacaggaaaaggggaaggatcgcaaggaggaaaagagcaagacggagagaagagacgccgtttttggaaacagtaaacacgaaaaggaggaaggaaaggacaaaggaaacggaggagaaacccaacaacaacaacaaaggcagacaataacgcaagaagaaaaaacaccttccagtgaagacgaacagcataaacaacagatgatgacaaatacaactggtaagaatatctgcactcctggcccctaaattcctctaagatttcaaaatttaacaaaataggcaatttcagtaagatctgttgaattcttttcctgttgactccaaaactccttacttttaatgatggactcataattctttttagttgtaccaaatttcatgaaacagtcctctgacgacctgaccgaagaaaaaagtccgctggcaagtcaatcgcacaaccaacaacagccaccatcaacaacaacggcgtcgtcattttcgccgtcctcggcagtgacgccctttgtgcctgctgctattgcttcagtgtcaatttatgcagcgaatgatggtgaaaagagacgagaaaccgaagaaaaaaatgttgaccaaaataccactgttgccgaagatgagaatgaagatgacgatgaaatggaacaggaactgtagcacataccatttgatattagtttaaataaatgccatttttatttgaaaatattaaaaatttttttctttctctcaactttggtcattacaatttgacctggcaattatgtagtttttgtggtttctgcgaaaaaatcaccttttctaggatagaaaagtgctgatcacgaatctgccaaatgagctcagtttttgcaaaatcattgattttgtctatcattttcatcaaatttggtttattttttctaaacttttttctacgtggtgtgtatgctcgtgtatcttctgaacatcatgtactgaaacaaatacctatgtcggcagcatttcctcatttgaaccacgtaagtgtcggagagaagtcttcagtgcaccccaagttgcctca

SEQ ID NO: 16094 - DNA, 1574 bp, Heterodera glycines
  unsure (1)..(1574): unsure at all n locations
ggggggggggggagccattggggattttattcatttttcgtatttcattttgcaactccaattttcccataatttgacatttaatttataaaattcaaaaaaacccacctctttctcttcgcggatgcttcttacaaattagcagcagaggaagcaaaaagacgcaaaagggcagcggcgaatgaccggcgattggaaggcgaattcaacgaaaattgggtagaaaaaataataaattggacaattaattattaatcgcctttgacactttaaaatggtattaattattaattaatattttaatataaaaattctgctaatattcggtaatttgcataataaatgccattttgagttagtttttgtggttttctgtgtcattttaagcatgaaaataaataatatttttaacttttgtgctaataaacggcggaatttttcggggattggctaacagaagaaacagcagcaaaagtcggcctaaaattgatcagaagcgatttgatcggcctgggcttcttgttctgttccactgctgcgcccatccacgcctaacaaccaaagcttatcagccgatacatcaaaacaaaccaatcccatcccatcccatcccatccaatccaatccaatccaatcatcattataatcacccaattgtccgtcatttttacagagaaaaatgtttgacgagtttctgaccaaatgaaaagcgacaaaaagaggaaataaaaataaaatattttattattgtaaaacaattgagcaaagaaagcaaaaaacgagctaagaaaaaagcaaataaaatattataaattgtaaaaaccgactagacaaaataaaaagggagaagaaaagaaaagagaagggaagagaaaggatgagtaatcagaagaaagaaacattaataaatataataaagaatgcaaatgatcagaaaagcgatggcatcgtttcgttcggcactttgccaatcaatcgaaaaaacattggcattttggggtggcagcttgttcagatgacacaaaacccgtttctggcttaattctgcatccaattccgttttgcttcacccaatttgacttccctcaactcacaagcgaaaaatgactcaaaattaggtcccccgaatactatttaattaattgttttgtttttattctgccgctgatcgaagatggcaaagtcgacaatgcgccatttttcgcgtgccaaatacgaagggaaaaggccgctccgtcgcgtgcgtcggtttgtgccctttgaaaagccattccaatgattgccggcaacgcctggcaaaaaaacggatgcatgcatatgcttcgtctgctggcaattctcaaaaaacaattttcgtcacttctgatcaaagccaacagccggcagacccctcaatagctcattaactaattaattactacctcactaattaattaatatttcatttctcgcctaactaattatcaactcattgcgcattaattaattatattaatataattaattaattagttggcccaccgatcacatcgccaggncttagttcgattttgttcgtcagtcttcggactaaa

SEQ ID NO: 16095 - DNA, 2461 bp, Heterodera glycines
cttcgggaatagttttttagcatgtaaatggtattattttatttgtccctattttaactttaggtctcatttccccccccccccccccaggctcacctgactactgaaggtgcacacaatgtatctgctcaattagaggagcaaatcattttaaaataagcaaaaatgttagaatttacgagcaatgcgccaaaatgtgcacgtcggcaatgacaccgagcaaagaccgatcggagtatcgattggagggaagagcggctaaagagagaaggagtgggggagaaagagagtgatcggacggacggacagacaaattcaattttaatgattacgatcggtgatgcgtttgtccccaattcccccttttttgcccttttgcccaccttcggcactttcgtcgtttgcccaaatttcgaatcccttctttgcccactccgtccgcgcttcttcgatcaccgttttgtcgtcagtggcgatgaaaatgcgctttttcaggggaaggccaagaaaagaaaattaattattaaaggtaattaaattaatgaaaaaacaaaattaataataaagggaagagaattaaaaaggcacgtaaaaacaatttaaattaattttatttttcgtatttattttataattttccctttttacccaatttcttttgctccgtgcgaaaccaaagctcggcccatcgcatgtactcattgacatgatgaaaggccgcctcagtgccgactttgtcagtacggcgaatttgcaacccgacgacggggcctaaaaagggaaaatggaaaataattaataataaaaatatttaaattaagggaaaatatttaaggcatttaaattattattcttcagcacagcaaatgtgagaattgacttgcccaattcgaagggaattctgcgcattgcttcttcaacgaatttatttgtcctttcatttttacgcattaaaaaagcgacaaattgtccaaggaaaaacacctaaagaatgaattaaatgaatattaaataataattaattactactaattaatcaatcaattaattaatgaccggtgggtttgagtggtgagtgagcaaaacatcggcaaattgtgcggggaatgcgagtggaaggtgatggggacgggaggagagcccatcgaccacgggaagacgaacgattcggggggagttgggctgattaatgccagtgaactgatcgacgacgacggacaaaggcacctgacaaatgaggggaaaaagcgtagaaaaaaaacgaaaattgaaaattcgaagggataaaaaacttagaaaaatcggaattgaggatataaaagggaaactgtccaaagtttgtccaatgctgtgttattttacatgttctgcgaaagtgcacgagccgaccgatcggaaaacggcggcccatccgtcgcgcgaatagcgccactcggcgccgtccctctccaaaagcatcgttcggtttgtggccgccgccattaacagacagtaaacgacgtggtgaaactgacagccgaagccgcaccctttgttcagctgaaattcgtccgttttcagtgccatcgatccatcaaacaaaagcaatcgatcgattgatcaggcaagcttatcgattgatcaatcgatcgatcggtcgtttgaattggtcgacgatcatcacccctccttccccttttttatttttgcttttgcctcgcacaacagaagtcgcgcctttccgcactcttttgggtgttgcagcgcgtgcagtgcgttttgaatgttcgaagcgacgcgtgccaacgcccggcggtgccattgttcggcgccgtcgacgtgcgcaaattgacgcgagtgggccaacaaatggagtatctgatcagcaaaagagagatggaaattgatcaattcttcgattgtctgatcagtccgtccgattcttcgaccgtgtcagaatcaatcacctgttcgtcattcaaaagttgctgtccgtctctttgaccttccaattgctcttttctgctgctgctgcccactctcaaatttcacttttattttattttgctaaattaccgtacacctcgtgtacagtagctccatgatcagtctgttcaactctctccgtgccaattcgtgctccttcgagtaaagttctgctgcctgcccattctccgattggtcggcgtcttttgtcggattgattaaattcgaattctaaatttattttaattattttttaattgttttaattccttttccctttttcacctcttctttcagtctttcattttctcttctcaatgcttccaattgttctcccatttgttccatttcaatttgattttcgtcgcttttttctttttcgttcttcgcttttcccccttaaattttgcctatttttaatttcttttctctttttcctctttttgactttctagtggtcgttcctcgtccacaaattgtgccattgtcctgcggt

SEQ ID NO: 16096 - DNA, 1015 bp, Heterodera glycines
ttttggagaaaaaggattaaattctctcgtgaaatcctctgctcgtttctaactacatttttttacattagtcaaaattgccgcggagtcccaaattccgcgggtcgcgcatcgcgggtttaaaatcccgcggtcgcggattcaatttctcgcgttcgcggatcgcgcaaaaaaaaaaacgctgcgaatcgcggtcgcgctacacccctatttgcatcaaaagatttcattttttagtttatcaaaatttttggaatttctatttgtctatccaaaaataggtagattgcttcaactacacattaatcgcttctcaaaggtttttatttagaatggtttcttctttaaacaatttgctacccagcattgatttccccttcatttacttgcataatgaaatggtcaaatatttccatgacagagacaaaagcttggaggaacaaagggaattgtggctgcagaaaattaggcatttgtctgatgaggaaacggtggatttattggcgggaacggacggaaagatgatgagtaatcggatattcgcgcaggtataatgaaaaccttattttttacaaaatagaggagttctggttttttagcgcaatgccgtgacccgacttgaggcctccggtgttcgtgtgggctatgtgttggcagagcattttgccaaggatttaccgcgcttctcgaacgaattggacaaaatgaagttcatctgcaaagagttctgggccagcactttcggaaagggagtggacaaactgagcacaaatcatcaggcaatttttattgttaactaccaatatttcaaggtctatatacatttagggaatttacatcattcaagacagcaaatttcacactgtcacaccctttgccgagggtgctcagtacctcgctgattccatcccctatttggcttttcccgccggcctcgtcaggggtgcactcgagtcactaggtgtgtttcataaatactgtaaatactgaggggtaggtataacgcaaaaacatg

SEQ ID NO: 16097 - DNA, 1925 bp, Heterodera glycines
ttttgataattgtctaatcgcgacccaatagcttagacaaagcttctaaacatgttaagctttcgactggtatcaacaatgttggcttgagataactaagaaaaaagttatagtggaaaaacatgctggcgccgaaacgccaggtgacccagatactgtatgtcgagacaggaaaacgtgtgaaaaaataaaataaaaagtctcccgatttccattgataatttttcacatcagacccccccccccaccctttaattgatcgacattggaaatcttaagacccaagcaatcctattttttgaaaaatattaaataaaaatttaatatgaatgaataaataaaaataatttgcttctgaaattaaaattctctcttcgcattcattgcccaattaaataaaattaaaatttcataaaattgttcttcaattgtgtttattcgtagataatttttcggtgcgaatacgtaaaattattcggacgaacgaatggaattctccggcaattcctttcctttcgtttcgggaagcaaaagagtgaaaagccctgcgaagaatgaaaaggcgccgaaaaaaagcattggcgcaatggaagaaaactttgcctaatttcgaaaatgattttcagatgaattttcacttttttaccatcactcggacactcggcgcaaaaatgctgctcccctaaataattgtaaaataaattagaatttgtttgttggacgaattcacttgtgaaacggccgtacaaatgcccatacaaaggccacgattgaccgtcggaaacacttcggaagtgtacacgaaaagacccgtgaaagaagacgaaatggcgaactttccgatgagccaaaggacgaggaaaagttttgggctgtcgttgagaaggacagccaaaaatgcagaagcggccaaaaagtgagtgaaagaggtgaaaagacgacgacccaacctgcaaatgcattaagacaggaggacagattggcatttagcaatgaatgcacttttccaggaggaaaggcgcgaataaatacgccggcacttcggccaatgccaccaaagtgaaattgacgaagcgattgccggccaattgggcgctgaacaagctgaggccgtagtaaataaaagtgtcgcaagtcctgagcatggaaagattcaccttcactttgaattgcaccaaattattttgttgaccaaagaaagcagaacacggtcaggtagaggatcagagtacgatcggtccaaaagtggcgcacttgggaagcattgcttaaatcaccgttggcattttgggaggggagggggggggcaatgatggcgggaaatgagtggctgatcgaaatgtggcatcgatcagattccttctttagtttttcttttgctaattgtctatttccgaaatacagtatctctgcactttctgttggttacggtagccctcactgatcagtcaaatcgttttcccaattcgttcccacctccgccgttcgttttcctcgtccctttgctcttctttctctttggcaatttgcccaatgaattggtccaattccgtgcttccaattgcgcgtgtccccgccttcgctgcgcatttattcgccttttccacccattttttcacgtcattcaatttctttccggccaccaaaaagtgaaaactttcaggaattgtgctgaaaatgctgcttttgttgacataaaaaattattggaagaattacaaaaaatagaaaatgccaaataaaatggacggccccgacgcagcggcgattaattgttgccaattagtggtgaaataagccaccggggccaccaaacagtagccgagcacccacatcagcccgaacagtaacgcactttgggagcgcagatggagcggaatgctttaatgtgcgagcacccaattgagcatggcacagccctgaggg

SEQ ID NO: 16098 - DNA, 1962 bp, Heterodera glycines
  unsure (1)..(1962): unsure at all n locations
ggtaattaccggttttttgggtaccggtaccggtaccggtaccggttttttcaaaaatgaaattaccgttaccggtttgtctagtaccggtaccgccggtaaaaatttgcactggtaagaatgggggtctggtcgagaaaagagtaggaatttgtgaagaaggagaaatttttgagaaaaaattaaattttatttcatttagtcatgggagtacacacatgcacatgtggtgtagtggttaaactttctacctttcataattttttgcctgggttcaattccccacttggatagaatattcctcacattttctttaccatcattttaattaaaattttaattttaaaaaatatttcaacttttttctttcatgttaagcatcctaaaaacccaaaacttaatcaattggtcatttttttacaaattctgttaacaaatcgcattaaaaaatacaaaatttttcccggcggcgcctatcggcaccgccggccctccttgtcccccaaaagtcttggaaaaaacgtgccgcgtaaaaagcggtgttgaaagcaaaaaaaggtcattgatttacattaatttacatggccggagaccccttcgcaaaattggaaaattggccgctgatcccttgttttgcaataatctgaattttgaggtctacatctgaattttagtgttctttatcctaaatttgaaaaaaaaacttggtcaccctcaatatacatatacttctgaacaattctaatgctaaaaaacaggcactcgcgcgaaaactgaataaaaattttgtatttggaaaattttgtccaaaaatttttatgttctaaaattaccggtttttaccggtaccggtaccggtaccggttgaaaaagttggtaccggtaccggtaccggtttttgcagtaccggtcagtaccggtaccggtttttttgcaattaccgattaccgctcaactctagttttgatttcttaaacatattgataattttgaaatttttggcacaatgtcattatttaatatagaattttttaagtttgacgcaaatttggaatggactaattatttaatttgctatatttagtcggcatccaattctacgaaaaaatgtcgttcagctgtttcgaacagtgcggtggaaagtaaaaggttttatctgtaagaatcgaattggcaatgtcgaaaacgaaatttgcgaaaagcggcgacagagggaaaacgaattggtggcgcaatttgaaatgaaacggcactttgaaatattgacaaaggcatgggcataatgcagcaaaagcgaagcccattttggaaaaatgataaataaatattaaaatagatgatgaaggtaaaaaaagtataatgctttaatgtgacagttatttttaaaatattaatatttgattatcgtttcctctccattttcctaataaaattataatttcaaaaatttttgtgaaaacattttgtacctgattgtttgttgtttttttttgatgaatttaaaaaataaaattgttaatggattattttgaacaaaaaagattaaacgttgaattgcagatatttttaaaattaaaaaaatcaaaaatgtctatgaatttcgattgttggaaaatttattagtgggattataaattatatggactaaaaaccccaaatatgtggactaaaaactgcagtaaagccgtgaggtcccactacccagtgcttaatgagggatttagtctaagggagccctcttacgcgtccgtaattaggcccctcagggcttggaagggaagggatgttgatggatgcctgngggcgcctccaggcgnggatcgattggccattcactgaatgactcccgactgaactccgatttgaccctttggctgnttatccattgccatttancgcccctcggggatgggaggagcctatcgagaataaaggggggggggggggggggaaggggaaagg

SEQ ID NO: 16099 - DNA, 2307 bp, Heterodera glycines
tgatacaaagtgtaaaaatattttctattttcctcaaaaacttttcatttttggagggtggagaattctgacccttcactttttaattgaaaaaatataaaaaagtgctaataaatcaaaatttgttcatttttaatgcttattccgctgtcagttcaaattaaactgtgaacaaaattcgcgacaaatataaaaaaaccaaatttaaaaaattaggaaatttaaaaagggtaaaatattgtttagtttacactgtcgacaaaaaggactttcgtacatttgtccaaagaatgacctcaaaagagtcttcggaaacccattcacaagtcgcttctgtcagcgaaccaaaacgaccagtgccatcgcagacggcacaaacgcaacatatcaattttgctgctcagatcgggaggccaaacattggactgccaaattatgccattccatcggaccaaggcaatcagcagcacttaatagcaaaagcggttaatgccaatcgacaaatgacgaactaagcatttgttggccacacttcaagtcaaacaaagcaacaaaaagcacaaaattatgacacaaattatgggcaaattggacgaaatacaatgccagcacaaggcactcaccaaataagtaaaaaattggaaccagcttatgctcttagtgctgttccaagcagtgctttgctccgccctgatcagcagattggcaaccattccgcagttagtttttatccgggtcaaatcgacccgaatgcgcagtcaactctgggtcttggccctgatcagtttcaccagtatctggcacaacaaagttatggcattggccccagtcaaataaaccaaaatttgatagaagcaaatcacctcattaactcagagcaattatttgggagtaatttgagagcacctcctgaagatgtgcagtattttaccaataaagagctcaaatcggacaaaacaatcattgattatttaaacagtcactgtgtgactgatcaaagccttttccttagccaaaatttggttgagcctttaaccgattcaaatgtttaccaagaccaaataaatatgctaattgcagaaaaccagttctttaatcccagtgatcaaacagagtcatatttgaaacatgatgaaaatttaaatcaaatgctaattaattttgtggcttcttcatcaccaaataatgatgaaggggattatcggcctcacctgctcaattcatttaatcaccagcagggattgttgcagcactcacctttggacagtgattatcatctgaatgatccctttggggcttcttcatcgtcgcaaatgcaaataaatccgtccaattatttccattatcaaaatgtgccgcaagattcagctaatattgatcaaagtgaagtcgaaacaaaaaacacggagcaaatggcaaatgaaaatgagaagcgaaagatgaaacgactaattgttgaggacgaagcaggcaaaagtgaggccaaagcgaaaatggaaaagcggacaaaaaatcagccaccagaagcagtgggacgacagtccgcttctgctggcgaattgccgggacggagttcaatcagtcaaagtgaaaagcaaattggtaattagaattcaattacctcttttataaagcattttgcaaattaagtccaacaagtgcttcacattgttggcctgactttagctgctcttggcaaagattcgccctccattgatcgcgttttgaatggctcaccaaatcatgatcaattttttgccattatgagagaaataaagccgaatgaagtagtggcacacatccaaaattggcttttaaacgatgaactgatcagaggaaatacaatgtacagagaaatgatcggcgaaatcgatggacaaatcggcacggcatttggccaaagccttttgaagtgaaccggggcaaaccgggattttctcgacaacgggtttaatttcgagtctatttttttgaaattacacaacgaaaacattggccaggggtagtggccagagatttgttcttgaaacccaatttatttggttggtaaaatggccaacagcttgtttaggaggcgaagttcagaaaagaaaaatatattttttaatttttgatataaaaagcgtgatttcatttaatttaaataaggatttgtctgaaactaatctgaaattacattttttaaagcgaactcatcggaaaagaatcatcggaagatttttcaaggacgggcgtgcttttcttttatagcagtctttacaggaaattaatcggattattggaggcgccatacgacaaaagcgatgc

SEQ ID NO: 16100 - DNA, 2779 bp, Heterodera glycines
  unsure (1)..(2779): unsure at all n locations
atatgtgaaggggatcctcgaatcccgtgttttctggtgngcataaaaaattgggcaaaaaccagaaacattttgaatggttccggttattaaaacacattcggttggtctctcatggctatgcattatgttgagggaagaattaaattaaaggggattttagagcagaagcaaaatcagttcctcgaggctgaattaagacaacttggtaaacccgttagagaccaagtttctgtttttcggggagtgtccgaaacatccccattttcggaccaattaactcaccatttcccaaaccaggagaagttggacgacaatgccaatctcaacttggcggagggaagcgatcggcgaattggggagaagttggacaacgaagccaatctcaacttggcggagcgaaacgaacgacaaatgtggcacaaggcggtcaacgaggacgacacggttggacgagttgagcgagtgcaaacgcgaacgaaggaagaatggcgaaaatggagggaaaagaaagtgaggaggacatgaggaggaagttgcgaatggagaggacttgccaatctgacaaatcttttctatcacttaattcgatgttcagggacattcattttttactttgcccaaattctcaatttctgtgcattaattatgctttaattttaaatcattttcaatcatttaaattgttaatttctatttctcatttcctctcttattatctccgacacacatctcttgtaaattgacggcggtctcatccgccatatttaagccattcattttttcccatctctcttcacttcacttcgacaaacacaatttaaaatgctttaaaaaacatttttattgctcttcgcatttccatcaaattgctcaataaaaattcctcgaattttgagaacaacggaaggcaagggattggaggttttaagtgattttccgcctcaaaactaaatcacaaactttttgaaaagaggcggaaaaccatttaccaatttattggcatttggattttcactcatttcgtcaaatcacattctcacctcaccaagggaatttgactcaattcgaccactgcgaccaattgacacggacaaccattgcgccggacaatcgggaaacattggacaaattgacgccgacaattggacaaagacaaatcgcgcaaatcggacattggacgcacagaccaaattacaaattggacgcactgacaattgggaattggacgaactgacaattgcgaattggacgcactgacaattgggaattggacgcacggaacaaattggaaattggacgccctgaactggttggacccttgacattgtgtgcaccgtctcggagcgtgtctcagcgcgcaggccaaacncnaattaccaagacgtgccccggacaactggcgaccttttgtacacaggcgggttcaattttttttcccaaggggaggtctgattaatctggtctcatccagaattaatcagtgcgttaatttttgttcccacctcctcccaaaaaaggcaatcaagttcagtttggactgaaattttcgaagtctcatcttcgaacagtcaaacatttaaattgcccaatttgaatttgcccgaaaaatctcggcatttcatttccaattcacattttttttgtgtttttgtccaattacatttattcaaaaaatctcgaaatctcattttcgagttcaaagttttgtccaatcccataccatccaatttttcgaaattttattttcgagttcaaattttttgtccaatcccatttagtccaaaatttcggaatctcatttccgagggtctaaaaatttgtttttttgtttttgttttgtgttttgtttttgttttgtttttaacccaaattgtccaaactatccgctcttgataaaatcagagtcttagctctgacagtgcgtggtaaaaaggtctcacaaatcgtgaatcgtgtacccttccccctttctgggttttttgttcccctctttctggtttttgaattactgattctcaactcagaacgcagttcggttattgattaaattggagtctcagttccaaatttttaaattgttcggtcactgttcggttattgattattgaattggagtctcatctccgaaattttcgaatttggtccattgatttgagcaatgacagcccccccatccagccattaattagggggtgtgccagcaaattgggagccattattgggtaccgaaattccacctgacctgggaataaatgccctaccaaatcaatgccaaagaaggctgtacaaattcagaaaccttctgaatgacttagaaaaggtggtacaaaagattgaagataatttgggtttggctaatgagtatattggtaaactgagtcgagacaatgcaatccgtaaggaaacggaaatgcaggaattaatgcaggagttacaaattaatgagaaacaaagggcagctgacgttctcattccaattttgagggacaaaattgaggcattagaagagaggttagacataactcacaacacggatggtgacactacctccgcatggtacccctctcaaggagcgtgccaatgcgtaaaaatttgccaaaaactgagcttaagagatttgatggtagtccatctcagtggataccattttgggattactttcgtacaataattcatgaggactctcatgtcccaaaaatcgataagttcagttatttagactcatgcattgaaggcaaagccagtccaatcattcagggtattccaattagtgaga

SEQ ID NO: 16101 - DNA, 1125 bp, Heterodera glycines
aagagaacagaaagtggaagagaaagtggaagagaaagaggtagagaacagaaagtggaagagaatgtggaaaagatagcaagaggaaccgaaagtggaagaggaacagaaagtggaagaagaacagaaagtggaagagaaagagaaagtggaaaagaaagagcaagaggaaccgaaagtggaaccgaaagtggaagagaaagtggaaaagaaagaggaagagaacagaaagtggaagagaaattggaagaagaacagaaagtggaagagaaagtggaagagaaagtggaagagaaagtggaagagaaagagaaagagcaaccgaaagtggaagagaaagtggaagagaaagaggaagagaacagaaagtggaactgaaagtggaagaggaacagaaagtggaagaagaacagaaagtggaagagaaagtggaagaggaacagaaagtggaagaagaacagaaagtggaactgaaagtggaagaggaaccgaaagtggaaaagaaagagcaagaggaaccgaaagtggaaccgaaagtggaagagaaagtggaaaagaaagagcaagaggaacagaaagtggaaccgaaagtggaagagaaacagaaagtggaagagaacagaaagtggaagagaaagtggaagagaacagaaagtggaagagaaagtggaagagaaagaggaagagaacagaaagtggaagagaaagtggaagaaaaagtggaaaagaaagaggaagagaacagaaagtggaagagaaagagaaagaggaaccgaaagtggaagagaaagtggaagagaaagaggaagagaacagaaagtggaactgaaagtggaagaggaacagaaagtggaagaagaacagaaagtggaagagaaagtggaagaggaaccgaaagtggaagaggaacagaaagtggaagaagaacagaaagtggaagagaaagagaaagtggaaaagaaagagcaagaggaaccgaaagtggaaccgaaattggaaaaaaaagtggaaaagaaagaggaagagaacagaaagtgtaagagaaagagaaagaggaaccgaaagtggaagagaaagtgtaagagaaagaggaagagaacagaacttaaagggaaagtggaagag

SEQ ID NO: 16102 - DNA, 1177 bp, Heterodera glycines
ttttaatgtaatttccaaatttagcagggaaagcccgaattggagatgcactgtttgcaaattagaacgataaaattgccatttactgttttgcaagaagtgtttctgacaatgccggcaacttacaaagttgtaaaaatgaacgaaaaaggatgggccacattgttcatgactgagggtacattgaaacaattgggcaaaactagtactgtttcataaagttttagtcgagacccgcgcggcatgttcatcgaagaattgagaggaaatgttttggaatgtttttttattaggtatttattttttggcatttgaatggatatcaattttattgtatgtatttgagccaagcttggctaaagaatcccagtaaaataagcgagcgataaccctagttgtgtgtcatttccactcgaccctcccaagaacaaagcttgaccattaagcaaagtttatgggatggcgtcagaaaagggcaaaaagccaaggaaaaaagtggggaatatcgtactaataatccgacggaagaaatcattcagaaaaagtgccagccaccgttcgattgcgaatgtaaaggaacagtgccaccgaagcctgggctcggctcatctccgggaacagctccaactcctttttggtcattcgatcgtacggcagccgggcctgggcagccgcggaacggagggctgagagaaaagaaacatttgtgaggacaaagaatttattggtaaatcattaaaacaaaaaatatatggatggggagagagggggagggattcattcagccaatccaaaaaataactgaataccgtttttagaaaaatcggtcggtgtccgactcactaattaagttttattgaattttgcactttattttgccataattttcgattgtgtcggctgattgtctcaaaatacgcacacaaatcgtcgtcctcccaccgatacacatccatcccatgcagttcgcgtgtgcccaactgtgctagtgagtttctgacgccatagtccacattttggcgtctcgagcggttcggcggtcgagacgctggtttgaagcgctgattgttgtggttgttctgcgaacgggccgaatgattggaattgacaccgccgccaaaacgcgggggagacgaactcgcggacgaattcgaagacatagcaaaaaaaaaaaaaa

SEQ ID NO: 16103 - DNA, 3637 bp, Heterodera glycines
  unsure (1)..(3637): unsure at all n locations
acttaattattgagacggacaccgaccgatttttctataaacggtattcaaaattattttttgaattggctgaatgaatccctccccctctctccccatccatgtattttttgctttaatgatttaccaataaattctttgtcctcacaaatgtttcttttctctcagccctccgttccgcggctgcccaggcccggctgccgtacgatcgtgatgaccaaaaaggagttggagctgttcccggagatgagccgagcccaggcttcggtggcactgttcctttacattcgcaatcgaacggtggctggcactttttctgaatgatttcttccgtcggattattagtacaatattccccacttttttccttggctttttgcccttttctgacgacatcccataaactgcttaatggtcaaactttttcttaattccgagcccattaaattgagttatttgctaattcagtcttgaaaaaggcaactaaaaatgaacaaattgaaaaatcaacaataattatgtgcgttttgatcatattattaacactcactttttgctcttttagtaaaatttcgcttcccttttcagttggtcctttggcaactcgaccctttggttgagctgaccgtcgaatacattctcaccgaacttccggcaccctttgacagttcgattttccctcttttgagtcgttttatccgtcccttctttaggtgacgttgagttggtcaccggcattcatgcgtatttgcagcgctacggcttcatcaattttggccttttccaccaactaacgggtttgttttgttttgtttgtcatatctgaatgacaatgaattcggcaaaaggcacgccctttacggttttcaaaatggtcctttttaaaatgaaatttagcgcgtcgtttggaccgcccgaagactgtcattgtcatcggtgccggcccggccgggctcgccgctgcgcgtcagctcaaattcttcggcttttccgtcattttgctggaagggcgggtgggaaaggggcgcggtaaggcaaataaatgccatcaatgttctcccttttcaggctcgtccgggtggacgtgtccaaaccatcaatcgcacccattccgcggaccttggggcgatgattgtcatgggcattagtgcgtttcactctgtttttcattccgttgcttttactttggccactatttgctaatttcagtgggaaatccgttggtcactttgatccaacaggcaccggtgaccgttttccgtgccagcaatcgctgtcccatttatgacaaccaggcaagttcgtttgtttgttagacaatttccaactttgcatcgtttgtttttcactcacaattattgaaatttgtgggttttagggcaaattggtggacagtcgcaaggatgatatgattgagcgttcgttcaaccgcattttgggcacaatttcctatctttcgcacgccgaaggcgtcaccgagacgaaactgcccggggaaacggcggggcggaaaatcagcctgggcaaggcgttcgaactgatcctcaggtcactccctcttattcgcttataaaacaaatgcaaatttcaatgatttcaaaatgcggtccctgggaaagggaggggcaaacggctaattgtaaagggttcattttgacatgacttatgatttgacaatggacacttttcttccttttcagccaacaggaattgcgcgtcaaaaacaaatggctcaatttttggcagaaatactactacttgttgaaaaagttggaaatcgaaaaactcagagtgaggcgaaggcaaaaaaactaaaaaaatagcggggcctaattcattaaattaattaattagtcgtttccaaactattgggttagttgcttttgttttcaattcctcaggtcgattctctccacgctcagcttgccgattgtatgcagagactgcgcgaaaacggaattgcgaatccggcggaagcgaccgcggaaacggtggggtttttatttattttttttaaaaaatatttttgagccatgtatttgcaaatccaacaattttggaatcaccccctcgccccaatttttcgtaaaccatttcgggactcaaattatgctgcatttctcagattgccgtcaattttgaagaatcggccgaaaaagttgaacagcaaatgattgtgcgggctttgcgtaaaatcacggagatcactttggaagtgggctatttttttggcttctgtttattggcataaatttccaataaattttttttctatcctttcaagaagtatgacgaggccgagcgcgaacggaacaacaccgaaaacgtattgaaggacttcaaacagatggaaccgaggtgaggaaaagcctttgaattttgatattttgaaaagaataaaatggttnggaatgaaaatgtaaatccgagccaacagacgcaaatntaaataagtgtaccaaatagtttcaattttttaaaattaattttaatacgattttcctccccttgagtgtcgtttacatgaacaacacggacaaacgcattttggacttccatttggccaatttggagtacgccattggggcgccgctggacaaagtggcgatgaaggactgggaccaggacgacccgtacggatttaccggctcgcacatgaccggttaggaaaaaactaaaacagaaggcattcctcccatcccgaaatccttagacaatctcgtagaacttgaaaagcctcctcccctgtaggagtcgatggaatacaaggaaagtgtttattttatgggatgagatctttttcatttaagacactttgtaggcacggattttgcccttaaatcgtcactttttttaatgccccgaatcctttcagtgaaagagggactcggctttttgattggacgactatgcaaaaaggaattaaatgtgcgttataatcatgcggtggaccgaatcgaatacaatgaaaacggtaaaaacggagggaattaaaaagaaattcattgacattgtccatggataaggcagaggcctaattggccaattatttaggcgtttcggttcaatgttcgctgcagcccgaggcgcagcagcagaaaagcagcagtaacaagcccgagactgtctgctttgaggtgcttttgttcatttaccctttcgttgttggcattttttgtgtgcgttagacccaaagtcatgggtcaaaactctccaatttatttggggagcgtctccttgaggagtgacggcttttttaaaaacgtcatttgcgatgcgcacgtcttttacaacttttaatcaagccatttttgtctaattaggccgatgccgttctctgcaccgtgccattgggtgtgctgcagcgatgcgacgtgcaatttgagccgccgttgccccgctggaaaagggaggccatctccaacatgggattcggcgtgcttaacaaagtgagccaattataagtagtgatcaattaattatcccatttttgaaagatcattctcttcttcgacaagcccttttgggacacgaaacggtcctcattcggacgactcaacgacacttcgtaatgcctaataattagttggccttgccattttcctctcatcagtgagtcccgtggcgagctgttcat

SEQ ID NO: 16104 - DNA, 2874 bp, Heterodera glycines
gcaaccgacccaaaattcgacaaccatccaatcattccacctcaaataaatgcccagcaaacagctctaacgggcctcgaatgcgtttaattctggacaaattgccggacattaagggcaatgaaggaaatgacagcattaaatcttttttcaaaaaattttcacagtataccagcgattggccgaataaaaagcgcattgattccttggaatcgaaactcagtgggcgcgcagagcgagcatttaattcggctttggccaatgaaccgtttatatttgaaaacataaaaagacacattctccaacaacttgaggcgacggattgtcatgaaatggcagcatttgatgaattaatgcaaggcattcgccgaaagccaagagaagggctggatgatttggccgaccgaattgtgagcctggtgcgaagggcttatccgggactgacgcgaaatttggcggacgagtattcgattaaacacctaatccgcagtttcgataatgccgaacttgccttgagtttggagctaaatcgtcggccaggaatgagttttgatgagtttgtagctctagctgctcgtgccgaaacgacccaaaatgcggcgagaagggccaattcggacagaacgcaacaaaattttggccgtagcaagccacacagacaatatgatagaccgatggccaaacaaagcaaaaacgcatttgagccgaacaaattccagcgattcaatgaaaatcgaatcacgtgccaaagttgtggaagagagggacatgtggcgagaaattgttttaagcgttttgcagatcaggatcagcgtcgatattttagccaaaatcaaaatgcgaccggtgccaatagagcacaaatgccgacacattcaaatccgaatgtcagccaaaaatccgaacaaaatcagtttggacagcgccagcaacaccagcaatcacgaaattttctaaaacaaaatttcctggtcgaacagaacggaaagcaagttgagtcttccaatgttcagtgtgccggtgttatcagcaatacacctgaaatgttggattttttccgaaaattttggacaaaatgcgatgaaacggtggatgacggacaaaaataagcatttccaatcggcaaaataatggcaataaaggtcaaaatctacgaccaatcagcagattcaatgatggatagcggggcccaaatttcgcttgtacaggcgagttttgtcaaacacctcctagagaactcaacactgcaagtcgaaaatctcaaaattttctccaaaacgcgaaatgtcgtggacatcaatgggaaaatcgttgagtgctatggcataatcatcctcccaatcactaggaaaggatgtgaagcagttgaagtcccacttcacataactgatgcaccgattggcctgccaatactttttggtaccaatgccatgggactgttgggctttaaactttttgactcacaaaatggtgagctgatcgaatttgaatgcgccgataataaatcggattatgtacgcattgtctacagtacactgatcgaacctcactcaacaaaatttgttgaactttctgtttcaccaaaatttagcggcaaagactttatcctttctccaaacgatgaaagaaacgacttaagggtcgaaccatcgctaaacaaagagaggcgcggaaaaacaattgcagccataacaaatttttctcaaaatgcgttgacattaaaggagaatgaagaggttgcggttgtggaagcaattgaagatgttgctgatgtggaaaactgcttgggggaatcatggcttttctcagaacccagtgaggttaaaatggagaaaccaaagcccgaaaatgaggaggcaaatgcaaaatttggccttttgagcaaagagaattcggaaattcttgaaaatttgctaaataatttttcgagaatttttgcatttcatgactatgaattgacgcaaacagagatggtaaaacaccagattgacaccggtgaagcaataccggtcaaacaaaggatgaggccagtcccatatgcctatagagaaaaggttgccgcaatgatccaagactatttgggaagaggaatcattcgacactcaatttcgccatgggcttgccccattgtaattgtgcccaaaaaagacggatctttgcgcttttgtgttgattacagagggctaaatgcaatcacaagaaaggattgttttcctctcccaaatatagaacgtactcttctaatgctaggaggaccaaagttcttctcaactttggactttctctctggctattggcaaattaaaatggccaaaaattcaattgaaaaaacggcattttcaccgaatttggcttacatgaatttactgtaatgccttttggtctatgcaacgcagtcgcaacgtttcaacgcttcatgtcacaattgtttggaagtaaattaaatgattttgtgtttgtgtacatcgatgatgtactagtggcttctgaatcttttgaacagcatttgatacatcttaaatttgtctttaacaaatccaggaggctggattaaaaatcaaaatttcaaagtgtcagttttgcgctgaagaactcaaatttttgggacatattttgacgcgaaatggcataaaaatggacgcggaaaaacgaagccaattttggaattgccggtgccgaaatcgaagaaagatcttcattctttccttggatttatgacatattatagaaaattcatatattcatttggttctgttgctgccccattgttcaaactcctaaaaaaggatgtgaaattccaatgggagaggcagaaattcaggcagtttctacattgaaggaaaaaatttgtcagaagtcgcgtcctttatttcc

SEQ ID NO: 16105 - DNA, 1525 bp, Heterodera glycines
gatgtttaaaagcaaaagtgaaaccagaaacgcacgtgtcgataaatggattagggattgagtgcacgtttattttggaaattgagtataattcaggaaaggcaaacataattgcggatgtgctttcacgttctggcgcactgaagccacgtgaatgggcggagaaaatttttagagttgagcaagtcgatggaaatataagtgcttctgtgccaaaaatggaaatgattgagtgggtcaacgcaattaaggaaagtgagctcggaaacctttaccaattcctggaaaaaaggaaattgcctgaagataagcgggaatgtcagcgactttttgacaccattcataaattcacactgataaatgcgccagaattaagaccagtgattacggcggaaccttttgagctaatatgcatggacattttatcaattggaatgtcagacggggaaatcgatatgttttagtaatggtggaccattttacaaaatatttgatcactgcagcaattcccgataagagcgttgaatcagtcgcaaaggcttttgtcgaacaattggtgcttgtatttggcaagccaaaacgtattcattccgacaagggcgctgaatttgtgaataaaacaatggaagaaatcagccaaattcttggagttgaaaagagtacaacggcagggtacgacccaaatgccaacggacaagcagaacgggccaatcaaactattttaaatatgcttaaaagttcaactgattcaaattggtcctgggatgaccggctgccttttgtcacatttgcttttaacattactccctctgaaaccaccggattttcgccttacaatttactttttggccggccagtaaattttccgtcgtctgataatgttaattttactgtaaatccttcatacacaatcgatgaagaaagttatctgcagctctttcgtgaaaatttgttaaaaattttggaaaatgcaaaaaataattcggacaaatcaagagaacgaatggagaaatggtttaattcgcagccaaaagtgattttgcataagtaccaaaaaggcgaacgcgttatggttatttttccgggagctaacaaacgcttaacacataagaaattaaagtggaatatcttcggccctaccaaatcctcgaaatttccaaatcctcggcaaaagtaacgcctgctgataagaaaaatgctgatccgatttgcgtcccattagaacgtctgatcagagcaccagatggacttcctaatatttcaacaactccgcgcggcaaaaatgcttataaaaatgtgttaaatgtgatgacttttttgatttttgaagaaaaaagcatggaatttgaacaggaaaattttttgggaaaaacaaaaacttcatcagggacgatgaatttttcagaggaggaggaaaaaatggacattgccgaagcggagattaagtggacgatgacatgtgaaggcggcggacatgtgtttacaaagaattgttggccggcgatctcgaccccgtgctcagcaa

SEQ ID NO: 16106 - DNA, 443 bp, Heterodera glycines
ccattggatttgatggattagggctcatcgggttaggcaccattggatttgggaacatcggattcggcattattggatttgatggatttgggaacatcggattcggcatcattggatttgatgaatttgggaacatcggattcggcaccattggatttgatggatttggaaacatcgggttcggcaccattggatttgatggattagggctcatcgggttaggcacaattggatttgggaacatcggattcggcaccattggatttgacggatttggaatcattggattcggctccattgcatttgatagattcgggatcatcgggtttggtaacattggatttgacggatttggaatcattggattcggctccattgcatttgatagattcgggatcatcgggtttggtaacattggatttgatggcttcggaaacattgca

SEQ ID NO: 16107 - DNA, 1110 bp, Heterodera glycines
gaaaaatatttccaaaaatccctatttcttttttctatccttgtggactgagtcggcccttgaaattatatagcagtgaacccaatactttcttggaattttccagtacgggtttgtccgtgaaaatttgaaaaatatttccaaaatccctatttcttttttctatccttgtggactgagtcggcccttgaaattatatatcagggaacccaatacttccttggaattttccagtacgggtttgtccgtgaaaatttgaaaaatatttccaaaatccctatttcttttttctatccttgtggactgagtcggcccttgaaattatatatcagggaacccaatacttccttggaattttccagtacgggtttgtccgtgaaaatttgaaaaatatttccaaaaatcccattttcttttttctatccttgtggactgattcggcccttgaaattatatagcagtgaacccaatactttcttggaattttccagtacgggtttgtccgtgaaaatttgaaaaatatttccaaaatccctatttcttttttctatccttgtggactgagtcggcccttgaaattatatatcagggaacccaatacttccttggaattttccagtacgggtttgtccgtgaaaatttgaaaaatatttccaaaaatcccattttcttttttctatccttgtggactgattcggcccttgaaattatatatcagggaacccaatactttcttggaattttccagtacgggtttgtccgtgaaaatttgaaaaatatttccaaaatccctatttcttttttctatccttgtggactgagtcggcccttgaaattatatatcagggaacccaatacttccttggaattttccagtacgggtttgtccgtgaaaatttgaaaaatatttccaaaaatcccattttcttttttctatccttgtggactgagtcggcccttgaaattatatagcagtgaacccaatactttcttggaattttccagtacgggtttgtccgtgaaaatttgaaaaatatttccaaaatccctatttcttttttctatccttgtggactgagtcggcccttgaattatatatcagggaaccca

SEQ ID NO: 16108 - DNA, 964 bp, Heterodera glycines
aggctatagggaagctattccggaaggattcggtctccccataaatctgggcgcatcggttcggggggactgctccgaaaacaaaaaaatcgattttttcaagtgtccgtttggggtactcaaacaattatggggagcaaaaatccaacgcagaattaaagtacagactatagggaagctattcccgaaggattcggtctccccataaatctgggcgcatcggttcggggggactgccccgaaaacaaaaaaatcgattttttcaagtgtccgtttggggtactcaaacaattatggggagcaaaaatccaacgcagaattaaagtacaggctatagggaagctattcccgaaggattcggtctccccataaatctgggcgcatcggttcggggggactgccccgaaaacaaaaaaatcgattttttcaagtgtccgtttggggtactcaaacaattatggggagcaaaaatccaacgcagaattaaagtacaggctatagggaagctattcccgaaggattcggtctccccataaatctgggcgcatcggttcggggggactgccccgaaaacaaaaaaatcgattttttcaagtgtccgtttggggtactcaaacaattatggggagcaaaaatccaacgcagaattaaagtacaggctatagggaagctattcccgaaggattcggtctccccataaatctgggcgcatcggttcggggggactgccccgaaaacaaaaaaaatcgattttttcaagtgtccgtttggggtactcaaacaattatggggagcaaaaatccaacgcagaattaaagtacaggctatagggaagctactcccgaaggattcggtctccccataaatctgggcgcatcggttcagggggactgccccgaaaacaaaaaaaacaattttttcaaaagtccgtttggggtactcaaacaaatatgggggagaaaaa

SEQ ID NO: 16109 - DNA, 3669 bp, Heterodera glycines
  unsure (1)..(3669): unsure at all n locations
agcattgactgtttgctgtgtgaacagcgggacaagtgttttttgcgggtattacataatcccattaattaatnntgttggggtaacaaaaaaattgtttaattgattttttaattgtttcttgtgccttttgtatcaatttagctaatgatccctgattaggggggatgacaaaaatctccgccgctcaaaaaatccgggaagaccaaaaataaattctttttatccctcatatgttttttttttattcctattcaccaatgactactcttaacactaaaaatgatttgaagcatgccccaataccaagccttcagacggacacaaaaagctacctaaaattagggacaccctcgtttcgtcggcaatatcatcattggaacaggacgaatcaagctcaagcaaccgtccaacatctctttcgtgctaatggtcaacaacgatgaatcgccacaaaggagtaaagcggctcagaggcagaaaaacattcaacaaaaagaaaaggacgaactgagacggcatcaacgcaacaaactcttgtctagcattgcaacattgcgatcaagacggaagagagaatcggctcccatcagctcaaaatcaatcgtgattgatctttcatcagacagcgacgcatccggcattgagatcatacaaaatccagtcagggatagacaagccaaatcaccaaatgagcattcaacggcaccaattcctatggcagtgcaacggctaacaccaacaaggaagagttcatcagttgccaagcgaccagcattttcttccagcaaacaaccaaaaggaaaagcagcgaatcccgcacaaacaagccaaacaaatgaactcaacagaaaaatgaaagccttgtcgccaaccgcaagtggatcaggcgccaaccatcattgcgtcgctacattggccagaagctcggactcaacaacagtaattgataagggcagtcaacagaattgcccaaacatgagctcggcaacaatcagtaagacaccatgccaacagcactcgtccgagaagacgttaaactaagctacccacacaacaatcgtccgcaatgacgttaaactagcctaagccatcaacaactgtccgaaacgctaatcacccggctgccacgagtccggaatgacgttaaactagcaaagcatcggccaacccacacaacaatcgtccgcaatgacattaaactaaagaaccaaccaaacaacaaatgtccgcaaaaacgttaaactagcaaagcatcaattgtccgcaatgacgttaaactagcaaagcaccggccaccaaacaaccattgtccgaaaagacgctaaactagcaagcaatccatccgacggtcagggtccgaaatgacgtcaaacaagcaacgacaattggtcataaggacgttaaactacgtcaccaattcaagcaaaagcactcgagcatgcagctgacagcacgtttccggaagcaaattcacatgtcctcaacaattgaggaggttcagcagcgaaagaaccacaacaggccgcaaccgcggaggtcacaacaaaggggcctaaggccaactcaagcgcctaaaatatgccaatccgggatggcacagtacaagcagggtcgagggatccgccttcaccctgcgtcttctgcaatggcactcactggaccacgacgacgactcagcgaacaacccttgcaacgagagcaaggacacgaatccagtacgtcaccaggacgagaacgcagaccacgaaagagccaacgacacgccccagatcgcgtaagcacgatttggaaactcaagagcacggaaaattcacctttttgccgtcccccgccatcactcactgctcaatggctcaacctggcaattgagctcttcgcaaaaaatcatcaagcccgagcagatcacctttgcatggcattgctctgtaaaacgcaccacggagcgttattacactaatcttttggccgataagttcgtcaccatcgagaaggaatttccaccggtcaacaagcggatctgcaaacaaatggccattcaccaggaatgcccattcgccaagtctgaaatgacgaatcacgaagcacaattgtggtcaacgaatgacgaattggaagtcaacttccctggaccaatcgccggacttttcaactgctttgctcaaccagcaacacttttcgtaaaacggcacaatctgcagatgttttcgccagtccaccaagttcagaactgtcaatacgcaaccgaattctgccaactgcccgacaactcaaccctgatttggaaatcaacctgcaatggcaacgaatgtcaaacatgcgactacgagaaggcggaagtcatcaacggaaaattcactgcggcctacggagaatcaatggccacttggatctccgaagatcaccaaaaggcattaactttcgccaaaaatgcgccagaactcatcacctgcgatggcacacgcatcgtcatgtccgaacagaacttcggaattgccaaggagcaatacgacgacattgtcagcaccacgacaagatggaagaggcatccgaccagaacagctcgcatcacagctctcggcatcccaagtggcaacaagcgttgcgttaaatcagctctacacgagggaatgtcagcgaaacacgagggcagccaacccgactcttcaggccagacgcttactacggcaaccaaacatccaagctcgttggatcggcgaaacgacaatggaagtgtttccatgtgtcaacatttcgctacaggacatctcatacaggccaatgaatgactgtcgcctctacattcccgtgactgcgcactttcccgaccgagctatcgcagctttcttggatccggaacttcgcatcatctcgctgacagcacaacaggcaagctgtaatagctaccggttccatcatcttcaactgcgaagcaatcccaacatctggttatggattgactctcgaaccggcacagcacgacgaatgccgaaagactacgtccacgaattgtacgaaacaacgatcaaccaaacgaacagcaatttggaacttcatccattgatcttccacgcatggcaactcgacaatgagtctgacgcgacacgcttcccgcacatcaacgaattcaacaactcggagcagttcaaggacaagctggaacagcacattacagcaaggactgaagctttgggcgcgttgaagggcggaatagaaggattcactatgcgctggctaaaaagcctgatcgacgaagcaatcacgtggtggattcgagtcgcctgcgtttattcaaccttcctcatgctgcgcgacattgttctcccatgcactttggcgtatttgctcaatcccatccgagtgactcttctcagcctcgttggagtacgtccgcacccgacattccgacccaccgtttctaaaccactcgggatcgaagagggaatgccgctgcgtgaagtgccacgaacccccaaaccaccagcgcgcagggcagagcaccgatccatgtcaccaatcaaattggacatgattgccagaacggctcggtaccaacaaccacgaacacagagccatctcgacctcacagaagactcgccctttgngaggccgagacgaanagaattctgacgggccccatccnntttcgcgccngaatgtcggaatttt

SEQ ID NO: 16110 - DNA, 1045 bp, Heterodera glycines
attaagagaaaacagctgtcaaaagtcagtcacagatccatttatttttagttgaaagtccataattatcgactaccttttttctattttaagcggttgtccgagcggaaaacatcgcgaaacaggcggatgtaattgcggcactgactttggacgtgttgaaaggcacaacgagggcattcgacgcaagtgggcattttaaaaataaaattagatattttctggaattgatcattccccaaagatgttcatcgcgttcggccccaccatgggcaaaatttggttgccggtcggctgcgagctttgctccactcggacttgaaccgatccgagattgccgaatcgcaccggcactgcggcaaggtgcaggacgcgtacacgttgcgctgcgtgccccaggcaaggaaaagaaagaaaaataaatatttaactctcgagacataaaaagtcagtcattatcaataacagtctcttgtttaccaattaacacaaaatagtttaaaagcaagtattttaaaattaaatgaattaaagcgaataattaaaaaatatatttttgtaaaaaggaaaattttatactaataattatctcatgctgagacgaaataagaaaaatgcaaatgataaaattaaaagcaaaataattatttttatttttatttaataaaatagatattatttaaaattagggttcggaccccgcccccgccccgcccccggggacgggacaggttttttggcctcacccccgcccccgcgaccttcgccccgcgggggcacgggggtgaaaaacacacccctaagaatggcatattcgtgaaattaaaggcaaaaatttatacaattttgaattttttaacctcttttacaaatttttatgaaataaagtaaatttgcttgtggttttatagaatatttgtggtttagtggttagtgcttcaacattaacaatacttgtgatgagttcgacaccggttgacggtttcgtctgattttatttttttttccatagaatacagctgtctttctatggtgttattgctaa

SEQ ID NO: 16111 - DNA, 3437 bp, Heterodera glycines
tttttttttttttttttttttattattttttttttttttttttttggggggttttttttttttttggagtaaaaaaaaaaaaaaaaaaagggtttttgttggggggcacaaaaaaaaaaattttttttttttttttttatttggggaggaaaattgggggttttttttttttttttaaaaaaaaaaaaaaaaaaaaaatccccccggggggggcccaaaaaaaaaaaacaaaaaaaatttttaaaaaaaattttttataaaaaaagggggttttctttttttttgaggacgcttttttttaaaaaaaattttcaagcaagggttgatttttttaaaaaaaaaaggaaaaaaccattggggaatttttgggttggatttggtaagccttttatttttttttaaaaaaataaatatttttagcaattcttaaggaatcaaaacattctgtcccggtttttttgatgttttccattacgcttttgttacatttgtggcatgtttttgaaactttttaataattacgaacataaaaatcggttatcaattttaattaatttattattaatgtatttatttattttccatttttagctcattgcacaacgcttgtcacattctgatcgctttgcaacgcttgtccagcattttcggcttttttgagcttttcctccctctctctgtgcttttgtggccctcctccgaccagcgaagcttcttctccaattccacatgtttttgcttccaatccgttctgtttgcctttctcgtaaacatcttcactttgatgtttgccattggctttgatcgtttgctttgcgttttctttcccatttggtcagtttttaaactgataataataattgttttaattgtcataataaagaaatattaattatcttatttacttaatttgttttaggtatagaaaaagaaatgccaaattttattctgccgttctcttgattctttctgtgctttatccgttatacacaatctatttgttgtacacaaatctactggcgcaaccaaacgagtaattacctaattaattaatttcttaattaattaacaatattaaatttattttcaactttttaatgcaatattaaaaatcattgattattttatttcatttctttcatttttagtaaaacaatgtgtacgatgggttcttcgttgggccatgacggtgttataattgcaacatttgctaatatttgtattatttactcttccgtcatttgctatttgattctttacgccaaattaaaatgggacgaacgaaaagcgaatggaataagtgaaatttaaaacaaattaaattaaattaaattaaaagcattcattttaatttatatttttaaatacatttgaatgttcaacccttctccatttttagctgttgtcgcctcacaacccttcattttcaagtcaatttcgctcattcttttgctccaagtcgtcggttggtccggcggaattatcgcattttttgtcgtttcaattcattttggggatgacgacttaaacctccaaaaatttctggccaacagtgtgattaattgcttcgtttgtgtgtgtgggacttttgaaacgcctgtcctattttttcacaggtaaaaacaagcaaaacattaaatcatcgtcacaaatgccatctctagcttaaaatggtggcaagattttcaaaaatggtggcaaaacagtggtcaaatggggtttttgttggatggttctgtctgtgacaaaaagacatccgttcgttaattaacccaacaaaataataaatataaatattaaatacataaatatttcagcagcgaacaccaaaaagcgatgcgaaaagaatggagaaacattgtacaattggtgaagaagtgttctccgacgacatttgggcgtaataacaaaactggcaccgccgttgttttggtggtcagtcggccaggcaaaccgacggcgaaaatacggggcgaattcggaccgttcaacccccgcattgtttcggcagcaccgaaattggcagaccaaacaacggcacactgacaaatgagtgccgtcggatcaatgcaaggtcagttcagcccccgggcactgtcagcagcagcagaaggcacggacaaaatcgatcagatcctgacggattcaactttccgtaatcaaccgattcgaaattgtttatttgctacgctcatacagaatgttcaatgataattcaataaaatgaaattttccaaaataaaaatgaacaaattgagaaattatcaaacaaaaagtgggaaagtctaaatggatgaatgcatatgctaatgaatttgttaattttcatttttaaatattctttaattgtccatttccttcttcacaacttttaacttttcgagtggcaaaattttttgccgcatttctcgaggcatttatcactgacacagccgcacctgcaacgccaacattgggccatattggcactaaaattggtgtaaattttagatggataaaataaattgaaatttactccgactcaatgttcatttggatgcaattctctgcgtttctcgcaaaacgatttctaaaaattttaaattcatcaattggttcataagaaggatagatagaatcgcataaaattagacttatttgccttggtttccccctttatcccccatcccggccccgataaatgtttgatggcgccgtgattaatattaattaataattcgttaattaatgaattataattaataattttaacatacattgaatttgggacgacagcacattcggctaaattttgtataaaaattgttgaacaaagaaacattgagacaaaaaagacaccaccaaaataaaagcaatggaaattcatttgaatgttaattaaagaatttttgtttctttgttaattaatgagttcactttcatttcattcgttcgttttatgtgtgaaaattgatcagactcattaagtggaaaaggtcaattctctgaagaaagggcataaacaacgcaacgaccgactgatcattcattgttttgtctattctttgcttggttaattaatgcgcattgtgttgttataatatttagttaatttgattataccaacaaagtgcaattaattaattgattgaccggccttaattggactaagagagagagagagcgagagagagagagactcaatttttgaaacaaattaaatattcatcaaattaacaatttgaaaattaacaaatttaagaataaagtagaaattattaattaataaacttatttcacaaaaaaataaagcgaaaatttgaggtgaatttgggtgcgttttgttcagcaacctgtttattgttagtccccccgattagtgtgtttattgatcaatcgtttatgcatctcatctcaatagtaatcatcatcatcttatcatattattagttaattaa

SEQ ID NO: 16112 - DNA, 2241 bp, Heterodera glycines
  unsure (1)..(2241): unsure at all n locations
aaattttcatttccttcacaccccgccccgacttcttttcaaattcacaaaaaaaaaaaaatagttaattctccgacnacatctgttcatcttttaattgctcgnatcgcagaagtggcgagcaaagnccgaaaagcggctgacggcaaacgataaaggcgcctattgttggccgaaggggctgcttggataaaccaatgacaaaaatgttgatgttgaaagtgaaaatgaaagaatgaaagaaatcacgagaaattccgatagaaaattgagctcaattgaataaataattaacggccaaaagtaattaacgaaaacttaaaggaacagaagcaaaaaagcaaaggccaattgttgaacaaaaataaagataatgaaaattggcaaatgttgccaaaaataagatgatcggaaagaaattaattggcaattacgagagtcagcagttgatggaacaaaaaagtcatttggaaaatcctaggcattttgcttaaaacaatagcgatcggacagcatccttacctttttgttattcatttttttttctctcgagcaattaccaacggcttttagtttttcttatcaaaagggatttttccatttaagccaaataattttaaaactactaaaccaaaacaccgaagttgtcaaatcatcaatttttgatcgaacggaacatcacacagtcgaaagtgggcgagatcggtactgatcagtgatcacagcggaacatttgcggtgcggacgtgacttttcgaagaaggcaattacggacggcgtgttcaactacgaagtggaccaaattgaagcagtctctcgaacggacaaaaaggtgaattcagtttttgaaaaaaggagtgattaccgtaggccaatcagagaaaattgccaacaaaaccgaaattatgcgagaggtggatataatggtggattcgcaccaagaaatcctaactttatcccgcttggtcaaaggagaatgtggaatggaaataattcaaattctaacagatttaacaataatgagccaaggggaagaggattcggtaacaggggcaattttcagaataatcgtggtaatttccaaggaaatggtaatgaaaaacagagataccgaataaatatggtgggagatgaacaaacacagtcaagttcatcgagacgttctccgactccgacttttacatttttaacaatttcgatggttttgtctattttgtttggtacttttagtctgtcaaatgcacaatatcaaatttgttctgaacgagttcagactaccccaattctgttaccaaatatcacgaattgctctataccaaaataccaaaaggcggctgaaaacaaaataaccttgtttttaccagtgcgcttacctaaacaatttgtcgtttataaatgctatcaaaaattaaccaaaatatgcaccggaaactttttgtttttatggaaaggagtaaatagtcaggagacaacggtgaggggagtgtctcacgaaacttgtcaaaaatttaaacataaaatgggcggctcaatgaatcgacttagtgagaatctttgggccacggaaaatcctgaaaagttgacatatgcctggactggcgaaaaatgcgagacaacagtaaatgactttttggaagaaggaaaagggggaattttggactttttcctggtcacttcttttgggcataatttaaacccgtataaaaactgggaagaactgccaagaaagacattcatttgggaaatccctgagccaaatgagaaatattgggctacacatttttcggttggcgaattcaaggccgaaataacagaaaatgcagtggtaattgaaagtgagcaaagtgtattttatttcgaaaaggaggcgactgacgaaagggagggcataatcggtgttcccgaaaatgcctataaaatgtcaaacgatgcttttattgtcttaagcaaaacggaaatacgggaaaaacgagaaacacctaaaattgagccaaaaagaaaggaaaggccggtaaaacaggaagttcaactgaaaagtgaaattggtaaaaaggaaaacgttttgaaaacaaaggaacaaaatgctacagtatatgttttaccanagagtactgtaaagctggtcaaggacagtcaacaaaaaatgccaaatccaattanaatcttacctcanagtactcnaagtacagtaaccacaacttctaaacctcaagtcaaaatctccacaacagtaatgcctgt

SEQ ID NO: 16113 - DNA, 2204 bp, Heterodera glycines
  unsure (1)..(2204): unsure at all n locations
aaggggacggtgaaaatctctcccttcttggtgccctaaaggtcttcgnngggnagntgaagcggacgttgttgtccggctgtcccagcttgttctgcaccatgtccttcatcttctcgaaggtgatgcgctcgcaggcatccgagtcgagcgtgatgccgcgcaccttcagcttgtactcgtcctccccgttgcgttgttgcgcagccacaatccgtacgccttgggtccggctaaacaaacattccatttattttgtttaatttttaatcaatcttaccacaaataaactccataatcgtgtggttcgggtactcgtcagcgagttccccgagctgctcaccacccggaaggatttttgaatttttcttttgcagctaaaattaaacgatagtaatgtgttttactggtcccgaaatttttaaaacgtttcaaggcgcgttttggagtgctgaataagaagtaggctttctttttctgccaattccgaaccccgcatccgaacatattttcaaaaaaattattcttaccaaaatcatgaaagcgtatttcgaatggttttcagggtagctgatcatgaattcgggcaattctggaaaactcacacatttattgacattttttccaattttttggcaactattttggcatttttctgcattttagcaaatttttctgcctttttatcaactctttaggtatatatatttctcgatttttagcacataaaaatccatccctatcattggaatatgttgctttatgaaaccaaaatacttacaaaacataaaaaaatataaaatttaagcaccaagaaaattttgtgccctccaagactctcttctcatcctgctgatttccttcctttcccttttcaattcttcacgaaatgtttacgctattcacacgtaaaatcaattgccaaggtgactttgtcctcgtctttgttgtacaaccctttgcttgggtccattaattccttaatttaccattacaatattaaaatgtaaattaactaattaatttccactcaccgcaaaagaaatgaaatagtgccaacccaaactcagcagcgttgcattgttaaaaactttttcattgtattctctcttaaaatcctccacaccgctcttttgagagacaattcgaagtgttgccgaacattttctcttatataatttgataagcaaaccttttttacaagcatcgcaccaaagataaaagcccaaccatttctcagtgctttcatttttcattttgatatatgccaatattttccatggcattccctttatgtacacagcagtttcacttatacggtcactttcttcgatttctcgtgcaaattccgatagcttttcaatttccatcgaaagtgtgccgttggatttgtttggatcggaaataattttctcagtttttggctcatccacaatgacatcaatggccaatgtgactttgtcctcatctttgtcgtaaaatcctttgcccggatccaacaattccttaattttgatgattttatttggagatgcatgaaaatcagcaatgtttccgattataactttaattttaaatcaattatgtaatataaaatcatggtgagccaaagttacaaaagtgtcaatgatagaaacatttaaatttattaatagttttaattttattgctaataagaaaccataacttagcttaaatttagttcaattaataaaattggtattaaacgatgcattacatatcctatcaaatcctatcttatttaattttttaaaatctagaaaaaatttacaaagagttataaccaaaaaatttcaaaaatttctattcatttttttgtcactttcttttttaaaattttaaaaattttaatttcaaaataggaagtttattaaatttatttgaatcccactcaccgcaaaactaatgaaataaggaaatccaggattatttaattccttattaaaaatgcgatcaccaattcttccaattaaatcctccgtgccattcttttgtgacacaattcgaagtgttgccgaacttttacaagaccaattttctgcacaataaataaatatttaataaaattaccattttatttaaatacgatacttatttaagttgaaagagtacttttcacctacattttcaatttccattattcttgcattcttttattgtttacacggtacttttccattatg

SEQ ID NO: 16114 - DNA, 3480 bp, Heterodera glycines
acttaccaatggagcaaaaaagacgacggctgcagttcgtatttaatcgaaaccccgcaaagtacggtgttcacgatgacaccattttaaacaacgcaggaaacccaataactgacagtagtgtcgcccaagctctcgactatattatagaacgcagagcgggacgaattccacagtttagacagcccccaggaacaaaagttattcgagatcgcattaaccgtgacctaattttgcgaacatggacggctccaccagtaccaccaagggcacccaaacggaaaatgccacaagaagaccaagcgccggaattaaatcaaaaatcccaaaagctcagaggaatgaggcaggcgagaggcagggaacaagaaggattgacacttccgtttccaacgaggggagtcaagcggaagtcgacggctctgtcagcagtagaaacggaaattccaaccaaaagccaacgtctccgaccaaagaaatggacaaatcaatagaaaaggtgttagaacggctctacaatgacccaaaatcccctgctgcgtttgccggtgtcgaccgattgtggttggaagccaaaaaggaacttggaaataaaattcgtaaaaatgatgtaaaacattatctggagggacatcgcacctacacattgatgcgtccaagacgcatcaattttccgcgcgctagaacaacggctgccggttttatgaccgactgtcaggtcgatttggctgactttcaaaccctttctcgacacaacaggggaaatcggtatttaatggtggtaattgatgttctttcaaagcggatttttgtgacacctcttcgtaccaagaaggctgatgacatggtagacggctttaaagaagtgttttcaacgatgccaatgaaaccacacagaattttctccgacaagggtacagaattcagaaatcagcagctgaaaaaacttttcgatgaagaggaagttgagaaatatgagagcacacattctgagaagaaagcagcattagccgagcgcgcaatacgacaaatcaaaaatcgggtgtatcgctactttgcccaaacaaaaaccctaaattgggtggatgtaattgatcaaattgttaatggtattaataaatcaccgagccgggtgcatggaatgcgacctattgacgtgaactttaaaaattcacaacaaatatgggaaaaaatgtttggagatgatcagcatatggctctttttggaaagcccagaaaacgagccagatttgtccctggtcagacggtaagaatgagcatagcaaaaggtcaattcgagaaaggttatatacccaattacggcgacgaaattctcgaagttgatgccgtcaaacgccacatgaaaccaatgagatataagctacgtgattcaaagggggagaaatttaaaggatttttctacccggaagaattggcacccgtacgtaaggatgccgagacgacgtacagaattgagagagtttttcggaaacggaaaatgcctgacggaacgacagaagtactagtaaaatttattggataccctgaaagggaatggattcatgagacccaacttgtataaatacttgtaaacttagcattatatcactattttttttgttgcataaatgtctaacacattctttgtgcatttacccagtaatagcccagactacactgagaatacaccaaataagtttagagttcgtttaccaaaacctatttatttcaatggctcttgggtatgcggattacacagcattaattatgcctattcttggccatcaacgattggaaccttagatgatcagtggatcaacatacattttacggatggtttagataatgaaaggcttaggattgttcgagtacccgtcccgaaagcttcaaacacaacaattgaaaatttaagaaattttcttatttcaaccctaaagaaccatgctgagtctcttgaaaagattataaaagatggttcacagaggtcaataaaaagaaaacgggccgcttctcagccaaaatcacctcctagtgcaattgtaccaaagtcacaacctaatgttactcccaatgtaacgctaaatgttaaagtaccaacatctccaccacgagttggacagcagccacaagctaaatccgagggcatttctgattcgattttaaatgtaacaaagccatctgaaaagcaaccgaaaattgaaaaagagtcagaaattgtaaagcacgaaacagaaaaaataaaccagaagcccacacaaaatatttcactacctacaaatcagacgaaaaatgtgaatagtgaaggtgtttcacaaaatatcattcctccaccacctgttacaagtccgtcgatacatgcgaataagcaaaatcaagaacccaaaaagaacgacgaatcaccacctcaagtcgggaagcctaagcatcaattaccagtgtagacccaagatatagtgtcacaagctcagaaaaaaataactgctaaccctgctcaaaggaatgaccccaatcaacaaacgttgattaatgtggggaaacagaaggaaattggtccatcaccaaagcagaggaccgaaaaaagtgcaattgaaatagccccaccaccacatcgatctacacccacttcaccaatacgcccaaatgttactgagaaaaaacccacgtccccaccaaagacaatttcaattgataccattggaccgccacccaaacagagaaatgaaaaaagtctaaatattaatcagggtcaaactcagttagtcactgaaataacacctgaaaatagtaaaaagacaacaataacaacaactactactacgacaattaccgaaccgccgaaagaaacaatcgatgatttggtagggcaaatgaagaaccaacggaaagaaaccgtgtggaggagttgctttccggcttgtttggagatgagaaatggaaacaaataaacttacggatggttagacaaatcattgaaggagtggagttacaatatcacccaaatcttgagcggtttaaagcggtttttacacacccgagaattgaatttatctctttttctcctcaacttaattatgtattaggttttgaaaacgcgcagcacgtaagaaacaatgagattgccaattatggaagtgatttacgtggtggttttgcaagctttgccgtctacgcaaaaaggttgactgaaaacatgattgttggaaattcactgagttctcttctccgtgttgtctcagtgtcaggagcaacgccgggagaatacactgaaaaaatttacgactcccccctatacgcacgtgttttaccaaaagaagtgtcagaaattcaaattgaattaagaacaatgaccgatggaagattagtaccattttcctatggaacagtgctaattgtactgatatttaagaaggtgataaatttttgaattcactcattattgtataatttaacataatcgattaaataaaatggttcacattc

SEQ ID NO: 16115 - DNA, 2302 bp, Heterodera glycines
  unsure (1)..(2302): unsure at all n locations
ggttgcatttntgctttaaaacacaaaaatcaaaaacatttgttagatgatctgtatctaaaagtccaccttttacttctaccgcatttattaagtcagtttttgttgaaaggattaaatctaggaaggattgctccctagttggttcattaatgcaagatgtcaaattatatttattaaagaaatcacaaaataaattaccaaaattacttaaagggaaaggttttttattttttatagttaaatctttagttccaaggttaaaatccccaagtatacagcagttttctgaaatgtaaaggtcaagaaatttgaaaagatttttggtattttttaaattagtagatggagggcgataaataagaatcaaattattttgacactgggtaaattcgacactttcctcaaaaattttgttattttatacccctaaattgaaactttaacacctattttgaggtttttagaaccgaaaatctaaatattttggtatttttgaatattggcaattttcgtaacaaagtgcacttaaatttaaattttcaattttttcaaaaaaaattttcacttgggaaaagtcccggttggtcccggtcccgggttttttcgctgtcccggtcccggtcaaaaaagtttgtcccggtcccgacttttctggtcccggtcctggtttttgtcaaatttcccggtcccgaccaactctagttataccaacctaaccttttaaaaagtacgaattagaaaatgaaataggaaaatttatcatacctaatactaacaccaaaatttcttattaatttttaaaaattctcaatagtgtcgaatttactcactgtcgaaatggtccagtgtcgaaaatgctggaaaacagtgaaagtttttgaatagttcagtgtcgaaatttctctatttcggttttcgggccctggaagccctacaaagcgcttttgaaatcaattgaaaattcgggaaaaaaattctcgatccaatttggaatccggagaccggataaagctggtaaaatagacaacattctattttaaaaatttttacttagagtaatgaaaaagtattaatggtcattgttttatttggttagttggagatgcgcaagttcggatgatcagaacaaccaatgcaaaaaattgcaatgatcagtgatcactgactgatcaggtttttttgaattatcgccccaaaatatcgctatttggcattatgagtcattgtctaacactgacactgggtttgacgttttactcagttataccaacctaaccttttaaaaagtacgaattagaaaatgaaataggaaactttatcatacctaatactaacaccaaaatttcttattaatttttaaaaattctcaatagtgtcgaatttactcattgtcgaaatggtccagtgtcgaaaatgctggaaaacagtgaaagtttttgaaatagttcagtgtcgaaatttctctatgtcgaaaacgtagtgtcgaaattacatagcgccggtcccaacgctaaatagcggaattggcgtaattttttgcgcgttaattcaaaatttacactggtaaatgcctttttgaatttttttaattttggtctgccataactcgcttcattctgaactaaacttgacaaatttagtatctaaaaaaagttttgaaatgaagaatcttttcttagcgaatgctaagcaatttcacatctcacaaaaagttgtgagcctttcaagaaataaactggatataatattcatgaacatgttttagttctttattttgatgtttagaattctttaaacgaggagaaacgcaaacagcgtggttcacgtgtgatctctgttcctatttcaagtggaattcgctctgcttctgtgctattggctcccgttttggcatggatcgtcattctctcgaccaagtttattctgcaatcatccaaaaagctttggaccttcgggttgagagtctttcgatgcctctgcttggtacagttttattgtcatactttttatattctttaaatttaggaactttattttcctcgcttgataccgcatcaaattatttgtgggcttgccttcagcagttttcttcatttggtcgtttaaaggtaaatggaaattattttcatttagccaactccacattttagaaaattcaaatcgtggacaccaatgatttccatatgcgatctcttcacaaattcatcattgccaaattgcgtgctcagtcacaactccaaaatggttcatctgcttcaagtaactcggaaaacaatcaatcggacgacagtcggctgac

SEQ ID NO: 16116 - DNA, 1685 bp, Heterodera glycines
ttttccgtgcccccctccccgcgtttttttattttggcaattttccgcttttttgggattttttccccccttaacccccccgggccgtaattattcatatcattaatgctctttggtttgttcccattcatttttttctatttttattttctctttttttgcaaaaacaaaggcccgattttgatggatttgcataattttttggctttttgctctttgaagaaaaaagagatcgaaaatagcggcaacatgtgaagccaacttttgcatattaatgttttggcgtcgttgggatttggccaaattaaaattaattaatttattgtttctaattttctatttttgctcatttggcccaattaattaattaaacactgacaaaaaaaagtaaccaaaactgctgaaatgtgcttaataaaagtaagcaaacatttaacaaaaatactttgatgttccaaaccttctgactagaataaatttggttaaactgataagattttttaaaatatttttgatgattttgtgtaaataaaatggtcaaagattgatgcccaattgaatttgcttcgtgcggaaaaactgtgttaataaaagtgattagtgaaggtcacaaatcggaaacgcatgtgatcatttgcaaattatttgggtaattaaatggcatttgacttttatcggcccacaaattacggtaattgtgctaaaaggccaaagattccattcaaatgattgattatttgtgctgattaagcgaattttctccgtaaaaaagccctttaaaaggcatgccaaaaatggaaattcattcttcggccaattctgaaccccggacgcgaattcgaacaaaaagctgcaagtctaaattttcgaattaagcattttttgttcaaaaacggcataaatgatcatctcctattgcaggattgatgtatttcagtttgtttctgtgtatttaaaccgatttgaagaaaaacactaatttcgaaaattttgactttcgattttttgttcgagtttgggtccggggttcgcaattgagaatgattttcttatagaagtttacttctatattacaatactaatgccatagaattttattttaaaatatttgcatcactgacgcattttccactgacgcattttccactgaccgattttccggtcacgggtggcacgagtatcaagaaaaaataaattttaagagattgaatgaaaaattccagttctaggggttaatcaaaaaaaaaaattcagtttctgaaatgcctttcgaccaattctaaaccagggacccgatttctaagcaaaagtcgaaaattaaatttttcaccaaaattcacgtttattgcattaaattattaattaaaatatatttattatctatttctttctctctctctctaggcaaatttactttttaactatttaaaaaacattaaggtaaccaatattcctgaggttacaaattttccgtacccccctccccgacttttttattttgccaattttgcccctattttgggacttttcgcccctaaacaccaccgggccctaattattcatatcattaatgctctttcgtttcgttccattcttttttttctatttttattttctctttttttgcaaaaacaaaggcccgattttgatggatttgcataattttttggctttttgctctttga

SEQ ID NO: 16117 - DNA, 1485 bp, Heterodera glycines
tttcaatgctttcatccgcttcttcttcttccgctggcagcgacaatggcctaaaattatttatgttttttcgacaatcaaaaattgcttttgctgctcacccaatgcaactatttccaccccacaactcaaatcggatattattcaaattggcacccgaataattggcatgccgtagagcaaatctgatatagttagaattggcacccgaattttcgcggttttcccacttaactggcgccgtcgccgtctctccaattgggtagcgttgcaacagcaaattatacaggcaattatagcctaattcttcgctatgtttcaatgtcagcttttctttcgtccgttcattcaccaattcaaattgttcaattgacgttggttccacatgaaaaaacagttgaattgtgtaactgacagaagtggtggcacgacggaatgcctaaacacaaaaattggtaaaacgaaaacaaattgacgaaaatatggcgagacacacctctttgaagctgttgacccattcgaaatttggtggacccaacaaattatagcgatacaatcgcttcggttggccatttttgctcggagtgtgaagccatttggtcaacgcttggccagcagttgcatttggtccatcgtcagaaattccatcgggtaaaagaccaacagaatcgattgaattcaattgatcaagatcagtgagaatcgttggtgaaatcagacgacgcaaattgtccaaagcatcgccactggtaaagctcaaatggcgaatgtttgtcgcaaaaagtggccaaatttgacggtccaaaacatcccaaattcgctggtcacaatattcaatatacacttccaatttggtgccacttctgtcccaaatttgcttgttggaacggagaaattcaatgacggaatggtcgatgtaactgaagaaatataaaaattgctttaatatatacaaaagtataaaattgctttatccgaagctccttaaagcgaattttgatgggcagcgaatggtccggcatcggaaaatccacccttttgccatcgatccattcagacagtttcgcatttcgtcctttgtccttgcgaatttcgattgctttccaaattgtcaattcgctttttccatcaaaatgcgtgtcaaccaaaacatcgaaacggtcggaaagcaatgccattttgagtccgagttgagcacggtcaaaagatggcagaatgtccatccaaacatccgcacaaatccaactgaaacatgaaaaaaaattgggtaaaacgaaattgtaatttttcaaaagaaattgcttaccgtctgttcattttttcgctattatgcatccaaaaagtcttttcgacctctttatatacctaccaaaataaaagtgagagatttgaaaacggatgaacggatggggggagattaaaatgatttgttggccaaaaataatgtgcatttgtctattggaaatggccagcaaatttgggatg

SEQ ID NO: 16118 - DNA, 2510 bp, Heterodera glycines
gtccctgtgttcgaacacgtatcgcttgtgctgtttgtcaaatggcacaggtgtctcacagtcgaacagtatggcaaatgtatgaaatgtggccaaacagtcggcaagtgcaaacgaaaacaggcccatggcttggcaattccctaaacaaaatcaacaaattagcataagccaaaatggaaaaattaaaaaatttaaataattcaaaacaaaaccactccttgtgacagacgatccaacatctcaagcagcaccggtgcttcatcttccacaaactcattgcgctcttgtgccagcgggtacggtccatcgagtacaggtggctgcgagttttcgtcacggttttggctcatgatttgtttttgtgtctaaaattttaaaaattaattctttaaatttgaacaaatatttattttgttgaaaaaacacaaaatggtaaaaattgggacaataaaaaaaattttttaacaaaatttggagtgatagatgcaaaataattcgtaataaatggacaaataataaataaattttggcgaaattattatcagactggtgtcaaattacataaatgaatggcacagcggtgtggcgcaagacaaattccagacaatctttttaatttttaacgaaaagataaaagaaacggtgtcaaattacacaaatgagcaggtgtgagggaggggcaacgtaaagatgtgaaattaaaaattattggtcaaataaacaaacgcccaacacctgaaagggtgctgtaattatttttgaggagataaaaaattaacagacaaatcaataattaaacttaaatgtatttgttaattcactgaaaaatatttatattattttagaagtaataaaaaatttattttaggaataataattaattaattaaccttttaattattttaatttctaaattatattttattatacggtcccccatttctttttgcttttaaaagagaaaattgtgaattcaataattgatttgtttatttgaccccctcccccttctcgccgcctgctctcgcccccctcccgccactggtgacgtcaaattttccctttatgagagcaaattaatgtttattatccattgccaatgtggccgagtggttagtgcgtcagtctggccgcccccctggggttcggatccgcttggtgcggggaatttttgatgaattttaaatgaatttaaattcaacggctttgacctttaagacgtttaaaattaatttaaaattaaattaatttaattaaaataatttgcataaagtcgcgcagtcaaaaaagtcgcgcacccctgcaataggtttgggtttccaagaaaaagtcgcgcaataggtttgggtttgcaaaaaaaagtcgcgcaataggttttggcttcagtactgaaaagtctggcgctcaaatggcccgcgctcacttggcggcgctcaaatggctggcgctcagttggccatgcacccctcccacacctatggggggctaccgtaatccggtgaaatctacaagggtaactactaatcttttaaataagagcaattttaaaaaatttagaatttaaaaatgatatttttttattgtaaatagttatatatttattatttataataattttggttgagtttcaataaatattatcttgttaaaaagggtattagtgccgccatgtcggtaatgataaaatttaaaagaataaagtttttttattaataaactgttttttatgttttttcgaattttctttcatctatgctgttgtttgtggagaaataaagtttaaatagttgtaaataaagagatttcttggaacaaggagacggagtaaccctgatttggtgaataaaaatgcttttttctgctaaatccattaaccattaattcgtctggaaaagataaattaatataatttaatttcaaaattacaaacacaaaaattttataatttataagctttgtttttaggatttttattttcgcaaaaagtttttaagttaatgatttttgttattctgttaattttttgatttctgctatatttttaattaagcttttctgaactatttaattgcttgtttttgtataaatattaattattaattcattttccgttaatggatttaagttgttgtataaaatttattcaatatttttaattctcatgtcctttgctccacgatctgtaaaaagaaaatttgaattaattataaactcaataaaaattatattaatttattattttctttaatttcatggattttgcttaaaaaaattattcatttgttgcaaaaatattaatttactttcaaaatgtatgacattttattttatttagatggtatttacttaaagtttatatttatttttacacatatagaattatttagtatattgaaaataaatagtgaattatttttctatagttcaacataataatgagaagttatcgctgtttgcatttgaaatttgtatacaataacttttttcatcatttattttttgctcct

SEQ ID NO: 16119 - DNA, 2980 bp, Heterodera glycines
aaactttggccttttctcttccgtggggatcgttttctttgttgacattgatcgactggtttctgtccttttcccattaaagtaacgtgtgggaaaaagcctgctgatgtttatagattatattaatggaatttaaaaaattttaatcatagaatatttcagtagaaataattagattttagaaataaaatataaatagtaagataaacaatcacaaaagctataaagaaaaattcacaaaatattttctctaaggttagtaagtcataactgtttttatctctctacttacataaatgttaaaataatatcatgttttaaattattaatctgttgtttatcaatgaatgagattcattcacagttatttgggagattatttgaaaaatagaaaattttcaatacgcaaaactcccttcagatatggtctttgcgaggagcatcttttcatttatattttaccaatgcttacggttacatttggatacagtttctatgtgcttggcgaagctgcacaatgggcactttttgtctaccccgactggtaaattaagctaattttttaatttaaaaatatattcgttttttcaatttttaatttaattttaggccagttttgtgcacaaattctgacatgttcagttttggaatgtccacaatgctgctgagaaacggtctggtgatcaatgggctgtcattgatctgttatttatttgttggtttgtcactgttttgggcttggcagaaaagttagttggactaaaattcaattattttatataacttgcatcttaaaaattaaatttgcattcatattttgcaattaaattagcatttagtaattgaattaataatggaaaaacattgaccatttttatttaattatttttacttaattgtttttttcacataagtgaatttattcattagacgaaattttcgttgctttttgtatatttgattaaaattaatttccattctttccgcacttgctttcatttatttttataataatttatttaaaaaatttataaatattcactttttcttaaaatttttaccgttaaattgacgcgatttttacgggacacaaaaaaaaattttgtagcaaatcagctaggtgtaaaaaatttggtattcatttttctgatttaaaaattttttaaaaattacgtttgccattcatcatatttttaccactgatcctttatgcaaaaaaagaataatataaaacaatagtaccaaattggaacgtagtcttttaaagaatccttaaatatttgtcaatataaatattttttgctaatttttccatttaagacccgagttcagtgataaaacatcgcatcttcaaatccctggcttcgataatgactttggtggttggcacttattttgccatttgcttcatccgattgctgctcgcttccgtcagggacccaattttcattttgcacatttcgccttccattagcgcactgcttacggtcacagcggcgagcagtaatgcgcccgttctgtttgcatttaggtgaaatttgataagttaaaatccaaaccaaaatttccattgtctgtctcttttttcaaataattgatcgattgggattaatattttaatttttaataggttaacaaaaattgcccatagatacaaaaagaaatttctaatttgtgctgggtgttttgcatataaaacgtatttcctcgattataagccccctctcgattagaagcgcctccctcgaatatagccccctttgaagggggtttcaacaatagagcccgggggcttatatcgagaaaatacggtatctatttgttttctcagtaattagttgaaaaacacccatagcaattttttcttatacaaattcttttgtttttcatcaaatattcaatcgaatttctaactttttagcactgaatatcgacaagcgttccgcaaacatctcagaaaattgccattggccggcatttgtttaatgcgaattggacaacagcagcaacaattgccaaatgctgtctccatggttgccgttttcaacaatgcaattcctcaaccgagcagtgttggtcgagttcggcacatcacaacaattgggggcggtggcggcaccgcggtgccaaaaacaatggcacccattgactcataaacattgttttggcgaattgtacgctaattataaacccggcgggattattttatcaaccttttcagaaagggaggttatttgattttaccccaaaatggcaaaaatgtgtttggagcaagaacgttacaaattacaaattttttcgcccgagcgctggaaatgtcgactttttgggggcatttttttcgagggttcaaagccatttttggcagtttttgaatcatattttcgtgcatatttgggcattttcggttttttctttctgttttttaatggtgtcatataattttctgaataaaaattcatttatcccccgggatgataaatggagacggggggattatttttcaacctcctcagaaatggggtgggggattattagagaatatatgttaagcgtttcaatttttacaaccattaaaggcgacaaaattcattattttggtatgcttttattggtttaataaatattaaatgaagatattgcaaacaaggcgagaaaaaaaatcacttgatccattttttaaaattccgtaatcgcttatgcatttaagcttttcctttctgtccaacagaaaagcttttcttaacatatatcattcattttgtaattttaattatgaaaattattttttttataattatctctgataatgaagtttttataaccagacaaaatattttaaaggtataaactgatcaatcactcatttccgatcaatctccatcggtcgtattttcaatcgttttgctctctgatcactttttccaaatctccgcatcatttgatgtcgctgttctcaaccaaaattgctctgtgcgtt

SEQ ID NO: 16120 - DNA, 2213 bp, Heterodera glycines
  unsure (1)..(2213): unsure at all n locations
atgcgatagcatatagcgcaaaaaaatatgtgaaaactacccccccgttccctgatgataacttgaaaattttaaatttttaaataataaataaataattaattaaattctattcacatttatttaaaggtattctattaaaatggcacattaggaaatgcaccagcacgtttcgcatcaaatggaatttcggacggaattattccgacttcattttttgccttttgcattcatttaacaaaagtgttgcatattttaagaataaatataaaaattaccattctcatattcagaatttagttcggacaattacaattcaaattagcgccaaatattgataatagtccccccaaatacaaaaggcggtaatttatatgaaataattctttttttagtgccttaagcatcaaatagagaagatagtttaaacaagttttaataccaaatatatccccggtatttagtaatttgactagtcttatttttggatgtgttataaaatttggaattattcgttcataacttaattaaacttgcttttctgcaatgtttccttttgtttattaggataaattattttattattttcaatttgtttgactttgaattttgcattttctgtaattttattattaaataatgcttttttctgcaaatccgttatgtgattgttaataaaaatttattttagtttcacaatttattagatatacaaattaatttttccatttaaatttatccaacgatctgagagattggtcattagttcttattattatgtgctgctaattgttttattttacattgtttttgttcagttttgcgttataaatatgatttgtttttctttattaataattatttcgttaattattatattttaaatttttcacttgcttttctctttttttcaattcacgataggctagcactctaccattcgcatcttcgtaggggtgattgaataatttgtaaatttataatgcgttttatgtaataatcttttcaaattattaagatactatatttctaatttatcgtatttgaatattaaataatatatgtatatattttatatttatttctatgacattttttcaaataaaaatttttaatcagataaattattatacatttatttaatgtttttgaattattatttttcgctttttcggttttcctttttccgttattattgtattatttgtctttctgtctatcaattcgcattaacactgactctttcattgttttgggtttacatttttaaatgatcaattatttactaaaaataataacccaaattttcattaattttttataataaattttttgcatgtttaaaaaattaattctatattatcatcatatttgttctgtttttgtgatcttctgacttttaaaatgtaaaaagttttttatgttgctttttaaatttgaaaaggtaattttaaaaatttaggccttttctggtcttgtgggttttgagaaatttgaattattaattaatacactataatcagtttataatccataaaaaacaaataaaataaatatttaattaaaataagaacaattaaaagattatttaactaatttatatgtgccgaactttatgtaaattaaaatttaatttcatttttttctcngtattaaatgatattttttggcatatttacaattattagctgttaaattttattatacattagttttttccattttgattataataaatttaattgtttttctttgaattttattataatctttttgttaaattaataattttattattatttttcattaaaatattatctttcaactattatataatatattctgtttagttgataatatttctttttcttttttttggtgtttctatggtttttctgtgttaattgagccatttttaatatttatatttaatttaatttttatttgctttaaaataatgtatcgtttgttgttcatgttgtttaatattttttatgtttatttgtttaatttttgcatttttaatggtttctttttttcattattttttttatttccttgcaatttaaaatttttcttcatctgttctattattctaatgctattattcattttatgttaaaataatatatatttttcctcattaacttttttccttcatttttttcaaaattctcgcccgttctcccatttgcgttcgggaatggatgtat

SEQ ID NO: 16121 - DNA, 3125 bp, Heterodera glycines
  unsure (1)..(3125): unsure at all n locations
tttctcttttcttagtagattatatttattgaattttgattgattcatgaaaatatataagtaaatttctctttatatattttttaaattatatttattttaacttatataggatttatttaattgtatcttttaattctcgtccactcatctgtttttgctgatattttttatcttttcttaatagattataattactaaatttgatttgattcattaaataaaaaaatattatttttaaatttcttatcgattatacattttgggtctgattattttcttatcaaaaattaacaattttcaatcttaaatttttttggggacaaattttgagaaaatttttcatttcttattaccgtatatgctctaattaaaacaacctgtgtcaaggaacatcattcgaagaatggcggctacactattcatggacactgacattaaggtgagaaaacttgtattatgctattaaattaaaatttggttaaggcatcagttggatggctgcaattcaaaagaagtgatcatcaaatcatttgagggtcagttgcaaaaagaaaaataacagaatttttagtctgtgggttgacaacgccattggatggaacgggagacgaaaaaatagcttgcttaagccgaaaggggcaattggaccgataaggatcaaacttttgcgcgagtttagggcaactgaaacggtgaaagatgggcgaaatgatcacgaagaagacggcctctctgatgtgatggtgatgtagagttggatcaagtcggagatgaggatgaaatacttatttgttagcgtgttttactgttattttttttgaaaaaatttgatacaattttccaaaaaaaaaattcctttttatccccccggggggataaaaggagacgggggattattgttcaccctctcagaaggggggggggggataataggagnacagtgagattaaaggagacagggggataattagagcatatacggtatattttattgcttgaagaaagtgtcatcaaatgctgaaaaatccggtctctattgattatatatatatattttcatttcatcgtttgcttatagtttcatagtttttcatttattttttaaatttatttttattatcatttgcaaagcgattacttttcttaattaacataattaattttttcgatgtcttaataaaaattgtactaatcaatctatcattatttgttgtattaattattttctattatttgccaatttattttgtctgttttgaattttatataaattttctcgtttagtatctgtgcttctctgatgtacatttcaccatataatatttcctcatttttgtaatttatttattattttttgctattttaaaagactatttaatttttctgttaattggtccattttttgaatggtctttttttgtattccatttttttgtaaagctaaatttaattagttgcgtttatagtagtgattttctattaagtaggataaatgaatgatcttactatatttaattattgtattcgaatatttaataataatattaattccatttctttgaatacatttaattactaatttaaatctcaaaattcgttttgtattatcctatttaaattttcaattatttgttttatttttctccattatcttaaggattacttcgttatgaattttagaatatttttggaactcaggtctttttataattatttttgcaattaatttttctttttctcaattaattcattttctatgattaatgttttgaattttatattcgagttttaaaaatgaataaaaatattttaattcttttaaaattatgcttttttaagctgtttaagttgtagtggaaaatgttcagattattttttatattaattatttttttgtttatattttatccaactgttatagaatcttcttgcttctttatttaagggatttttggattttaatatatttagaaaatacccatgctaaatgtagcaaatataattctaggatctgtttgctttttgtattcaattttaataatcctttctcaatttttcaatttaaatctttatttttagatatagtattttgattttgatttttaatttttcatcattttaaattattctaatttggttggatagttttcaattaaactaatcgttatacatttttttgttaaattatgaacatatattgaactttttatataaataaaaaaccatttttgattattttggtcttttttagttttttaacaattcattgctttttaaaaataatattttgctttttcatttcatcttttattttcaaatatattaattttatcattcttttaaataactttctcgttattttgccttttttctatttttgaatcgcaaatgttacgatggattaattttttattagtttttctttttgtttttaaatttttgtttcatttgagaatttttataaataaatatgcttgataaaaaatttttttttctcactaaaactataaaataattaacaattttttattttttagcttcatttttccgaaaattttttatttaattaaatgattaataccttaggatttaaaaaattatttttaatattaaattaacttagcttaatgagattgtttttgttgttaattttaaaatatttcaataattataattgatatcatcatgttatttagtttttttaattttttaatttctttttcttttttcaaattctcgtagatacgtcttttttatgttcgggaagatgtagaaaaagatgtttttatcttttctagttttttttataattactgaattttattttcgacccttagggtgggggtgaaaaaaggaaattcgataattcatttttcgttggattttattgtcatttaaattggttatcatttgtaatattttatttttgtttttaatttttttttgaactcattaatttagctcgtatttttgttttatttttaatgtttattttttctccttcttactaatacaaatatccagcttttttaaaaatttctaaaatcaacaaattacaaaaaatttaaatttttcgattttcaagcgtatatttttaaattattttttaaattcccanaaaa

SEQ ID NO: 16122 - DNA, 2048 bp, Heterodera glycines
ccccccccccccccaattaggccgagtacgaaatgatcacgaaggggcccaagtcgcgtgccttttaccgcgtccaggcgacgcgtcgcctcgtcggcggtggcgacatcgtgcgcaaaaggttggagcgcgagcacgacaaggcgggcgatgtgacagtgcaggaacaggagagacaggcacgacgacacacgtgccgcattttcttcgacccggcacattacacagtgctagagagtgtgggcgtattcgacgtgatggtcggaagggacggcgggccggacggactgacggtgatggcggattattacacggaggacggcacggcgaatgctgggtcggactatcagccggtcaaaggcacgctgacattccacccggaggacaaacaccaggcgagaatggcaaaagatgggccaaaccatttgccaagggatgaccaaatgattggcaaaagatggagcaattagttaattggtcaatcatttgtcataatctttggcaactgattttgccaattgcttgtttttgatctctttgttgcccttttcagaagattagcatcgaaattgttgatgatgatgtgtgagtgtcgcttcgtccctttgtcttttcaatttccgtccgttttttcagatttgaggaggacgaacacttttacttgcatttgaccaaccttcgggtccgaactcgggacggactcattttggacccctcgcgaatcggaggagtgccggtggccatgttcgacttggtaatgaggcatcatttcacggcatataaatgcctctgcaatcctctgtaatttattaatcgctcccttcccaaatcagccgaccaccgcgaccataatgatccttggtccgtttgcctaattgaccacttattatgctcatttgtttgcagatgatgaccatgccggagtgttctctttcgagcacgaccattacgtaactgtggagaactgtggtcacgtcactctgcgagtgcagcggacgagcggatgccgtggccaagttgtgttgccgtacaggtggcaaagccgggggaggggaaagtgccaaaacaatgcgaattgacacgaaaggaccatcgacggcacggcatccggcggaaagcatttcgaggtcaaagagggcgaagtggttttcgagaacaatcaaacggagtaagtgaaaggaaaggccgaattggaaagtgccacaatttagggcattcatcgacattggcatcatggacacggaacagtacgaggtgagtgattggtgagtgatcgctctgatcactccagtgcctttacaatgtttgccgtccattcattcctttaattcattcttttaagcgttccgactttttctccatggaattgaaagatccaatttggacaaagaaaatgtcaggtcagtgagtcgtgttgtgttgtgctttttctgctgagttcttgcgaatcgaatgccgaaattaatgtttcggcttaaattcggcatttgtttggctttgcttctttaactttgtgcagttacagtaatcattgctttgtttgtgctgtgtagcgattaatttccattagtgtttcgattcttgaacattccaatattaattggaataaacaaatgcaacagacgaataattggacgacatgctgatcagcaagtgattgataagcttaccaccaatcgactgattctcccattccttcgatgggtcccttttatgggatggcttttgtttgactgaaaacgaaagataggtttacggtaggcagtggttacggtccttctacagtcgaaggaccgccccttttgtccgaagtgtgccgacagatcagcacttccactttgtcttgctttcaatgactatctttccctccctcccttctgtcgttgatcgcttatcttctgtttaccttccccaatctctcactttttcttttgcttccctcgctttgcactatttcctttgctttttttctcaatcacgtgctatttccgccttcgctgaccatctgagtgccctctccgcctgaagtgctctattcccattgcttc

SEQ ID NO: 16123 - DNA, 2341 bp, Heterodera glycines
  unsure (1)..(2341): unsure at all n locations
tctcgtttattaccgtattcgcttcctctccctacagtacccgtcttcgtgcagttccgtttgtgctgtccttcggaggtccttcccgtgcctttgtcgtgtttctgtccgcttcgtccctttttagccccccaattttccgtccctatttttcgttttccttttttcaatttattcccttcaacagatgaaaatccgctcaatttgacgcctgatcagcttcaaattgccgaattgggaaagccgcggctgggcgaatttcgcaagtgccaaataaccatcaaagagagcaaagattttcaggcaagttcaaagaagggaaagtttgttgtgcaatatttatcacttggtcaattagctattattgattggttatcgatcggtcattgcttttttataatttcgtcctataatcggtcattgatcgggcttcgtcgtgtcccccttctgctgcaaccgctcatttatggccatatccaccgtgatggccgtgctctcctccaccatatccaccgtatccgtgctgtcctccatggttaccgtagtccccgtctccgtggtgtgatccatggcttccccaaccactaaagcatttgttacattttgtccaactccacccccccccccccctcctcggcttgttacttgtcgtgtccgtccccatggccagtggcgtagtcgtgtccgtcgtcatgtccgtctttccatgcgctgttgtaccccttggcgtacgagtcgccctgggctttgtttccctgtcctccgtattggtaactgctccagtccgactngtcgcctttggcatagcncgcggcgtgtccatcatctgtggcatagtccgccgttgccaatgttcgcttcgtcccatttcttancatggtgtctccatgtttgtacccgtggtcccatccgtctttcttgtggttgtcgtggccccagtcccgtttgtgtccgtatttcccgtgggttgttgtcgtggtcgtggtgcccgtggtcgccatgccatcctccgtgctcacttccgtgccaatacggtgtgccatgctctgagcgttcacgaaagaagtaaaaaccaaaaaatgggggaaggcaaacccgaggcatttgaaagtgccaaaaagacagtggcaaggagcaaagacagaaagagaagacgacaagcagaaggggagcagcagaaagaagccatttgatgccgagttgttctgttgagcttgttggatgtgagtgtttcgaatggttttcttctgcgattttcggcgcttaaatacgcgcaattggcgcccatcgctggccattcattggcccaatcttttcgttgactattggcataattgcccaaacgcaaattgcacctggcacataatcacggcttatgatcatataatgccattagcgaacgattgtccggcagcaaaagcaaattctccgtcattaaatcatattgtggcatcgcaaaggacgaaaagcgtcaattattgacggggggggaggggaattgcccgaaaaacgaacgaatggacggacaaataaatgattgattatgcaatgcgacgatcgtcggcagcctttggggagggactgactgtccggttggaagcaaagaaaagcaaaaagaaaagaaatgaacagagagagaaaacaccaaaaggtgccgctgtgaatttgtgttgttaagccaattaaacgaccgatcgatcagagttagccaatctctgatcagttgaccagcagataaccgatcgatcaccatgtttagaccacttgatcagattactatccaagcaaaccatactatcggatcagtcgcttttaagggcgttgtggaccgaatgctgaaaacggccaatgcttctttcatgctgggcacctcctcctggcgcgaacagttcatcgacgctctgacggtgtccgccggcgacggcgacgacgaagagacggaagagggcgagccgagtgaggccgacggattggcgaagcagctgacggagccggcacagccttccaaatctgactatttcgtgcgcatgtcccaatgtccgctgacataagcttcttccccttcagatgcattttctgtccgtcccttggaaattgctcttcgccacaatccctccgaccggtgaatttttgcatttttggcattgtgtccccaaaatccgccgtttattttgccatattttacgctttttcagattattggggcggttgggcctgttttacggtgtccattttaatggtaacaattgctatttccccaattttggccttcttttcctaagattggcctgctaactgcggtcattggcgacttggcctcacaatttgtatgccaattaat

SEQ ID NO: 16124 - DNA, 1012 bp, Heterodera glycines
aggcattcctttggcttttagacactttcgccagcaaagtgtcagctgttcaagacaaatacgccgacaattccattggcaacgtggtaaaaaggagcggctaattgttgtaaaatgactttgttgtccaaaagactgggtccaacgcggtcaacgttttcctcggcattggcatcgcgtggacattggccgccgtttaccattggttccagggctccgtgttccgcgtcgacccggggtgccttcgtccgactgtacctgtctttgcctaattacccccccccccccctcattaggaccctcgccttttcggtgaccattttttgcatcgaggccgtcatttgcataattgtgattgtggctcggagacataagtctgtttagctttttgtttcattttgaatttgtcccattttaaagggccattggcggcgaattgggcggtccgcgcaacttccaaatggccaccagtgcgttcttcgcctgtctgtgggccttttacattggcatctccgccctcgagtcgtactgtgtcatcgccggcttttgaaccactcaattggcactctctcactctgtccgtccgttttaaatcgttggcactctgccaacccctctccgccgatcgctttatcccaagggcacattcgcttacctttttcatttgatcgtccctttgctttttctcccccccccccctcaaatgctcattttttgtcaaaatgaaagtgcctcactttcctttatttcccacaaaatgcaaatgatcaatttgctgactttcttctgatcagcagcgattgctcatttgccttattctttggttgactcctcttctgccccccccccaaattaggcaatttctccccgcgagttcttttttctagtcgaattgtacggttactgtaactcttcgctgctgtgttactgtggcgttgattgtactcttttctcttcttagtttaatgttcgttttttttctctgtttctgttgtttgtatctgaaaactca

SEQ ID NO: 16125 - DNA, 3684 bp, Heterodera glycines
catttatggaggtcaaaatttacaaatctcaatgcttttcatccatttttacttacatttttcaaaattagccaaaatgcgatgccaaagggcaatttgaaaaggagcaaaaggacggcgaatttactttttgtgtggacgaaaaaggaaacgaattggcaggtgaaggcgaaggcatggccaaaacattcacattcctttggcatttgttaaggaagtcgtcgtcactctgatcggttcgtcggatgcgaccaaaaaaaacgctgtccgtccgtccaatgccaactcaaatgcccatttgggtgcgtttctcttctttttctctgcttgactttcgcagtttccaattcgattccgtcggctgtgccctgtgccaatgccgtgtttcgtcttgcgatggcatcgcatgtcccgagggaatgatctgccgattggtcccccacttttgttcatccgttggccattcgaattcgtcttgcaatgttcccgaatgtcattattttctttcgcgtttttcctaatctttagttttaggtcttccaaatgtttgcctaaaaggagagcctttggaagacgcgcgaaacggccgattgattcaatgcgatgaaacggacggcggcgaatgcccccaggggtggcactgtcgccaaattggcaccggacccaagggattttgctgctcgggaatgcgttcgcaaattcttttgaattccatcacagattcgagtttcagtgcttcaagccgagcttttgccgccttcaaatcgatgtccagcagtgccaaatttaagttacaaatggccccggcctggccaatctgtcgggtgccggctgaacggagaatgccacaacggagagtcgtgttgttttgacggggtttcaacgcagtgtttggcactttccgaggcggaatattctcctgaaataagcacaaaaaggggtgtctctgatgagattgtgatgcgacagaccaaacaactgatgccgcaagggttgtcccaatcagtgagtcatttggccaattgtccgctccgtctgccaaacgcatcctccgccgactgcgcttcgaattgtgcttctgacgcggactgtgcccggcggagtgcctttctccgctgctgtccttttgggtgcggaatgcaatgccaatttggtgacagactgacgccatgcgttcacctgttggcctcaaatctgcgcgaagttgacaagttggccgaagtgccaataagtgttggaagaccgacggtgcaatgcacggaagaaggacagttcgaaaaagtgcaattcgacccatcaaatgggtaggaaagggaaaacaggtcgaagaagtacaactcgaaagagcaatccgaaaagtggcattccatggaacattccctccttcgcttcagtcaattttggtgcgtcgatcctttgtccggcattgaaagcgtcggctcgcgcgtttccgcctcccctctcgcgccggtcagtccgccggactgcagcgtccgccacttttgcaagttcaattgttcaacgacggcttccaatcgctgtccgcacggacttcggatggaccaccgcggctgtccgttggacgaacggtgcgaatgccgaaacccttgcgaagtgccgtttcatcactgaactcgcggcaattcctccgtttaggacttcaaatgctctcttacggacagtgaaatttgtctcctcaaatcggtccaatgcgtcgacgactctttctgtccaccgatcccaatttgtctttcgcttttcgcctgcttcttctgctccctcttaattgcctttttaggtgttgagaatgtttgcgatcgcttcggtgctcaatccgtcggtctttccttctgttcgtttgcctccgattgccaaaaacaattgccaaattccgatcgaatcttcgactgcaaattcatttcatcgcatttgcccttcgatcgaattggaatttgctgtggttggtcgatcacttccaattgtccgattgttccttttcttccctttcagcctttccctccgcccatttgttcaaagaacagtcgacgaacgccgaaggcgaaattttcaatggccaaacgaaattcgaaggcgaagcgaagcagcagagggagaagcaaagggagaaggaaaagccaaaggaaaagcagggactgtgcccggcagaagcgaacggcggaggaacggatgaaagtgccaaaggttttaacggaaattacacaataagaaatacaacggtaaggtgagaagtaaaaagccgaatttgctgcaggtgattgtcccggtttgtgttcctccgattcggattgtgccggcatccaaaagtgttgcccgaacagagtcgacggatgcctccaatgtgttcagccaattctgacaacaagtgggaaagcggatgaatgacgtcatccttcgcttttcctcagattgtctgaatttgctgtcggccgttctttcgctcgattcgtctcacgtcgaacactccgtcccgaagccgaactgtgaccctaacacaggtgagtttgtgcttccgtttggcttttcccttggcattgtcccttaggcgccttttcgcgtgtccaatgcgatcactttggcttttgttggtgcgttcgttccgcttcttctgcttctccgctcctcggcacgcgtcagtttcagcccaccggaggagaaagcttttgtgagagtgcgtatcttttggggtgtgtcgttccatttcgattttgctttagccccaaaagtgtgccctttccgccaatgttccgccactgtttgccccttcggcgtcgaattcgacttggacggatgcccactctcttctgagtgccgttgtcgcaacccctgtgacggaattcaatgtccgattggtcaaatttgtctgcttcgggcgagagattgtctggaaatcgaacagtttccgcccgattctgtcgcccaatttggcacttcttgtcttcctgtgccaatttgtaagttttgcggcctcattgtgcttttgtttgtgagggttggcctaaaatgagctttttgtctctgttttgctcaccattcattgcggctctcaaaaggcgaaccgtctccctgcggcaatgttttaaagcctttgttaaattcggcacttttgatgccccaaaaatgccaattgaattccgacaatcggccaatttctctcccccaatgccccgccgcatttcaatgcatccgcccgacggaatattctccatcggccgaaacgacgcccgagggcatttgctgcccacgggtgggaaatgatggcaacggagcagtggaaaatgcgatcggagaacagcaaatcgacgaaaatgagagagaaaaaggcaataatgataatggagggggggggggagatgagaaaatgtttttgcgcttttcttttagccattttctgtcttttgcccgtccatcagggaaatgccgtggaaaagtgcggagaaaaccgttcggagcttcgatatttttacgattcgcagaaagacaaatgcgaagtgcgaaattttaaaaaattaaagcgaaccaaaacaatggcactgattttgttcattttccctaaggcctttctgtttgccggctgtggaggaaatgcgaataattttaaattgaaaagcgaatgcgaaaagaaatgggaaacgatggaaaatcggcggaagggaaaagcgacgg

SEQ ID NO: 16126 - DNA, 3430 bp, Heterodera glycines
  unsure (1)..(3430): unsure at all n locations
ttgacgtcctcgtaaacgcgcaatggccagcgtagtcaagtggtgaagacggacagatttttggcgtctaaagacgtcgagtgccttgttcaccaccnggggccatgtatttgaacatcacctaaaaattagctaggttatattttttaaattaaaaaaacgaatgttccaaccggagcaatgcttagggaaacgcgttgatcaaagtcaccctctagcggatttgttttaaatttcaagatcagccatgaccggtcagtcctcgtcatgtgcagcatggactcggtgccagcatgcatttcaagtgacttgacggcggaagtgaagctaaataggcgaataaccagaaaacttagaaggactaacaataagaagtatttaaaaggtaattaattagctttggaacctaaaaaagacataaaagtggcaaatgttgttttaccgcattgcactcgcagccgatctctgctccaatttagcggacagttgagaaaaacgcagttccatcacattgtccaacttcagctttagcgttttcaggtgcactttgaagacgttgtccacaaaatgttttgggtagttcatcggtggcacattttcctgcccaatttttgttattgtaaacatttgaatttcctttttcattctcacttggtagtcaatggatttataaaggcgacttttttccattggggtcgattccttctcgaatttttcgaaaatttgtgcgtcttccaccgcttcttttccctttggcgaaccgccgaaccaccaatttttggcccaaccaacccatccctcctgcggttggtcctcgacacggacgaggtcagtctgtttgtcgatttcgaactcggcttgttgtcgcgcgatgttcaagttgaacacgtccagcgcatcctcagcctcctgtgaacagagtaagtgcttttcagagtaaaaaggcaataataatatgcgattaaatttaaattttaattgaacaatttgaagagaaatcagctgcactctctctacctcaattgtgtccatcaccgcttttctgggcgttttgtgagttctgaagtgaatccacgcctctcggtagtccctcaccatttgccgatgctttttcattctgtcccacgaccaattgtttcggcgccgcaagacttgctcattgagaatgcaattgtatgcaaaatgccaccggaaattggcaaaataataaatttagtttaaaatttaaatacacatgacagaaatgcttaccattctgtgtagtgctgacgatagtgtgtcagattgggccgatatttgaggaatttctcggccaaagtgaagcgctcttgggcctccagaaacagaagcatgtcctggtactggtacttgccgatggacagtcccaatttgtccaattgcattgacaaatcaattttgggagtggtccaatttgagccgtcactctccggcttctggttcagcttaagctgtgcagcaatggtcaacggttccaacactgtggaaaaaagggcaacaatttcttgtttttggaattgccaattcagtacccaccgtatttgtacccggcgggcttcctcccgtggactgcgattgtccgttgcaaagcgctgattatcttctctttgcttttgaggtcggagatgaatttggagttggcgtttgaataaatgcttaaactgctcatggacaccaatctaaaacaaaattaatgaacaaacaacacataatgatgatagtaaaacgatgcactcacttgtaaaagattttgacagtttctttttgcactatcagtttgaaattctcatccgtagtctaaaaagcgatgtaataaattaggaaaataattcttccattgtttcccccacctgaaaattcaacgagtccaaagtaattcccgtggcaaatgggcgttcgcggttcgagaatttgtcctcgtaacgaatatggacccgtttaatatgcacttggagatttttgataatttgtgctattaatttctcggtaaaagtgtcatccgatgacatagttggctctaaattctaaattggttaacaattgacacatttgtccgactttggcgacttcgtctgttctgttccaattgtaataactgtttctgcttggcttcccgctcagttttacgcgctttttctgcgctgtaaacaatgccctggttcggcataatgataagatgaattccacttaaattttaaaaatttaatggttcattggtttttacgtattacagcgcacctaatctccacgattgtcggctcgacgtacaaatttttccatggtattttaagcaccaaactttgaatatatccaaaactcagcttcaccggcaagtccaagccatcaagcgctgtgtccttgatcttcaagtgattaagctttacatcgcctccccaaatgccaatgttcagctgggacgcatttaaattgtccacataagcgcccaaaaatcgattaagaagatccgtgacaactgattcaaataccatttcaaatttttctaaaaagttttcatcataaaaaggcgtatgtgtgaaacaaaatgataaatgaaagaaatgtttttttttattaacattagcatatagtctctaatttgtaggcaaagagagtgtaaattgtttaacattttaaagcgggaccccatggattttcaaaaatctgttgtttgaaaaataattttcggggttattgatcaggagtctaacatgacattttatcaatcccgaacctgaactcgaaaaaaagtgaaaaaaggtgggggaaaccaaagtgagaggcagtgccttagaatcttggaaacgggaaagttcagattactgacaattttgatcttgcacatggattttatatcattcgactcctcttgtagcgagaagcacaatagtgaaattttagggcgcggtaacgcttttaacaagacccggagcgaccgattggcaaaaaagttatgtcttagaaacgggccattgattgaacgcttaaacttcagcagagtccaaatgtttaagcagcggggtgagaaattatgtaaacggggaataaggaaatttgcaaaataaaatttttgtcatagtaaaacacaatgtaaaaagattacggaaattcctcagagttaacatggatgaaatggatatcagaatcggattctccaaccctggaaaccccaaaaaataatttatctcgaaaatttttattttatttttataaaaagaggtcctaccatcgacagtattactttgaaagatctgacatacgtggggaagttatgccgttgattacgaagattcgaccagattttgctttggacatcgttatggctttaggagcgggggaggggagggggtcaggtccggttcggacccattttgccggaatagaagactcgggtctaataatcgaaaaaatacgg

SEQ ID NO: 16127 - DNA, 3009 bp, Heterodera glycines
aggagcaccagtgggggtccgcatgaatagcgaacatcccttcacccgtagaaggggtgattatttggtgtgggtgcaattttgggtctttcagaccagctggagccctgcgctcattcaacaaagtcatgcgaaagaagcgaagctcttccggagtttgttgttggagaagctcagtgagctgctcacgcgcctgcttatatgcctgggcagcaggatgatgcacttggatcatttgttctaagatctcaagagtctgctcatttagctggtgaccctgcacaaactcatcttcgtttgtgattttctccccagtaaacctggggttgtttcgacgctgttccatagcctcgactgggtccagaatgtacaactggccaaagccaggaatctgagttgtaccagcctgcatgctgcttatgcggcgatggaattctccgttaagaataacggccatcggaccgccagcagggcttggtttgttgccagcggaaacgctcgcaaattggaacaggttgttataacgcgacatgtgtcgcacaaattctttcccttcacgggattgcttattccccacaatcagctctttgagctcatcaggatgcgggttaagcattggcagcacaactcttcccttccggcagcaaatgttactgtcttcatgtgagaagagatgtgcaccgcaatcggcgcattttttgtcaccgagtttcccggagtcacaatattccgggaaatgtttggctgctgctgcagcgcattgccaccccttgtgaaatgcagagcaacgccgtgtgatcggcgttgccattcccagcgaatttgctggcgggggtcgttttggcgccggtgaaggcgaacggctaacagaagctgaaagccttttttgcacgcgcagtgatcgccttggtggcgtcttaggtctgacgaagattacatcatcagcctgcgcgattggttcttgctggacaattgtgtccgcaacaacaccgtgggtgtcagcttgattttcgccgatcactggtgcttgcgcaagaacagcagtttcttccgaggaaggaagtactgctgaatcatccacttcaattggcactatgtccttggaggaagtttgcgctacatccccattgtgatgagacacaacagcgaaagatgttgaaacaccttcccttggatgaaacggcacaatatctgagccataaagctcatttatgtgccataaaatgcgcttcttctcataattgatgttcaaatccggcagaacaaatgtacggttgttcatcagccaggattcagcatacaggcacacgaagtacccgcagctgttaccatcattttgctttgtcaattgctgcacgtattcaacagcgaatgacgcattcccgggcactatctcagcaattattgactggatgagtgccattctctcatcactcaagctgctcatatgcagcgagtcaaggaagtatgcaccatgtgcaacatcgtagacgatgagagtccaatgatttgggaagtgaagcggcataagcacaacttcaggaacagcattcggatcatagccgaaagtgtaattcttcacgttggaaaatcgagaaacatcagttctcgatgccaaagaatccacaactactgtttttcgttgtgaaatgcttgcaatgtaagctaaataggcaacaataaagcgtgggccaagtgctgtttcgccatcacgctcataaaggccaattgctgcccatctccaaattttacaggcaaaatttcgcgatgtggcgaaattaattggcacagtgctgaagtcaattttttcagacacaatgtgcgaggttgccggaattggggcattttcaagattgttatccatttcagagcttttgctcatggaatcactgagtctgcctcggcctgggcctccaatttttttggcaggtcgccctccacgactttgagtcgaaacaggtgttaaagcaatagcttcattggcaaacatgggttggtcacactcggcgaccttttccctttttttgcacggcgaatcctggtcattttgagtgaccacagttcgatgtatgtcaatgagagacacactttcttgcgtagccaagtttggcttcgctccggctttcgagggcctgcctctttttttacttccaatagaagacgccggcgtgcttatttgcaaagcacttaagcttggggtggtggtgccccggagagatgccgatgcctctccattcccatctgcactcccgtctgagacgggtgagttatcccgactgacagatcgctctgcctgtcgccgatacacatcttgcttcttctttttcaaattttgttgtttagaaggcatctaaaacaacaaatcagaaagtattacaaatgcggcaaaaatatgaggtaattaaccataaatgtacacatatgttaaaaatttattaacaaaaaatgcacaaataaaggtcaaagacatcattttcgctgtggagtgtagtcgtcctgtgctgaaatccatcagtcagggctcacacatcccattaagaatgcagatgcaaaaatgtccggtccataacccaaaagggcaggaccagccacaatttttggtgcgaaccacaatcccccttaaggataggtccagcgacgacttttggtgctaaccacaatcccccgaagggttaggtccagcaaccatttttggtgcgacaaatgcatcagagcgccagacagcaaaccacattgcgacgacaatgcctcgaagggtcagacaacgaaccactggagcgacacattccccgaagggactgtcaacaaaccacattggtgcgacaatgacccgaagggcctgtctgctaaccacattggtgcgacacaatccccacagggccagacatcgaaccttcttggttcgacacatgccccacaagggccagtcagcgaacagctttggggcgacacatgcccgaaaggatcgtcaaagaacaccattgttgcgacaatgccccaaaggcctgt

SEQ ID NO: 16128 - DNA, 3011 bp, Heterodera glycines
ttctgcaaattcacttttttaagtcaaattttaaaaaggcgtaaattaaattttacaataattaatacttgcttaaattacatcaagttaaattttctaattcattttaaacccatattttatatttaaaattctcccacctaataattgttgttgaaaaaggtccataaaatgttgcttaagcccatactgggcataatttgcatgcatttcgccaagatgtacacatgcatcgtacattttatcctcatccattttgtattcattgatcagtttatcgaaaaacttaaaaattgcctgactgaaaattaaataaatatataatttataataaacttttatatttttaaattattatcatttaaaatattttagaatttttggcattttcaatttgattttcataataaataaatttaactcattaagaaaatatggtatgaaatttgggtataacttattaaattgtatatgtttagaacgcaacaattttgtataaggtcatatatatcgaaaaaggcaagaaaaaatatagaaaataaagtttactcgctccgatgggactcgaacccacggcgcccttccataccgtggaatgctctatccgactgcgctacgggcaactcctttaaggggtcctcccatgtcctttatccgactttctcccacactcaaattttttctttcaccacatcaaaagaaacatttttttaaaattgatttttattaaccaaattctgttaagttttggccattttgtcaggtctctatagcaatagtggccgcacgcgataatttcgttcatctttgggctcgcatgaatgcaataatgcattgccttgtggaacagatcgcttcgacttgtcacaatgttattgtgccaacacaaataaattctgaaaaaaaataaaaacaatattatattgatgtaaatatttttttctaaaaattaatgagccaaaaattcttcaatgccatgattaattaataataaataatcaaatatatttttcttattatttgttaaactaataaattgacgtacaattctcggtcttttggcgacaaaaaattagtgtccaccctcgttcaggcaaaacaattgcagtttctgtccttggtttactgagcatttttgtcagcgttcgtttgttctttaattgtcgtttgatgaggatcgttgtattaactaaaagataattaattcattttaattaattctttattttatttttattactcggccgacgcaaaattgcgacaaaatcattggacggcggcgaaattgtttgtcctcttgttgaatcagaaattaagcatgaattgcccattttattttaaagatttgtttaaagctaaattataagaaaaaaatttatgccgattgatcaattcaattagtaacaatgtgattaaactcacaaaaattttaactgtttaaatcaaggttgtgcaaaattattgtcatcttttcgagactcgacctatgagagtcgaaaccgagactacaaaaaatgccaacaaatttctgttgtttcgagtgtagttgggaacaaaaataagtttttaaaagtgtccaaaaaaagattttggttcacattcaaagaaataaaaaattttgtcatcgcggtagtggcgagtaatcccaataaattctgagcaaattgttaccaaaattaacactaacttttaacaaatacaaattttccaaaaacttctccccccactcgctcactgcttatgatgggcctaggggttaagcctgagactattgcatttcaattaatgcttcaattctcatgtgttttaaataatctgaaattataaaatagagggttggcaattataatttattcccaaaaaatgaaaaaaaaatttttccttttattttaatggttaaactcagaagatgggaaaactgaattcaatattttgtacttaatgggaaaagcaattaacagtaaattatttcattcatttatgtatgggaaataattgttagcgaaaaatttatgaaaagtcacatttgtttaaagaatagcgcctttaaatgtgggaaatcagtgtgaaatttgataaatggggaaagtgaccgaaattaaaaaatgaaattaattttaataatgacaattctatttgataaatgcaggttaacatcagaaccaaaggtagatgaccaaatcaaattattaattattcttgaaagattgtgtaaataacctaaatttacatcaattatgtatagatgagagaattattgtttaaaaaaaataaataaaattgttaaacggaatttttaactcaattgcactgaatcaaaaaagttaacgctaaattcatttattaaaattaatttttagctaaatttgggtttttggaagagggtttgttgaatcaaaaaaggatttgaaaaagttagcccttttttttgctccgggttcggaattgtccaaattaaaccaaatattcatgataatgtattatggtactccggggaacgtgtatttgtgaaatattatgtttaattgtcatattactttatttaatttaaagataaaattaaaatcaaatatttaatagtcataatatttatttaaaattaattatagattagagtttttttaatttaaaaagaaaaatatttttataaaatattaaattccattataaaaataaatgattgtaatttttgtataaaatatttgagagtcatataatttatttatattaaagataaattagagtgtttttttaaatattaaattccaattacaaaaatataatttgtattatttaacaaggctttagcaatatttgtgttattcataataaattttataatgaaatttttcatttctgttcacttttttatatacgggcaattagaagcacgtccaccaccaacgtaaaattacgtaattcaactaagaaattcccatatcatttcaaaaaattatttttagtaaatcaaaaataattttaatgtaaaagttgtgagaaaattgatttaa

SEQ ID NO: 16129 - DNA, 1606 bp, Heterodera glycines
ttccttccattaacccttaatttaattgcttaattgtatttcattttagattcatttcattatgatcttaattgtagcaatttagtgcaattaattattcgttctttcgttcctttgccatatccccagaggcactttcttaactgtcggtaatttcctcgcctcaattggccttatccaatcaatggtcgttgcgcgtcggggattggttgcaccgcagaacacttttttggaggcggtcgtgcgacgctgcaacaacaccggtgaagcacattaatgataatgagatcattttcaaaattgtattaactgacgaattgtttgatctgctcagattcaagcttcattttggccaacgctcaaattatcgattttccaattgtttactgtaacgaaggcttctccaaaatgatcggttattcgagggccgaaattatgcaaaaaaatgcctcgtagggaaatacaaaaagcaaaaaaatgaattattaaattaatttttcagattgtcttttatgtacggagaacacaccgaccaagtgaaacggaagtaaaatgaaaaattggaaaaaaaaacattttaagatggccatccaaaagattcaaaatgccatggagacagaaaagacggagcaagtcgaaatcgaactgtgcaagaaaaacagtcggaagcactcactcccccaattgcttatctttaaaataattgtgctaattgtcagagtccgtcctgtggctgctgatgaacatttcgccaatcaaaaacgatgccaaccgcgtggttttgtatttgtgccaattcaaagacatcactccgctcaaagagccctttgagggggaaaacaacaaaagtgggcgggggagggggggggatgagataaaaaatgagaaacgaaatcttgaaactgtgccggctcacgccgggacttaaaagcattgcacagcggaattaaaagctaaaataattttcgcatatttttcacaatttatttcaaaaagccaaaaaggccggaaccaattttaaaaactaaaatagtgcacaaaaggggagccgccgcacggcggggcttaaaagcattgtacagcataattaaaaccgaaaataattttcgtatatttttcacaatttatttcaaaaagccaaaaaaaatgattaaattttgaaacgaaatagtgcacaaaagggagggatggttagacgaaaagaggaatttttagaaaagagcgcaccccatctgatattcccatttttccgttccacaactggccaaaggcgactgtgctaattgacacgtagttgtccaataaggtacttggactttccacagtaaaatgtggtacaaaattttggaactgtcccgcctcacggcggggcttaaaagcattgtactgcataattaaaagctaaaataattttcgtatatttttcacaatttatttcaaaaagccaaaaagtgcgaaaccaattttaaaaactataatagtgcacataaggcgaggcgtcgcacgacggagcttaaaagcatcgtacagcataattaaaactgaatataattttcgaatatttttcacaatctatttcaaaagacaaaaaaaatgattcaatttt

SEQ ID NO: 16130 - DNA, 1677 bp, Heterodera glycines
  unsure (1)..(1677): unsure at all n locations
gattggtccattttggcattgactttctacacggctttcatggtgcctttcaacatcgcctttcgtccccgtgacccccttcccttaggttattaatattcattaattaacttttaaaaataatttcaattcttttcaggtattgactacgttgttctgcttgattcggtcgtcgatgtgatttttttcgccgacattctcctcaatttccacaccacttttgttggcccggtcggcgaagttcgtttggcttttttgaattttgttaattaacaatttattttcacaggtcgtaattgaccctaatgcgataagaaaaagtgagtcggcattcattggacatttgtgatcagaaattttttcaatactcactttcccaagattacttcaagtcttggttcctcatcgacctcctttcctgcctgccttatgacattttctatatgtttaaacaggacgacgaagtaattaggggccattaactggaattatttatttaattatcttatcttttaattttaaatatttcgccattatttcgttgacagagaatagcttcgctgttttctgcactaaaagttgtccgactgctcagacttggtcagcaattcccgaattttgttaattgctttttcataatctgtcaggaagagtggccagaaaattggacaattatttggagtacggtgcggcaactcttctgcttttgctgtgtgcctatgttttggtggcccattggatggcatgcatttggtgggttccatttgcaattttgccatcctcggattgccatttcctgccataattagtcaaaggacatgggtttgtcctgctgcggtttcggcttcggaattctttcgcattgttttatctttggccgtccaaaatttcagttccgaagccggggctgctcagcacggacgaacgctttccttctcatttctccgcttcatttaaaaattattccattttcggtacgtaattggcgagtacgaagcacggcataaggtcgaaactgaaaaataaataaatttcgattgcttttcaattttagttttattacgccgaccaaccgttgcccgaggggtaatttgaatagctattagcagtgagtgggctaattagttgtgtaaacacattgaagatggctgattcggttgtcgtacgatctcaaaatgcctttcaacattacttcttccaatttgaatcgcctcgtcgggggccccgaccgcacacaatgttatgtttccggttggggacagaattaatttaaagcaatttgctcatttcgcatttcagcactttatttcacaatgtcctgcatgtcgaccgtcggatttgggaacatcgccagcacgacaatgaacgagaaaatattcggcatgtgagcagaggaatcaattattttgtctatttagtgcggattaattaactaattaattgactgattaatggactgattttgtgcagttgtatgatgatgttctcttcaatttcgtacgccgccattttcggtcatatgaccacaataattcagcaaatgacttcgtccactcagaggtccgtccgtccaatttgtcaatggttttctcattttctgctttcaattaattgaaggtatcaccgaaatgatcagcgaatgttcgcgangttcatcaaattgcgaccnntgcaggc

SEQ ID NO: 16131 - DNA, 3456 bp, Heterodera glycines
cttacaaagtgtacggccaagagaaagtgccagcgggcggcgttgtcgccggcattggcccaatctgtggccgattgtgtgtcattgtggcaaacgacgcgaccgtaaaagtgagaaaaaaacgtacgaatttcgatgtttttttaataaaattccgtttccccggtttagggtggcacttattatccgattacggtgaagaagcatttgcgggcccaggaaattgcccttgaaaattggtcggtttttgttcccattttttggggtttccgtttttaatttccatcgttttgcccttttaattgcattaattattaattttctgctcagtttgccctgcgtttacctcgtcgactcgggcggtgccaatctgtcgcgccaagcggagattttcgcggacaaagacaaattcggccgaatctttttcaaccaggcacaaatgtccgccaaaggcattccgcagattgccgttgtgatggggtgggctaacaatgggaggggtattaattttcatggcatttttacgatttttcttgtattaattaacacattttcaacaaaattgtatcaaaaactctctctcattttagttcgtgtacggctggcggtgcctatggtgcgttttcgttttactttaaatttttgttgggattttggagaacctttttttgaaatggtcaaaaatggggccttcctaaccttcgctcaacaaaagtgaagtgcccgcaatggctgaccaggcagtgattgtccacggcaccggcaccgttttcctcggcggccctccgttggtcaaagcggcgacgggcgaagaagtacagccacaataagttttaaatttgttcgtccgacaatttggcaaagtccaaaaaaggggggaatttaacgaaccaaaaatcgatttgaaattgaaaagtgatcagattggccactgattgtgaactgttcaggtgagtgccgaagatttgggtggtgccacgcttcactgcggccgcagcggagtctccgattatttcgcctccgacgaccgccacgcgttggccatcgctcgtcgcatcgtcgccggccttcccgcccaacggtcttttcccccttcggtgcgttttgattgcctctaattgatttgtttgtctctctcattagtctaattgattggtgtatttctctcattggcatgccatttggttttgatgagttttaaaattgtttacttcaattggtcagcaaaacgatccttttccgtcttcggcatttgtggaggagcccatttaccctgctgaacaactctacggcatcgtcggcggcccgaaacagcgaaaggcgtacgacgtcagagaagtgatcgcccgcgtggtggacgggtcgcgctttgacgagttcaaaagggtgcgccttaattagcatttaattgccttgcttatactatttactgctaattgtaagcaattgatcggtgtgtccatttggttgataattttccctcttttttcagatgtacggcgaaactttggtcaccggatttgcccatatttttggccaaattgttggcattgtcggcgagtgcttttcaattcaaataaaaaaaacaaatttttccacccctccctctttcattataggaaataatggcattttgttcagcgaatcggccatgaaaggtgcgcatttcattgagttgtgctgtcagcgccaaattccgctcattttccttcaggtggacaatcattttgctaaaattgtcaaaataataaattactttaatttgttgccaattttatccatccgttgcgatttcaaaaatatttcttcccttttaatcatttgttttttttcaaatatttctctgatttctgttcaattaattcgcctttttgtcttgaattgttttgtttcgtaaatttttgcctttttcttgtgcagaatatcaccggttttatggtgggtcccgacgcggaggcgggcggaattgcgaagcacggggccaaattggtgaccgccgtttcgtgtgcagcggtgcccaaactgacggtgctcatcggcgggtcgtacggggcggggaactacggaatgtgcggaagagcgtactcaccgcggtcagaaaaaggcgattaaataaaatggaaaagcaatatttttggccaaaagtaataaaatcagggaccaaagttcggtttcaagtggaggaaagtgtggcaaatttctcattcgtcaggtttctgttcatgtggccaaatgcgcgtgtttctgtgatgggcggtgggcaggcggccaatgttttggcccaagtgcagcgcgaacggcgcttgcgcgagggcggccaatggtcggaggaggacgagcagcagctgaagcagcacattgaacaacgcttcgagcgcgaggcgtcgccccttttcgcatcggcgcgcctttgggacgacggtgggcaaaagggcgacgcatttttgaaaaagcgtggacatgcatttaatcatgatgcccgaccgatccaactggatcgacattttcgggacaaaacccccaagaaaattattttgtatggttttccagattttaaaaaccgccgaaaaagacccaggcttggatccatcggtccagcagaatcttcacgttggacatttgtgatggaaataggaaaatgccccgggggaaacagtcgacgaaactccgtttttaaaacggcggaaaagaggagaaattaagcatttttcacggagtaaccccctcatttgtcaggtgtgattgatcccgtggacactcgccgtgtgcttggcctcgcccttcaggcgacactttccgcacaaaaaagggaaggaaaggcggcggaaacgaaattcggcgttttccgaatgtaaaaagcggcacaaaaattgtgattttatccttgtccaacaacttaagtgtctttttctttttgtgtgaataattttaattttgcaaataaactaagaatttcatgaaatacattttaaatgaattaaaaataatatataaaaaccgtgcgattgtttcgctcgcttttcactgtcttcggttgcttactgtaactcccccgccccgcggcgcggccaattgcttattggaggacattggttaaatggtcgaaagggagggaatttgctattggaagcgactaaaaacctcaaaatgtgatcaaaaattaaaattatacgaattttgccaaatattggaagctcattcgatgccaaaataattttatttaataggtaccggtgaaaaattgcgggagtcaaaagttttccgggacccccgtaaaaatcccgtcatttcttacgggcgggagtaattcaaaaatttaatcaaataaatacacaaaatatatttaatactcaaatttactttttaggaaaaaatcgaatgattgaaaacattaaacactaattatatctaatttaaaatatttctttagttttacaaaacgaaactagcagggac

SEQ ID NO: 16132 - DNA, 3461 bp, Heterodera glycines
  unsure (1)..(3461): unsure at all n locations
atgcacaatttataaaaaaaaagaaaaaactaagtcacaaagatatgcatttatattgcaaatcggtcaaatataaaattgaattaacaagaaaaaattaatacaggaaagtttatcgaatatgttgacaaagaacccaacgagaattcaaattgaatcactcctaacaagagagggaataaacaggataaatttttaaataagtaaacttggaatttaatcgaataaacaatgtaccaccaaataatacaaataatgaaaaaaaggttaatagaaaaattaaatatttaaattaaaaatatataacaaaataaaacttaagataattttaataaatcttattcaattaaagtaattgtctgttataaatggaaagaagagatatataaaaaatacgagaaatatatataattaataaaataatttcgtgtttcatggaattattattttcttattgaaaatcctaaaaaaaatccatttttaattatttaaacaattaaaattggcgaagaaaaaataaattgaaaaaacaaaaataataattgaaataagatataaaaaaatttatattattttaagaacaatgcagattttagcatttgatgaattatttatattttataattttattaaataaaaaataaaaataattattatttaatattcatagtttatcgatggcaatgggacgcacgtctcttcatgaatatcgagaataattaaattatataacgataaaaaagcttttgagaaaaatgtacatttaacaatgtaaatgaaactaaaataaatggaaaaacaataattttcctttaatttatataaaatctaaattgatataattggcaaaagactaatataatttttaatacaaaaaataatttgcaaaagaaataattttgcaaattttcatatcatattctctattcattgaaaatataaaaagtaaaattcacatataaattaaaaaattgcaatcataaacattttctcgtcaaaaaatcatctagaattcaataaattaattaaatctttggtacaagtaaatgaaaccggtaaaataaagaattaactatttataaactcatcggcataaataccttaaaatggagttaattgttattctaattttgtttaaagtcatataattttatatttaaaaattattacccataaactaaaccgacagaacacacaaatattatatttgaaaaatttaatttctgcaaacggaaatgaactgagaaattctaaaatataaaataaaagaaaaaaaagtttaaaaaaagtttggttttttggtcttttaattcttttttttattaatattaatctccttttattaaatatattagcacttgaatgttaattaaatatattatttaaaattttataatattccaagataaaaatgaacttttttatatatatttaaaaaatataatcggcaatgatttgcaattaagcagctcacccactctggtcaagttccgaaatataaatacaatacattttatacataataataatattcatgtagaaaacaaatatataagcttaaaaagtatttaaagaatatttagaattaattcatcagtctttgcaaaataaaaaatatataaataattttaactttaaaaagctggaaaaatcaattataatgaaacaacaaattttaaatttaataaatatttacatttactcataaataataatccaaattatattattattacatatttgcggaaaataaaattcagatacaaataatagaaaacaaaaatgcaaaatattttaaaatgccattcattacatcaactaatgtcaatttgtttattttttcacagtttaattatatatattaattttaagcaatgcttcgaaagaattacaaatataaccacataaaaacaaatgatttaaaaaataaatataaattttagttattgacaaaaaaatggtggctaatttaaaataaatagggatgcgatttttaagcaaatgcctattttttcatgagctccctgtggcctgaaatgcacgaattattttaagtccaataaaaataaatatctaaagataattttaaaattattgatttaaaattaaaaatctagtgaatattttaaataattttataattttattacttgtgtaccaggggtgtgacttgtctcagaaattggagctttctaaaaatagagaagacattaactaggagagaaagagatttatgattttcgcgtaaatttgaaaatttttctgactgctcaaaagttcaatctttaggggcgtattttcaactctcgcctctcgtcccaaaaaaacgagaggcgagagtaccaaaaatggcgagagttggcgagagacgagaggcgagagttgtcccacccctgttgtgtacctacctattttggaattttttagagcctaaaaatccaatatacgcggacccggttattgtacaaatagccgggcctaacctaccctaaaactaaaatagttcaattgcttaaataaatgaaattcttaagaaaacgtggaaataagaaaaaaaatatacaaaaaataaatgaaaatatatttttatacaaagtaattaattaaaattaaagaaattataatctgtctacaataaataattagtagtataaagcgtataaattcaaaaattttaattggattttttaaaaatgatcaattaatctaaaaaataaaagtaataataattattatcttatgcgaatgaatcgccgctagagataacttaaacgatatagttaaaaagtaaattacctacttaatatgctgattgcacgcattgaactctttttcctaatggaaaaatgagaaaactagaaatattcgaaactataaaaaattttctgatcaaaaatgttacacatattttagctcttttataaattttttaaatttataaaaaatttaatgaaaatccatttgatcaaataattaaaaaaaatacaaaaaaacaaatagttaactttacccttataaaaaataaagacaactatatttaactttgaatcaaacagttgtaagaagtaagttaacttattgggtatttatttattatcaacagccaaatatgaagaaacaaaaattttttgaatgaaacaaaaataggaatcaaaatgatgtaaagcttcattttataaaaaaatattatatattttccgattggggttgtatcttgaagcaataaataaaaatatcatttaaaatttgcttggaattaataatgagttgcttaattttaaaaagttacctgttttcagcctcagttaaattctattaaaaatatcaattcaaaatttgtatatntgaaatagataacagataatattaaaagatatattaattggaacaccattaaaaaaataatattcattnttttgcactaaattttatggtgacatacgtaaggaaatggtgcacta

SEQ ID NO: 16133 - DNA, 1395 bp, Heterodera glycines
  unsure (1)..(1395): unsure at all n locations
ggtttagctaatagtgcttcgtcttcccgcccctccgcttcggcttctcttcgctcgtccccctctttgacccttcctcggacaccgccgccgctttcaccgctgtcgtcgccgccgctgcttttgcctcccctcaacaaattgctgctgctgctgctgctagcgctaacggcgtggtgctgctgttgaagtagcaatttgtggatgagaaaatttcgctgctgctgcccaatactggtgctgctcaaagtggccgtcgtcggcgtcctcctcgtcctctttgttgtcgttgtcctcgacttttggttggtcatcgtcgtcttcgccggcttactgctgctgctactgctgctattggtccgataacaacggctaagcttttgatgatggggatgattgggattgggatggggaagatggttgttgtttttcagtccccgccgcggccgccgctgctgcgggtcccggaggagaagtgcaaacggaggcggtggaggaggagaagccgaatctgctgaggatgagtcgaattggtgcgccaatgaggatgatgatgatgagtgtttttgtcctcgcgacggtcgatcatccgcactattagccgccacttcatcatccccatcatcacaatctgctgctgctgcccatgctcgtccaacattctcctcccctttcaccgctttgacggctattagccgtcctccacatcgccgcttttcctcctcctcctccgctctctcctcgccaatgcttttcctcatcaacgtaatcattgcttcaccctttttcaacggcttccccctcccccgccccgcattgctgccccgcttcatcctcatccgtcgccgatttgaagtgctgttgctgcttttgctttcgcgctgctgacaatgagcagcgccaccgctgcggttcgccgctgcacattcctccgtccgcggtgggccaggacgatgatgagcagccgttgctgccaaagccaaatactccgcgtagctgggtggtcccgcggttgctaagccgccattgatggccgtttgaccatcatcattattattgctggccaaattgacggagagtcccccattttgaacaccaccattgttcaaagccttttctgtaggtgaagaagcataacaaaacggtggtggtggaggaggaggaaaatgatgatgttgaagcagtagagcatcaccggaagcaacagcataagagccattgtccagcgccggcggtggcgcaggtactgctccaatggngtcgggttgaaggaggatgagaaggacgggagccgcaggaaacgaacaatggacgaagctgcggctgatcattgtgggtggtgaagataatagtcctgctgttggatcacctcatgaccgctatcattagcgctgc

SEQ ID NO: 16134 - DNA, 1360 bp, Heterodera glycines
aagccgccgattgaaattgctgctggtggaaagcccctctatcattctgctggcgttggtgatggaagaacggcattgcggatggtgatgatggcaatgccaacatgggacagaagcgttgctcgggcacagtgacgcagcacattttgcgcccaaatggctcaaaatcggtgcccatttggtacatggggttacggtatgggtgtaatacggtattacagagtacagtacaaatcaaaaaattgcttaataaaaaatagtaaagttcgatgaaaaacaaaatttgagttcatgccaaaaaaagccctaattcttttcaaaaaacttgtcttcatttaacaattccatctgtaaaaaaaagaccaaaaaaatgattgattgggatagaaaaatgcataaaaggaagggcatggaaatccgtttcccgcttcttctttttttggtggccttggaatttcgattaacgaaatttttgaggattaaataattctcggaattccgacttccaacaattctttagagcatgtaaactaaagctcagaaatttttttgtttttatcccaatttttgattcttgaaatccttaaaataaaattgattgaaatggagaaagtgatgaacaaaaatagtgccttcacgctgattaagcatcagaagaaagacaagcagaaagtgtgaaatggatttgtgaaattttggggttagggtgggaaaagctgctggcggcggcttttcgtctgtcgctgtccaccggcggacagagtcagcggcgcctccgacaaatttcgccgagtttatggcggcgccgaataatggggggagaggagatgaatgtcttattgttgaacgaagagtggtggagggtgggtttcccatttccaatctccgcttcaactcgctccattacacattttacaacaatttaattatctccgtcacccgtcggtccggggagggggggatgtagccagaaaaggccgacaaagggcgtaaaacttttttaggccttaccgcgccgacaactttggcaccgccgatggcaccgggacaattagcaattcacgacaaaatgccaagaattcgcgaaatccaaggagaaccgccaaaggcagaaacaattcacaaaaaaggcacaacaacaacaacgacaaaatgccctgctggggaaaaacttaatggcacaacaaaaaacgacaatgtgatgacaaaaaggccacagaaagcagccgtaattcaccgaaaaaaaagtggcggcacgcggcgaaagacggcacggagaaaaacgacggcacaaatgacgacaacgacgagaacgacgacgacgaaggcacatccgccggtggtggcacaaccgatgccc

SEQ ID NO: 16135 - DNA, 1027 bp, Heterodera glycines
cgaaggggacgggcccggcctgaaacagttggtggagcaggtggtgcgcaccaccggcatcaacgaggtggcggacacaggtgggcattcgtcagtcctacctctaattagttcgttctagcactaatttagtcagtcctgccgctaattagtcagtccattactccttaaaagtcatcccatattactgcctaaaaaatcatcccccctcattatcccctaaaaatgccattcctaattgtccccccccccccctctttccaatcacacagaaacgatgcgtgtcgtcaagggcgagacgtcctcccgccagtcgtaccaacggtcggccaagggcaatgtgtccattttggagacgtcgccggagggcaaatacgtggtgttggagaacacacaccgatcaaaggaggagaccattggagagtggaagctgaagcgtcgcattgatggcaagcgcgaaattgtgtacacattgcccgccaactttgtgctccgcccgatggcccgtctgaaggtgcgttttcgtttttggcgtagagcgcagttagcccgctgatcgctgatcagagcattatcgattggtcagagtgaaaggaagaaaaacacagtgagcggtttaacccaggggtgcgatcggttcttatttgtaagaaatgttctgattttgggctattgttcttattggcaatttttagacaaaatctgttaacaaatcgaattaaaaattacaaaaaatttttcccggcggcgcctatcggcgccaccggacgcccctgttcaacccccaaaattttttgtaaaaatgtcgcaaaaaaaagcattgaatgtaaaaaaggtcgccaatatgaaataattagaggcgaaaaatacaatacaacaaaagttgatgctatattaattgtataaagtgttatatacaagcgatttaagcaatttttgttaatgttcttatttttgaccctaaaatcttattttttggctttgatgttcttattttgaaaatttttcgatcgcacccctggtttaa

SEQ ID NO: 16136 - DNA, 1261 bp, Heterodera glycines
  unsure (1)..(1261): unsure at all n locations
taccaatttcccaaatgtgccacctggcttgatcacaaaagtgccgtgccatcgaaattattaccattttttgccaggtgtgggcccgtaaccagggcggcctgcacgccccgcncggattcactgatcttcgatggcgaagaatcgttcggcgtcggctcaaacgtgcaaaccattctctataatgcgcaaggagaagtgagttggtggcaaacaaatttaaaaaagcaaaaaaaaaaaaaatgatggcattatgccaaagcggcgaaatgccaaaatttgaatttaatgaatccattcccacacaggaacgtgccacgcacatccaacgttcaagccagacagctgcctgaagaggaagagagagataatgctgataagagtgatcactgggggacggaattttaaattttttaattatttttcgaaaaatcgaaaaatgtcccccccccccctcctaagaattgattttcttttttaattttcaaaaaattccccttatataaaattgattttttcaatgtccaaccgacatttaaccattaaattttaccaaattggggataaagtgacaaataatcgataaatttctgttgataaattttaaatttcctaaatttggcgtttttatcacttaaaaatccctgccttaatgtcatgaatagggttataagttgtatgcactaaaaaatgccaaatatgccctaaaaacccgagaaatgcccaaatatgcactaaaatatgccttaaaaactgccaaaaatggtttttaaccctcaaaaaaatgccaaaattgtgtaaaaatacagaattgacttaaagaacatcaaaacaatagctaaggagtatttttagagaattgcaaaaattttgattttctaaatttatatatgcaacttcgaatttttaaaatttttatcatatgctaaaacaaaattacattttcttatatcaacaatttttttaaaggttcttacaaaaaatttaaaatttttcgatttttaagggtatattttttaattcccaaaaaagtcgatcattaagggtgtatttttcatttttattgcatttttcttatgcaaatttgccaaaaaatgactgaaatatgctctaaaaatgcaaaaatggcaaaatatgcatttattctcgaaaactcccaaaatatgcttttatatgcactaaaaacattaaccaaatcaaaaaatttaacgcagaaatgctatttttgagcccccttcttcataacatatgcgtagaaaaa

SEQ ID NO: 16137 - DNA, 1035 bp, Heterodera glycines
  unsure (1)..(1035): unsure at all n locations
tttggcgacggtattggcatttgaaatttgggcaagaaaatatccttgtagatgagcccagcggctgaaggttgctgaaagcgcctggggcgacagggggcgatataggggggatccggtttttcctgtattgtggtgggcagacgcactctcactgattggtggttggttggttggttggtcagcggcggctgaccatcggcgccggcggggcggctggcagcaaatcgcagccgtccgccgctctcaccccgcggcactgacgaaacaaattttttccgcgcgcgcgagcgacaccgcgacacgcaaagcacaaaaccaaacgacgtatattttacgtcagcagctcaaccccctccccggctatgaacccagccaaatagtttgaatgggtgggcaggcgatttggggaagtgatttgttgggatttgtgtttggaagcaaatccgcgcgcgccccggcgctgcgccgcctgaggcgtcaaaggtgtccttgagaaaaagggtgggacatacacataacatagggcggtggatgagagaaagttttgagggtgagatggaagtacaaatggtggaggaggaggaagaggaggaggaggggaatgtgtcgcaagccaatttgactatttttcgcgcatttttcaaaattttattgccccgaaatttctaaaaatctgtgcctgcaaatcactccgacttaagaccaaccgcgaaaatgtcgcgcgtttctgcgtctccgcgcagttttaatgtcagcaggggattttaatgatgccgctaggtcctaattagtgcaataaagtgccaaataggtatattttttttatttgtacccgctcaaattcaaaaaatttaggcgaaagaaaaaatatatatnttcgacctgccaccaccgtaatgcattttccgcaaagaaaaaacggtaaaaaaaaccctaaaagccccagccctactgatgatgagacgtagggaaagaaaaacaataatattagactctcaatgccaaaaatttaccaaattttaaataataaaa

SEQ ID NO: 16138 - DNA, 3482 bp, Heterodera glycines
ctatgagcttcaatccagctacctaatttatgtttttcttattttgagctgtttccagtttagtgcatataattttaaactttagaatgcaattaaataaatgtttttattttcaaatttattcaaaaaaaatgaaaaaattatttataaattgagattaattagaagtttaaaaaagaaagccaaacatttaagctggaaagagagaagtaaatattttgttaatttgcattagcatttgcatggatttattaatgggtggggtgactgaattaacactttcgtaacacccaaagtgccacggtatttctgtctccagcggtcacagcaaaattcatccaatttggcagattcaaaggactcatttcgagcggataaattctcaatctgtcgctgcggcttttgccattttcattatgtgaaccgacctttaattagctttagccaccaaataattatctctcattccattttttgttatgatttatccataaaaatgaattaattaataaaaatgcaaaaaaaaaaaacaaaaaaaactttggcattgatttttttgtaatgagtcggaaatgttttctccgaggattatctttcagcagattaattttcgtacgagaaactgtgacccaattatggccagctgagttttgtcgaacagagcaaaagctgcgaaagtgcccgacgaggaaacccaattaaaaggatcgtacacttaaattattaaattacattaaaaataaataaataaactcaatttattatttacgcctcattggcttcattaattcgcgagtcgaggagaatcctttttttggctttcaaatattaaatctcttttcaaaataacattttgtttttcgacctctgttagcagaaagaaagggggggggggcgatcaattggctcccggacaatccgtcaatggacaattcgtcatgaaattttgtttttgtgcacaaaattgttatttatttttttcatttaacttcattttacataaatttttcgttttaaaaataaattttgctagtggattattcattgacggattgtccaggtatcattatctccccccccccaggggcctattagaattaacatcacatcctgatgtgatgatatgataaatcatatgcatgttataattagtgtcatttcgtcacatcgctgatctgatagtcagatcacatgtggggcgatcatatgatgctctgaatatgatgagcaatcatatgcaacgatcatatgatggaaaagctgttagaattatttttgtctgatatgatgcatcagttcgtcatatgatgatgtaaaataatgtttcaccattagggatttgttttcaggcacaaaaaatcgcaaaataggcacaaaaacccacaaataggcaaataaaattttaaaaaaacgctttttaggtgtaaaacacgtaaaacttaatcaaaacacttatcttttgatttttttatgaaagttaattattttctcgttgaaataatacatattttgggtaggtttgttaaaaaattcatataaaattaactattggtcagaaaaaataaaattatggttcattagaaagccaaaggttcaaagaacaacctattaaaattttaaattatttcattgaactctaaattttttacgattttttgtttaaggctcatacgtggttcggaggggtgatttttggcacagtgaaactctcgtcatatgacgagcatcatatgatttgaaaaaaataattcaaacacgcgtatgactgactaatcgtacgatttgtcatacgccgcctacgatgtgatcgtctgatatgacgatcatatccctggtgtgattatatgatatattctaacgcgcaatgacaatatgatgtgataaatcagacacgggggctgattaatcatatgatttaattctaacaggggtcctacgtctgataagtcatatcatcacatcagtgatgtgatgttaattctaataggccccaggggtaggggtcactcccttccgccggttgttagccaacctttgtccctttgtccctttttcccttttcccttttccctttccctttttctccgttttcctcttttttccctttgacttttcattttttgcccactttcgaatttgaatttgcttcttcgtttgccctctttctcttctgtttcttttctcttccgaatttgcattttttcccttccgctctttcccaaacttttttggccttttatttgtggtgacaactctttcttcgacccttttttacctcattcatcggtccaatttccctttttgacctttcttcgctttgttttgcctcatttcctttctttttgtccgtttaattcctcggcacaaaatttcattaattaatcgctgacgactgataaatttatgttttattaaacttaaatttaaaaaattattttacattgtctttattctgtcagatcgaaatgcttctccctcccactctgtctctctccccgtctctcctctcccttccattctctctcctctctctctctctctcctttctctctcccctctctctcttcctctctctctctctctccccctcatctctctctctctcactccccgtctctcctctctctctctctctctctccccatctctcctctctctctttctctctctctatcctcttctctccgctccctctctatcctctcccttctctctttcccctttttctccaattgactcctccgtttctgtcacttgcacattttaactcattctttttcttttatgtctgtttttgtttttctttcattttgtgccgatttatcggattgttgttctgcggttttttagtccctccaaaatctgttttttttttgatttgagtatttttttaaaaaattttctccttttttctcttttcttctcttttttccaaagtgtgatcttttacgctcttttccgtcctttctcttcaatttgtcaattattttccattttttttttttgccattccttcgccaccaattcaatatgaacaattgttatttatttctgttttttttcattttagcagttttttctatttaacaaaagccccacccaccgaaatcagaagacgaaaatgaacggataattgggagatttatccgattagcagtgatttgttagtcgtaattactctaaaacaaactcaaaggaatttgttacataaaaattatgcatttaaacggtttaatcgcctaacaaataagggttaaatgatcggtcgttgaaaattgcttattttaatcgacggtttctgatcaccaataattgaattatattaattggattcacattggacggacagagaacaaaaagcaaagcgataaaaggacaatggacgacggtaattaattttaggacaattaatggctggtagaaataaatgattgatgggggagggatgagagggatatggctaatgagtcaggccccccccc

SEQ ID NO: 16139 - DNA, 2928 bp, Heterodera glycines
aatttataggtaaaattttgaaaaattttatgggaatttaatccaattcttaggggtgtaaaagtcgcgtttcgcgccaaaaagcgaaatgcgaaacgccaaaaaatgcgaataatgcgaaaggcgaaatgcgaaaagcgaaacctaggcacatctctgctacaaagtagggtgtttttgtcgctttgcccctattttttattcattttaactttttaaaaattcttaataatattgaaatactatataaaccaaccataatgattattgatgcaattttattctctaaaaaacgacaaaaaaggtaggttttatgtctaaaaaaccaaaaatagtcactaaaaatggaaaataggcactaaaaaaatgcgtaaaattttacccataaagcaacaaaatgaagccaaatcagaattgggacacatattttttaaactttaaactccttgtcaagaaaaataaatagattaatttttgagaaaatttttaatttattaggtgtgtgttttttgaaatttttgggtcgattttttagaggcgtatctttcttttttattgtatttttgctaataaattttccaaaaaatgttaaaataagttttttcaaaattactttttgacaaaattaattttttttaacctattttgacgcaaaatcttttacaaattgcacttaaatcttcaaaattttcctctacggcgtctatacgcaccttcggtcacgccaaatctttttaatatgcttttaaattgcttataaaattattgaatttttaaaataaaaatttgaaaattattttaaaaaaataaaattttgaaaattacggattacgggttacggattacggaaaattacggggttttttgacccccgtcatgatggattacggaattccgtaattgagaaaatcgccgtaattacggatttccgtcaatccagttacgcccagccctgttatcgtctccacttttcaaaatgttgatgaattcgatgagatttttgaaacattttatagagtgaaaatagttaggacatgagaaactcaaaaaccaagtttttttaacatttttggtcataactttttgaaacataataatattttttgaaatttttgcaggataatagaaaacactttggctatcgaatgctatcaagaattaaaaatttggttcctacttattttagcggtttttaaagcctaaaattggagctctagttgtaacgtgggctcacttaaaatgccatttttccccacttttaataaatttgtaaaaaaaacattttatgaaaatgccaaaaatcaatttgatcaaagcccgctcattgttcggacagtcggacagacaaagcgcacaaaaattctttgctgataattggcataaactgttcatggttagcattgaaaaagcggccgtgtgagtatttcggaaatcggaatttgggggatcaaaaatttaaggaaaccccaaaaaattttcggacatcggaagtcaggaatcggaattccgtgccatctctgccccatacgagtgaggccgggaagcggctgaatgagtaccttaagcgcgggaaaacttaaggcccgtgcgaacgccacgctagtgttcaaagcggcccggcactttcacagggcactggttgactagtaaattaaaaaatcggggagatttccgttctccatttattaattgtttaagaaactgataactaaacagtcaacaaatttattcataccatcactaattgatttcataatggaaaaacgcgtgactaattgaccccactaattgaccacggcaataagctttgtatcgccagtcactcatcaagcattaaaaatgagagaattgtaaaaaaaacaacttttaatgaaaatgagatttttgaaacattttactgactttatgacctcccgccgtctgctcattttggggttggagccgcgccggcttttggcgtggcgaccggcgcattgacagcgacggcagcgccagcggcctctgctggcgcgccgttgtcgccgtagcggtcgctgcgccgggcgttggcgactggcgatagaagccgccggcggcggacggcaagcgctgagcggtgctgcagccgctgccgctgacgccgcccatcgtcgaccaattttccatcgaccgacttttttgagtaggcggcgcccgcgtcgcccaggcggcaggcgcgccggaaacgcaatttgtcaacattcaaatgcaaaaaataattctaaaaatgggaaaataaaatgtaataaatcatttaaaaactattttaaaatattaaaaaattaaatatttgaaaattaaatcactttcaaattgtcgagtccgaagcgttcaatcagaaggaaacggtcgatcagtggaatttcaacacaattgatcagatgcgtttcgcagcgcgacttcaacacggccacctgaaaacagagcaattagtgtccctaataattaccctaatgaatttaaaaatagtaaaaattaattttttattgaaaattatgggtaaactctctttgataaaggatattcaaatttaagtatcatttttttgaaaatcaagtgctcacggaataaaatttaatgtaatgtctaatattccatctgtaagggcacccacctggaagtagtcggccaatttgagcagcatcagcacatttttggctaaaattggaaatccatttaaaaaaaaaataaaaaatcatattttcaacccctcacgatatatattagaataaatcattatcatgaattacggttgggcagaaaaggtccgttcagataattgatggcctctagaaactgcttgaattgctcccatgtacccgcccatttcctccaaagcgatcattccctgctgcttctccttcatctacaatgtgagcatgcgacagatcccgcaggaaacggacatca

SEQ ID NO: 16140 - DNA, 3645 bp, Heterodera glycines
  unsure (1)..(3645): unsure at all n locations
caaataaagttgcatcgagctgaaataaaaaaacaaaaatntaaaattgacaatttgtttggcatactgtgtcggaaatctccaaacaaaaagtttttgtcaccgagcagcctaaaccgcaaaatgaattgatggattatgtaaaatatgatgattgtttgtttatttgatcacgttgatagtgctatcaggtcctttttcgcgatttcttccacctccgtctcggaatggcgtccatagccttgtgccatcaaaacgcttttgtactaaaacgcatattgcatcatattttttaaaatttgttttcttttttacaaataattcaataaaaataaaggacacctaaataaggaaaacataatttaaaaataaattaaatttatttgctttgctttgctttgaaaaagaaattatttaattaaaacactcacaaatccttggaactttttgagtttgatcttctgaaacagaaacttttggaatccgctcatgtgaacggcccaaccattttcggtggccaaccacccaaagtcaatgctatggtcgtactgaaggcacctaaaaaattatttagcagttcatcctcattagtgttcagcgattggcatttgtcaatgactcaggactgaattgggcctcgtaaaacaacaaaaggtcctcccctccccttcgtgccctcctcgcaaaaaaggggggaatttgatcggctcgagatcgtcgagagtgccatgcatttttttttttggtcccttcgctttggtaattccaatttcggcactttcgtttatcagtttgggcaattggcgtaccgaaaaagcgattcttcgatcagaatagtgaatgcgcgacccaacgcgcgttcgtgcgtgctgaggcgcgaatcgatggaaactttgaaatggttgcgcaaatgatcaatgatcagattggagtcggcaaattggcgcccgttcagctcaatgaacggaatttgacctttggccgacgcctttgtgaattcgttgttcacattctgaaaagaacactaacagttttgaacaatatttttcatttaaacgagtcaatggcaaaaaaataaactcggattttacaaaataaagcttatgcctaagcctaggcctggcctaaagcttaggcctaagcctaagcctaggcctaacgtaaaaagttgcccgatttgcctttgtacaacagtgtacgagttgccttttgtacgagttgctcccatttaaacagtcaaaatgccaatttaatttattgtattttttaagactaaatataaaattttgcctaatttttaacattcctttttcaattaattattatttttatttaatgcatttaatattatgagtgtaaattacgcggtatttaagcccattgatgcgaagccatgtctccaatttgagtgcaaatggggatggactgagcacattatgggtgcgtgggaattggaccaaataaaccacgtcgggtttccaatcacgaacgatcagaccgcgcgacgctttcattctctaattaaattcagatagattaaataaaattagaattgaaattaaaatggggaaatggctggtgttatgtcgttatttaaaaatccatcaatatgatttgatgaaaaattatttataacttagctcaaaagcaaccaaatttttaattcttgatatcattcgatagccctaagtgttctctattcagtatacaaaatttcaaaaagatttgttaggtttcaaaaaagttttggctagaggaactcaaaaaaaccttgtttttcgagcatctttggccctaacttttttgaaacttaacgaaattttttgaaattttgtagactgatagagaacggttagggctttcgaatgatataagaattaaaaatttggttggttttgagctaagatataaataaattttcatcaaataatattgatggttttttaaataacgactccgccccaaatgtctgatttaaataaatgccaaaattattttatttaaaaatttaaatgtttcgttgtatttaaaaggattgttccccgccttttctcatcatttggccaacaatttggacaaagtaaaacagacaattggccaaattaaccaaattttgttttattttcacaattgtttgaggtgattgtggcggagactgaaaagattgttgaggtattaaaaacacactgaatgggaaattggaggggaaaaacaggtttttaatttcatttttacgtttttcaattccattaaaatttttattgtcccaaaatcccatcaaaatgagggccaattgcgcaatgattggagaaaacagaggcggagtgggggggggggggaagaacgaatgaatgaacggaagaatgaatcagcactcgccaagcagaagaacacaaacaatggcagcctagtaaaataaaaaatatataaaatggaaaaaatgtaaaatgtaaaatttaaaatggaaaaatttaaaaggaaaaaaatgaaaaatataaaatggaaataaatgtcaaaatataaaatgggaaaaaatgtaaaaatttaaattggaaaaaatgtaaaaatttaaattgtatcagagaaattgcaaaatgaatgaaatatttaaaaaaaatgaaaaataaattgagccgaattataaatcattaaatttactgccttttgttggcaccaattttctccttttatcccactgacaatgcgtgactgacaaatcagtgaattcatttatctttttgcctattgtctccggcactttcttggatttggctcggaggggaaccttcatggcttttcatgggtaccacactggccaattggtcgaaagacaattcggacgacaaatggcaaatttggcatttgtctccgaattgtggttacggcaaaaaattatgtcgtttgtcgtttcataaataggaatacgatttttaggcttaaaaaactgccaaaatacgtaggctttaggtcctaaaaaaccctcaaaataggcactaaaaaccctcaaatttaggggggtgtaaaagggaaaaatttattcaaaaaaataaaaaaaaacaatttttttaagccatatcggtattgagctaaataatttttaaatcaaaaattcttgtcaaaaaataaataaattttgagacgaagttttctcaaaattttttaggctttttcggctctaaaaataaaacctagaaaattagctctaataactcgaaaagtagcttaacaaccaccaaaaaaaaaacaacttatttttcgtcgtgcgtttcaggccactgcgagttcaggaaataaataggctgaaccctaaaaatcgtttcctctctattcatacctcgtcggataccgatcagggttaggcttaactgtgcattctaattacagaccatccgtaattacacccaaccctggcaccgacaaatgcaactaaagaaaaatgccgatacttttttgaaacgtcgataaaaacatgacatgtagttgatctactttattttttttaattccccatcaaagtggcacttacgccagaggaagggcatttccgaatgatcagctgatttgctgtcacatcagtgggggcggcattgggcttattaaaaaaaatttacaaggcaaantatatttttatctaacgcgactcta

SEQ ID NO: 16141 - DNA, 2618 bp, Heterodera glycines
  unsure (1)..(2618): unsure at all n locations
tactattttcatgtctctaacacatgtaaaaagatcggtttcgtaaattcgaatagtttttgttataagggtacaaaatcacctcaacatttagaatcaatagaaaaattattagttttcgcattttagttaaaaacagcagtttatagacttaagttataacttgataaaatgaaagtatcacaacttttttctgagatgtcaaactgctgagcattcacttagaaaaagattctccttttcaaaaatttttttcagatatcaaatttgttcggtttggttgggaattaagcgagttatggctgatcaaattaaaaaatacaaaaaaggcatgtaaattaaaaattagcgcgcaaaaattcacgacaattacgctctttggcgttatgaacaattttgtctgacactgggcttgaccaaaacacattctttaaaacaattttgtcaaagaacatttacagtcaattggacccatcacaacggaagggactcgacattgatggtcactcatacggagttcatttttactcggtttggattgttttttgatttaacttattgttgtaaatcattctttgaattcagctgcccggaatgtcgtctttgacctccttcgactggcacccgaccatcagtgatcggttggcacttttacctgtccaagaaaagccaatggcttttgcacattcgattgcctccacgaaacgaattgccataattaaagtatgtcttgcttcttatttttttcactagttttctgttgtgtttagcttcgtgatgacgtcaattccgtcatcggtccttccggtgacttttgcatttcggcggggccgcagctgaactttgaaaacggcgagaaattgttggccaaacccaactgcacttctgacattgacactgaaacactgttcaaacgacgggtgctcgtcggctacggctacggaaattcactgaacgcattggcaagtgagtgaaaggcattcattcagtcggaaggattcaattatttgttctaaaaaagcactgctcgaatattcgaagaaggccattgagagagatcaattcgcttcggatgacttacgcttttgctgggattggctttggatgcaattccaatcggcagatgctaacgaagtgcagaagaattacgggaccatgtgcgaagcattgtttggatgtcctcaattaatttactttcattttaaggttcgctggcattaaacacattttgaagggcacaaagtccagttcgaccatcaaacaggacgaaattacttacagaaaccgagtgagtggaccaacgagattttttggttacgtaaatatttattttcttttcggatttttgtcaacgaaaaacgactcaaaattttgcgtatgtgcaattggcccaactgcgccgtgagggacgagtgcaaggcgcggtttgacgaaatcgcggctcaaaacggagtcttcggtatcactcgcgcggcggcgttggcacttttttcagtgcagggaatgctcagcaaagaggtggccacagtcgagaaaggctttctgacaatgagcagaatcccccccccccctccccccttaaaagcaatttcttatttaatgccatttgttttaatttctgttttccgctccaactttttctattcgggccctcttttagtatttgactcatttgagcgagttcactcattcgcgcgaatttgccgaaacatggtgccgttccccctcctttgtgaccaattatcaacgaatggccgatacggtgctgaacattttgcagaagtacgacggagttcgggtaccgaactatgaaagtgtgtgcgagggactgacaggggacgattatttgctggcaattgttaaggtataatggtgaaacatttaaaactgtttctgtttctccatttatcatattcgttcagttcctcgccagacgtgacaaaatttacaatcggatttacaacgaaatcttcgaaagtgtgagtgaatcgctcaaagttttcactattttcgattcagaaaatggcccttaaagacaaattggcatttgctgccattcacatggacgacgattttctcggcactgccctcgaaaggctcgtcgaacggctcactttggaatttccactgaccactttatttgtcaatggcctcgacgaccaaacggaaagtcatcaattgttacaccggtcagcaaaaacaatcatttgcaaattgaatgcccaatgggttctcctcatttggcattttaagttacctcgacctcaccggtgacctccaaacggtgtctcttcttctcgtcattggcaattgttttcgcggctgcgctgtgtttcgggaagaaacgcccaattcgcccgttggcggcgttaaggcggcggaacttttggagtgcgcaatgtaagcggagaataaaatgcacaaagataaagcaactaactttagtgaagctgaacctcgcgggagtttaaggaggaaaagtttgcattgtttccgcgattatttggaattgctcaaccggtggaaattttggtaaaacaaagttgaaaatattgaaaaaattggtggttttattctgaaatattntaggtagtaaaactttcatctgttcttttttg

SEQ ID NO: 16142 - DNA, 1205 bp, Heterodera glycines
  unsure (1)..(1205): unsure at all n locations
tcaaccgtagatagtaatgcgatttggctgaaacccaaatgtcaaatgatgtagaaaaaagggatagccattttctgagaatacctattcttacctacaatgcaaaatttcaaaccgaccatttgtagggctaaaccgtagatagtaatgcgatttggctgaaacccaaatgtcaaatgatgtagaaaaaagggatagccattttctgagaatacctattcttacctacaatgcaaatttcaaaccgaccatttgtagggctcagccgtagatagtaatgcgatttggctgaaacccaaatgtctaatgatgtagaaaaaagggatagccattttctgagaatacctattcttacctacaatgcaaatttcaaaccgaccatttgtagggctcagccgtagatagtaatgcgatttggctgaaacccaaatgtcaaatgatgtagaaaaaagggatagccattttctgagaatgcctattcttacctacaatgcaaatttcaaaccgaccatttgtagggctcagccgtagatagtaatgcgatttggctgaaacccaaatgtcaaatgatgtagaaaaaagggatagccattttctgagaatacctattcttacctacaatgcaaatttcaaaccgaccatttgtagggctcaaccgtagatagtaatgcgatttggctgaaacccaaatgtcaaatgatgtagaaaaaagggatagccattttctgagaatacctattcttacctacaatgcaaatttcaaaccgaccatttgtagggctcagccgtagatagtaatgcgatttggctgaaacccaaatgtcaaatgatgtagaaaaaagggatagccattttctgagaatacctattcttacctacaatgcaaatttcaaaccgaccatttgtagggctcagccgtagatagtaatgcgatttggctgaaacccaaatgtcaaatgatgtagaaaaaagggatagccattttctgagaatgcctattcttaactacaatgcaaatttcaaaccgaccatttgtagggctcaaccgtagatagtaatgcgatttggctgaaacccaaatgtcaaatgatgtagaaaaaaaggatagccatttttctgagaatacctnattcttaactaccatgcaaatttcaaaaccgatcattttgtagggctcaacccgtagatagtaatgcgatttggct

SEQ ID NO: 16143 - DNA, 1686 bp, Heterodera glycines
aattagggagggattggggtcaaaaaatgtctccatctgagtcccacgttatcagcttatcactgacacgcatgcaggacagggcagggtttactttttactttatttctttaaattcttcgaaacgccttttgtccaccaggaagcggacgcgtgtgcggacgcgcacgtagcggaggaatggttccacggcaaagttggccgggacgaggcaaaggcacgccttctgcaggcggcacggcacaacagcaacggcggaggcggaagcagtggcaccaccgacggactattcttggttcgcgagtcgaccaccttcatcggcgattttacgctgtcctttttgcactccggctgtgtgcaccattgtcgcatcaaaggtggcacaattggaggaggggcggagaaagtgccgaaggaattggaaaagggggtggaaaagtgccgaagaaattaggtggggatgggtagaaatgccaaaaaaattgggcggggagtgcctaaataattcgggagcgggtcgtttcctccccccccccgatcataagaatttttttatgaaaactgctaggtttgaaaaaaaaatttcattttttcgggggggggaaacgacgggggggggaatgaagtgcacccaaataattggtgggagggggtgcaaaatgccaaggaattgagggagggtggaggaaaagtgcctttggttcaagcttttaagattggttttaaaattggagacgagcacccgggaaagtccaaagcagtgcttgttcagatccaaaagaaagatttggaaaagatgctttcatccctattttaagcatccatttcgacgggaggtgagcgaaagtatcatttgttggattcggtgaagcgggacacactgtacgagctgatcagcttctacacacacaacgcattggacacgcccaactttaaggtgaacaaacacacggagcagcagaagagacaatggtagcatagtctgatcagcagtgtgcctaatcacttttgtggcgttcggtttttatgccaacgatcgatttattaattaatttatttgatcaatgtttgtcttttttggccttatttctgatcagtgccatcatcagtttggcatttgaccaatcacttctttaatgctttagctgatcaaatgaaatgatcaggaatcgcttaatttatttttggctaaatgattaggttaaacgatcagtaagccttgtctctgatcagtcctaatgcgaaaatcagcagtcctttggcctttgatcaatttctctcctctttcctttcctaaatagtctctgaattgccagacttttctgcaaacgccgtgcccccaaccccaacctcaccttgacaagccgtggttcagcgccaacgcggacaccgaacaggcggaaaagctgctcaacgcggtgcccatggacggtgccttcatggtgcgctacagtagcacggacaagacggtgtttgtggtgtcattacggtattcaattttttggtgggtttcagcttcaaaaatggctttccattcccacagaattgacaacaatctgtgccactttcgcctgaaacgagaaggccgtctgtttatggtcgctcagcgaaccttcgaaacgctgtgccatttggtggacttttacgcgtccactccgttcgtccgcggcgtttccctaaaatttc

SEQ ID NO: 16144 - DNA, 2383 bp, Heterodera glycines
  unsure (1)..(2383): unsure at all n locations
gatggcatcgtcgacgatggccaaatgttgaaaaatgatcacctgaaagtgtttcctccgctcagttttcctatcggtacccaaatcactttgctgtcgatggaccaaaatgatcacaatattgttggtgatgaacaacaacacatttgggttggccgttacaacgaaaaagtgagggcaaaagcgaatttggaaaatgtccttttttgatgccggaaaaattccgtgaatttttaaataaatttagaccggatggttcccagcgaaatgcgtgcgaaaattgactgctacaagcggtggaacaacggatggtaacaacatgctcaattatggcacaattgagctaagcgggacaacgtttaaacaggtgcaagcaaacaatggcattttcaaacttggaatttggcgcaaaattttgttatttcaaacaactgttttttaaattgcattgatcgaatccttctcgatctgttgatcagtcgattatggctcccgtacaacatttatggaattgtttccgggatatctaaagataattggaacggagaaatgcaaatgccggaatttaggaggaaggcaaatgagaaatcgggatcctttttgggccgcctttcccgatcacttgtcttcacatattcttgcccgataacttttccactagtcttttccgatcacttatcccatattctattccgatcaccaatttatccccccccccattgggacagtgctcctccgattcctcggccgatcaccccgccgaggacgaccattcgcgccgcggtcgtcgtccgttcgccttccgcgtcactttggccccgtcccattgggacgtgtgcgactacgttttggcggcgaacagtcgcgaggagatggacgaatgggtgaacgcgtgccaacaagtggcggccgaggcgagcaacaaaatgcgacagttgcgcagtcgcgagaaacagtcgcgcatcgccagcgaactgtccagcctcgtggtagggcaatgacaattttaattttgatcaatcacatatattgaaaacaaaaaatgaccaacattggcagggcaatttcgcataaatgcggactgatcagatagagtttgagctgtgattgtcattttcaagattatcttctgattaagaataaaaagccaccttgacgtgtgacaaagtctctgaacaataaaaaattgatcaataagtcagtttgccattctctgattaaatttaaagctgatcagtcgatcagaagatttagtctgaatttcatcaaaaatggatctttgggtaatcaggcgtgatcggattcgatttttctgatattgagaattttcagctttggtgatcagaatttgttagatgcaaacatttgcttttcggacttcaataagctggtcaaattttgtcctttttaacagatttattgccaagcagttccgttccatgccgatttcgagttgcaagacccgcgcagctcattctacgaaatgtgttcctttaggtgcgtgccatttccgaccaatcttatcaaattttggttaattcaaatgcaaaaattgcatttttggcttttgtctgatctgcaatgatttaaaattagcccttttcgatcatttatccaattgtttagcctaaatttcggccattcgtccatttcagtgagtccaaacatgacaaattggtcgagcgtgggcttcagctgttcaacaagcgtcagctgtcgcgcgtgtacccgcaggcgagtcggttcacctccaccaatttcaacccggtgccaatgtggaacagcgggtgccatatggtggcgctgaacttccaaactggcgacaaatccatgcagctgaacacgggacggttcatggccaacggacggtgggacaacgggcacaaattggaaattagcactatctaatcgggccttaaaaattacaaagaattgaaaaaatcgtctaaaaattttaacagaattaggccgagagtaattttagttacaaaactcgagaatgattttaattagttcgagactgaactcgaacaatctcttatttgtagctgtggctatgtgctgaagccgctttatctgatggacgaaactttttccatcaatgctcgtgatcaccataaccacagccaacaacagcagcaccaccaccagcatcagttgcagcgtccggcgttgtcgagcagcacttttgagaatgtgccgtcgtcgccgtccaacgatggcacggcatttgacaaattgacggaggatcgggacgacgtgccgacgaagctcatcggggacgatggacagaaacaacggcaaaaaatgagcaccggcaatggcactttttccgcagcggcaatgccgtccgacgcatttcatcaccaaaatcatncagcaa

SEQ ID NO: 16145 - DNA, 1469 bp, Heterodera glycines
gttggaatggtcattgctctgacaagactgcccaaaaatagaaaattggccccaaattttagaacatatgcatggcttatgaattaataaaattctaaaaattttacggcctgtaggctctcatttcgactccccttccctaccttccacgagctggacgttttgtcgaaggagacaatgtcatcctggttgagacggcggcgcttcaccccacggcggacggtggtcagactttcgctctgagtaaccggcgtcgccaaacgcgggctgaccggacgtggcgtggaaatgaccatgttaggcgtgctgatgttctgcccgacaaccgacgtgttcggactggtcgacggcgtaatgtgcaatctgtggagagaaattttgattaaaaattgaaacacaaagcaaatgaatccaaaaaaataaacgggacagttacaaattcaaccccccccccaattccgctctcttctccccatcaatgccaacctggtctcctcctgctccaacatcttctggtacgcctgcaattcggtgtccaactgcactttgacatccaacaagtcctggtagtcactgatcatcaacgcaatttccttctgcagttgctcaatctgttcgtcgcgctgttgaatgcgaatgtcggcgtcctcgtgcgcgcggcgcaacgccgcctccaagtccttaaaaatgtgagcaaatcataatcagttggtcagggcttttgctcttcgtgtcaaaaatccaaaaaaaaaaaaattctccgaatattttacacttttctaacagggagaaaatttcagaattcatagctttttagacattttggggtcaaaactcaacgaattgggtttcgcgagaaaaaaacaaaccttaacacgacggttcagcgactcgacgatgccctgatggtctttgctggagttctccaagtcctgaacacggacgcgccacattgccgcttcctcgcgcgccttggccgccaagtcacggtttctgttcgcgttttcagccgcctcgcccagcttgttgcggtacagctcatcgacctgaaaccaaaccaaatttctggtaccatccctgacattggtcttgtttttcgctttaagaaaattgccccggcttgctgattcaccctggacacatacctcggcacggttctgcgcaatgcgattgtcaaagtcgtcccgcatggcctgcagctgttcctgcagcttggcctggtaacggtgctccacttcgtcgctgaacgatgtcatttccacttggcgcttgcgccgtatctcctcaatttggttgctgtgactgcgacgcgcaaaatccaagtcgtctttggcggtgtgcagacgattctccagctcagtgcgcagcagcacctcgtcctccaactgacgacgcaacatatccaccatattttccgagttgttgaactcgtttcgaagttgctgaaaataaaaaaaattttaaaaaaa

SEQ ID NO: 16146 - DNA, 1801 bp, Heterodera glycines
attaaaatcgaaatccagacaaaatcgcattattaatccatcccccccctccgcctacttggccttttcacgcgtgaagaactccaactgcttgcgcagttcgtcgattttgatctcgtagcgggccgacaaattttccttctccttgcgctccacaacctcaacctcgcgcacttggatctgtagacgcgcattctccgtctcgagactgcgcacgcgctgaaggaaaacatttatttgtaaatcttaattactggtatttatttttatccattggtgggtttccattgaggttcttaaggctgaaaaactactaatataatcactttttggcgggattcccatccatccctgaaatagcaatggctgttgtgcatcaaaaattacaaacaatgagaaagttagatgaattcaaatgaaatttcgaggcatcaacggaccaccgaaaatttaaaactcaatttctactctataaaaaagcgaaacctcaatgtagccagcaagacggtcgttaagattgcacaggtggttcttctcgtcctgacgcgacgacagatgacccgatgaactgttaattgttgagccattactgctgaaaaaagggaagcgaaaaattagcatttgattttccaaaaagcataaatgctaacaaaaaaatttttttgcatgttggaaatttattgaaatcgaagccatcactgaaaacagttttttaacttaacctgctttcgatggtctcatccgcacttgcatcaatgtgaatggcagcttcgcgctgtgatcgagtcgttcgtttacttttcgaagccattacaatttaggtttaatgacagaagaataatctgttgggaaaatgaaaattttatatcgtttagggtagaccaatttgcttacattttatgcttttcgcgttttgcaacacttagattttatagataaattcaggaggaagcaaaactcgaaagtaacgggaaaaatatataatgtttaaaaccccgtatgtccccttaacaacatttgagatccaattttctgtttaattggaggcaatttaaaatggaaaccaatcgatgtaaccaaccactaaacacatagagacacagcgcgaaagagaaacgcgggattatctaacagcgaatagtgcccagagaattccaagcactctcgccaaaattaaaacaaacaaataaattttgttgtatgcatgttataaacgtaactgtgtgtatatatgcatatgatgttgagggatgggtgagtcacgcaaaaagaaacggaattttcaaattcaaaaactgaagggggggggggggagaacaaatggagcggaaatagccatcatttaacacagaagagagagaagaaattggaagcgaaagcctcttccatcgcaatttttcaaccaaaccaccggcggaggaagggggacagcaaaatgaatgaaaagggaaagagagagagaggacggatgaggaaaaggacaagcgaaacaacaaatcgatggatgatcaaaaggaatgttggggaaggcacatccaaaacaacgggggaatgaggtgggaaacgcgggccatcgaaatgacgaaaagctgttgaaggaactgagtgaccgaaacaaaccattggccgttttatgggcgtattgcaaaagaaaaggacgcatttattcatatttggtaaagtttgaaaacaacatttcgccatatattttcttttttttgcgttaaattataatttaaatattttttttttataacaaaatctagaaaaggatgacatgaatgaagtttgtgcggaccgg

SEQ ID NO: 16147 - DNA, 2225 bp, Heterodera glycines
  unsure (1)..(2225): unsure at all n locations
ttgatcaacctttgctttctccgattttcatccgatttcttttgcttcacattttctttgtgctttaataaaaggggctattaaaaagccaactcggactcaataggcgggatcgcgcctagcccctgacttcggtcaggggtaggcccaacgatcccacggacacgcctaatatggtccagctggacggatctcatcttcttttcctacccccccccccccccccttacccgtacaatttacattattcgacggatctcatcttcttttcctacccccctttttttccccacaattttcattatttacacatttcaaatattaaataataaaatttttgctcaaaatattaattaattaattagattttcattgttttttcctttttattatcaacataatattttgttcgggccattatttttcccattttggccattttcctttttttccattccttaattggccattacttttgcatatacactttccatttggccatttttccccttcccatatccatttctttgcattaaaatttcaatttccaatttttctgtttttattacctcgtctcccctaccgttttaacaattttaatttttgaccaacacctttcgcatttatttgccatttcctctattttcactctcttttccccctcccttctcaaattctttgcagtttaacaattaaagttttattcagttaaaaatcaaatgtaaaaaaaaaaaaaaatttaacaaatcctgagagtgtcattaacaccaataacccccgccgtaacagttcactgatttcaattggcggagaatcggcggcattgactgcaaaagcccaaaccgcttgtgcccatctgacgacgacgacgcaggagaagcgcagccaaagtcacagactgaatgccgacaaggaaaaggagcacggccattgccgaaacgattaatggggtgacaaaagggtcccagcgtgatgagtcgacacaggaagttgggccaacagagcaaattacagggctcgcccattcgttaatcccaaagcacatttaagtgcagttgtatcccgcgcaggggatcctccagaattccagacgatccaatgctgaataataatgttttgcgcattaacaccatatgcgattaacttaaaattttattttattttttttcctttttttctctctctctctctctcttttcttttttttctcttttcctttccacaatttacttttggccggcagaaggaaatttggtctgtcgtttgcctactgtcgctaccgtatgcccgcatcaccagtcccatccctccctcccttgttttcccatctcgccattctgtgaatttgttgcctattgcctaacagctgtctcaattcccttccccctcctacgaccaggcagggccccatccctggacgtttggagtttttgatcagagctcattaattaattaatcacaggggaaaaagggttggggaaaagaaatttcagctaacaaatgccagtcccgggacaagacaaaaataaacacaaatggcaaatcacgagaaaagactaacaattaacgaaacaaaaatgcgaaaacgaattcgaagaaacaaaatgaggcaacaactgacgggaaaaatgaagaaaaattgggaaaaacagagaaaatggacaattaattaattgccttcgtagggcacgaaaatggacacaaaaatgcacatcaaagagggacggtagacgatcacattgcgatcacattggcaatcatcatccaatcaacgacgaccaattgtttcattatttttattacaccaatcgacgaacaattctttaattacttcatcacttcattttccaatcaacaattactggagttcaacaaatcttttatttttctgagacacttcgacgacatatttctttaaattttaaatttctcgactacaatcaacaaaattctggatttattttctaaattctggtgttaatcggcgaaacatattctaacaattccatcaaaaacggccgacacgcggagaagatcgaatcctttagaggaagaaggactaaacgaagaacaaaccgaaagggataaaaggctttggctcatccatcaaaaaaggcagttgcgtaatatggatttagacgccctgcggcgtcgaattatgactctcgagcaagagatgcgtgaaaatggtggaactcgctctgggctcccgatgnccgaccaca

SEQ ID NO: 16148 - DNA, 3021 bp, Heterodera glycines
  unsure (1)..(3021): unsure at all n locations
tttgggatccctttggttgccacaaatttattttgattttagtgaatggtttttgcctgttagtgaaacccacaaaatgttcttttaatcagcgctttttggtgcttttgggccgcacttttcaaatggtaaaaatttatatgctgaatggatgcacgaaaaaaaatctantttccatgtgaattntaattggaccattatacctacggtagattgtccaaattttcgatcggtttacctnaattaatgactgacccaaccatacctaagtgaaaaattgaaactaatgccaaaaatttaaatcaaaaacgcagcgttaaaattaaacagttggcacgaaacgcatacaaattgaagaatttcggaccaataattagcacttgggtattaaagaaaacacagcagagagagagagagagagagagaggcacataaacattattatgacggaaataacacaatagagatcttgacaatcacactttgtcattcgcgagttttgagcattcgacgtggaacgttttcccatgaaagttgaacttggaacactccaattccgcggccattctgcccgaaatggactttttgcacgctaaaacaagttgtgtaagtagccgaattgtttagtcgaaagtatgctttgctaccgttgcagtggggtagccacgcgctctccgtgatttcgaacaagtacatctggtcgccttttgcttgctgaaataggcaattcacatgcatgggaaattgaccgacttttttaccgccacacagttgcaacagttgcgctgttcgcagccttcgtcgtagtcgtcgccggcaattaaacgtattaggagataaggcgtgttaagaatcatgaaatgaaaaagcattttctgaagggaaggaaaatgttcacactgaaagattaacggaatccaaatccccctccttcgtctccgcttgagcctgcaaatcacagacgcaaaagtccgttccgtgaatttgtcgtccgtgaaaaaaagacacacaaatgcgtaaaaagaatgagctgtttcgcacctgcacattgcattatataggtagttgttcccttctcgttggtaattagttagaaatttttaagaaaaattcgttctttgaacacttgaaaagtttataaaaagggtcgaattttggatccatcatcactttgcctaactattccctattactgtcctatggaaataatcaaatcgctagcagaacgcactctacaggtgtaaaaattttttttcctttgtaaatttttttaaacaaactttttttgttcaggcatgcatgggggcatcagcaacaaaatgcgaagtttaagcggccttcgttttaatcagaaattaatgtttccccatttgcagttcatcccatccggatttgagccaatgttcaaccaacgactcatcaccgttttctctgcacccgcctacacaggccaaacaaacacgggcgcggtactggaagtgaagacgtcgagccactttaccactcactttttcccgccccaatcccagtgattgattgtactttgttgtattgttgttgttgttgttgtgtttataataaatgctcttttgtgcttcaattgagatggttttgtagggaagagggtggcgagggcggtaaaattttgcgtctgtttggtcggagggttagctctcgaagaactcggtctgcttaattctagtaaattcatgtcaaaattatgatggattttcacttttttaccgttgttcacccactaaaaaaactcatctaatatactgttttgtttataccttttatgtatgtacttgaatatgcataaaattaattgacaacataaaatttgtcgaaaatgttttcatgtgaaagttggatttttgacttgtgtcattcatctcgaacaactattccagctacatacatattgatggaatttatttttgtgaatgaataacagtaaaagtgaaaatccatcaaaaaatttttttgacgttatcacttgatgaaaaatcatagattagatgatttatatgataatctgatgtcagattcgtgatcagcgccatcgataacccccgagcacttcttagaatcgaaaaaacgaccttttttatgggaccaatgatgtgaacgattatgtcaataaaaatatttaaattgaattattttaaagctattttttaattgaatattaataataattttaaaattcgaggttcaacttttcttcaatgttttttaaatgctagcttcgtaccattaataaatgcagaataattttgagtggaaaaagaatagggatgatggaaaatttatggggaaaatgcatgaaatttatggggaaacgaatgaagaacttaaatttacgaaaatattgggtgaaatttcagtagaaaattagtagatttgtcttttttctaaaattgaaaaatccactagtaagcttacttgcaaatcaatttgatgggttcatgatttgaaatttaaatttttcgtttccatgtaatttttttttggtcggagatggaatgcttttatctcttttttattttattttttttaaataatcgtctaattaatttattatttttgacaccgatttgaattgtataattaaaattaaatatttttcatttttggcacatattttagccttttttgagttttagcacatattttggggatttttggcgcatatatatgtacagatttggcgttttttagcacatataaatccgttccctgctaattagataatttttatggcattttgtgcctttttcaagaaaataaccattttaaaaatttatttacatatttttgtacatatttttggcagccctactaatatgaatgatgctttttggcaaaagatcagtccgcggaagagtgtgtccaagtgtggcacccgtgcgaccgactggtggaacgacattcagtgtgaccgtgccaacctcgccggcgttgtgtgccaaaagaatgccgtctaaagttttcagcagaaaaacagaagaaatcact

SEQ ID NO: 16149 - DNA, 2452 bp, Heterodera glycines
  unsure (1)..(2452): unsure at all n locations
cccccccccccttcagattttctccacctttctgatccccggtgctccgctgcaattgtcaaacattgcgcagcgcgacattcagtccattgacaaagtgttgcgcgcaattggccaccaccagccaatggcacctccgctggacactgcggctgatcagttgcgcaaactattcatttcgacgcgcactcgcgcagtcagtcaaatcaacgaacagttggccgactttcgtcggcggggccaaccctttggtaagcgattggcagggctttacactattgaatcataaagctgaaattatatacatattttgccattcttttagagttttaatgggttcaatggataaacactccaacatcaaagagttttgacattcatttttttgaatttgcattagtaaatttggcggttctgccaaaactgttcccaatgctttacttttgctgattattttttattttgctttcatttggggtttggcttctcccttctactcccaaatcccttctctttcccagacccggcggatggcgttgacgcggctctgctcgactcgctgacttcgcgcgcggaccgcggtgccgaattgcgcttggccagtcgactgttgttcaaggccctacaaagcttgaccaaatcagcgactaccattggtgaggcattatccataaaatatattgaattgcttttcaaattttcagctggcggaatccccgactttgagaacatcgaccgccgcacactttcactaatcacttccatcgcgacactaattaaggcattttaacactttttgataattaacaaatctttttgattgtcttccacaggtcgttttctgtttgcgcactaccaattcagccctggaggcaagtcacttttttatgagctgatggttatttgggcaattaatttgtgtgtgatcgtggataattaccgttgttaatttcctatccatggcttaatgctcccataattaaatgagatggttggacaattattccatctctttcattttgatttgttgtttttttatttgccactttcttttataatttattttcttttactcgccctttctgactttgtttttttcctctttttttattacttattttctgtttctctctctcacttttacacactctctcactcacttatctctcatccctcctccgattttgatttttaaattcaaattttcccatacagaagctattagacaagtgcccaacttttttgatgccgacctcaaagcattccggcaccggcacttcaatgttcaaaatgttggcatcgtcggccgccaagcaaaagtttcagctcaaagaccatcaagtgattttaatgaccaattaattaacaatcatttcttttttattatgaattttgtatttcttcagtttctgcttcaacccgttctgctcactgtccactgttaccaatggtccgatttttaaaatgatttattaaaatttcataaatttaattgttattattttgattcagtcgtgaagtcgtttggggcgtcaaccctcaagcgtatttctgccaaagtgagtggagcagttgcagcagtgatttttggccaaatttgcattcattaggccaaaatcctgaaaaaatataagcaatttaaaagccattccacaaattgccccggggatgacattttattttggcacatttctttaatcaatcagagccaattagtctaagagaagaaaggttgcttttttcataaaaatgaattttatttgaaaataaattcaaattttattgaaaaaacattgcaagaggaaaaaaaagaagaaaaaattgcccattttcgccttgtgcgatttttgacggcacttttttggggatgacagaattcccgtgggcattttacccccggctttggactttgaattttgagaccattcccaaggccaaaaacccatccatcacttttttgtcggtcgaacaccccccgggggcggtcgaattgcatttttgtgccgcgggggtgccaaaagtcgggaacaatcgacgccaaattttgtgctttttttccacaacaccactacaatatttttaccacagattgtgacgtggtggtgcacaaaaattgtacttcacagctggtgagttgtgccaataccaacggaacgccaaaaacaaatttttgaatttcaattagagcccgtgaatttaattaaatattcataaaaacatatttaatgattgggttttgaaggtcaatcttttaatgatgaaaaactgacaaaataatttgtaagcagaaaaattgaattacagtttttctttcagtaggtttggtgtgattttgggttnaattttgaaaaatttatttgaattttaagttgcagcggtgccgatagataccgccgaaaaataaaatgttcaggaatttgaatcatttattgacagattttcaatcacaaat

SEQ ID NO: 16150 - DNA, 1792 bp, Heterodera glycines
gtagaccgtcgtgccgagggcgtggcatatttcccaattctttttcagcaattgcttttgctcacttctctgtcagaatgttgctgggaactttgttaataatggcgtttttctttatagaaagcaagctccaaggagggatcaagcattgacaagcatggaaatgatctgatcccgccctacgaacatgaactaatgatcgatgccgatcaccagcacctccaacaacggcagcgccacccgcaagtgatcggcaacagcagcagtgccgccatttcacccgccaaactgcaccatcttaaaatggaaagtttggactccagctcatcgcctccgtcgtcggtacgccttttggtggtattaccggccaattaaggcatcaattagggtaattgatccggtggcattgattgacccagtagttttgttgtctctccatttgtttatttcttagtttagttgcaaagatgaatttatcgatcgaagttttcagtttccttttttttaggccgctatgttgccaccacccgtgttcagcacccgttttgaacgcattgcgccaccacgaagtgccatcgtcctgcacagcgacagctgttgagactatacaaccggtggcagtaaaagcggacgggaaagtaggcgcaaatcgtaggctttttaaaaatacgcatcattagcccaacggaaaggccccaccaaaattggcacaaccgatcacttcgatggactcgggcatttgtacccaggcaagcagccatagtgccgcaactgcggcggctatggcagcaacgccacccgctgcagcggtggcatcgccggcggcgtcggcgacgacggcaccgccgacgcggtcgcaaagcataaaaaaagtggtcgaatttcttggattttaattcatttttcaatccaatttgaattgttcccaaaaagactgaacatggcagttcgttgaagcggggccccggcggaagtttgggcgcggcggacagcagcggggcaatttcgcaactcgccattccgacggtgggggcgctgaaggccagctcagccggagacatcgcgcaacagcaggtggccattttgaattttgaaatttaatttcaaaaataaaatgaatcgacaaatggcattttgatttgtcttttccaattcacttcttcctttttgctcagtctccccactcttgcttggctggaaccagctcgacctcatgtgttgagctgaacgcggaggcggaggagcgacgcctggtcgagctggtggagaagttcgacatggactggggcagcgatttggaggtgaacagggaaaagcgacgggcgcggggcgtacaatccattaatagaccgggagaactgagctttctttcgtcgtttctccaaactttttactgccaattcaaaaaattattttaatttagattttttaaaattatatttagtccattttaaatttatttattctcttaaatttaatttttcttttccatgcgaaggttgacactgaaattccgagtctcgagtcgctggtcagttgggaaattctcaagcatctgaagccaaaagagaagaagcgccaggaagtggtcaacgaactgtaccaaaccggtaaagagcttcgtattactggcaaatgagttagataaggcaggcggtgatcagggctgtgcgaaaatcacaaaaaaactttttcgtatacgaaaacgaaacgaaaaagtgcattcgatacgaaaacgaaacacgaaacgaaaaaagatatttgaaaaccgaaaacgaaacacgaaacgaaa

SEQ ID NO: 16151 - DNA, 428 bp, Heterodera glycines
caatcagcagtacccgtatgcataaagatcaggatcggatcctcggatcttgatccacgaatcactgattcgaggatcgaaaaatccgtggatcaaaatccgtatgcataaagatcggattgggtgatccatggatcatccgtggattgtattccttttaatcgtaacttagcttaaacttaatcaaattaatgaatttttgtatgagcaacagctccaagtatccgctactacttatgtaattttaaaaaaattactaaaaatttacaaaaagttgtgacaaaaaacttccaaaaaatttagactcaacaatttataccctaactttttttgaaattcaataaaattttttgaaataaactgaataatagagaaatctttgggctatctaattattttaaaattaaaattggttctttctgaaaaaa

SEQ ID NO: 16152 - DNA, 2614 bp, Heterodera glycines
  unsure (1)..(2614): unsure at all n locations
caaaatgagcaaaatgataactctacagcagttgatcaaatgggtgaagaaatgggaattgacccaaatgatcaacaaaaaagagaaataattaaaaaatttgatgcaattaaagaaaaaattagagaaaagggaaaacttgaaataaaaaataaaaataaaatcgaatgtaaaattggaaaattattaggcacaagtcgccataaaatatacaaatggaaaaaagaattaaatttaaataaaaataaaatgatgaaaaagagtttttatgaacagaaaaagaaagaattcattgaacgaattgatgaatttaagagtttatatagccaaggcaaacagaaagaatttgtgaatgaattgggaattgatgaaaagacatttataaaatggaaaaaggaattaatgccaaaatactataaaaagtatgagaattgatgtatttaaattttaaatattttatgcattaagtaattattccaatgaggacaaattaaaaatgatgaagcaatattccgaaattaaagaaataaatccaaaaatcaaggacgaatttattgctaaggaattgggaattaaatataatacaatgagaaagtggaaaaaacaattttcttccacttaatccagtgtttctatcgaaaatttatcaaaatcagaataccgggcttcaaaaatcagattttggggtcgaaaattagaacattttgcgaaactgcttcaaaacagttgtttttacattgtatttaatcaaaaacgtattaaatattatattttcacctcccataatgatttgaatagtatggaggagtaaattagcaacccgtaatttcattgtaatgggaattaaaaaatcagattttaacaatttttttgcggcgcattacaacaaaaaaaattttcaggaacgggggggggggagtggggtnccggcgggtgccgataggcgccgccggggaaaaatttttgaaaattgagtgcaatttgttaacagattttgtcgaaaaattgtcaaattttgtgatttttgagctattttttatgaaaataatggatttttagggtccgacggtgccaataggctgccgccgaaatttttttgaaattttggcaagtttttaacggatttttgtcaaaaaatgagcaaaatttgcgtctaactttaaaatttctagtaaagtaatgaatgacattatgccataaaatttcaaaattttttgtttttttaagaaatcagaacaaattttgttcgctacaccgaaatcagaacatttctgacaaatcagaacagatagaaaccctgacttaatcagcgatttcgcattattattataaaaagaactaaatcagtgacaaacatttgcttaaaaaattggaaaatggaagtaaaacaatgcacaaagtttgattttgcgtttatgtcatgccttttctaataaaatttaaactttttcacttatccccctttttaacactctttgttttaaaagtttgattttttgtaactataaaaccgaacgccggacccgaattcgaacaaaatgtcgaaattcaatttttcggatttcgcatttttcgtctaaaaacgggttaaatgttatttaatcgcaaaattaaaggctttcagcagtttgtgtccgtgtatttcaactgattttgaattaaaaattccaatttcgaaaatttggaatttggactttttgttcgaatttaggttcggggttcggaattcagaacattgttcttatagaatttacttttatactacaatacttaatgctacagaattttattttaaaatatttgtatcactgacgctttttccggtcacgaattaaataagaatgtttcaaaattccaaaattcattcaaatccaagtttttctcaaatattttcaattttgaaatataagtttcaaattatagattaaataattgagtttattatggctatagagtgatacaagtttgtaggattgggtaaatataaagtaaaaggttttatgatgctctaaactaggcctgtgacagaattggcgggagtgaattggcccactccggtataccgtaatcgcaaaatttacatatatacagtatacaattaaaatggcataaattgcaaaaataagaatatttattttggatgcttatgtaattgagcatttaagtcaatcttacagccatcaacaccgtttaggattgcagagcaaacacacaatgcacataatataatgggggggggggggaagaagcatttcgcggttgacggaaggcttacgccagccgatgccggaccagctgaggcccataagacagagtcccccattagagaatttacccaaaactaggcggttggcccaatgacacaaaattcgaatccgaaattagattctttaaaaaagcttagttcaggatccgaaaaagatttcaggatctgaaaaagaccggaattctagaatcaaatgttacagaattttggtgatctatctaatgcaatggatttaattttataattaaaattgtttaataaaaaaatcaaaaaattcctatgctaaatgtaaattcatagaaatacaaaagtcaaccatcagtttttgcattttggattatacgattt

SEQ ID NO: 16153 - DNA, 942 bp, Heterodera glycines
  unsure (1)..(942): unsure at all n locations
atttttgttttcggggcagtccccccgaaccgatgcgcccagatttatggggagaccgaatccttcgggaatagcttccctatagtctgtactttaattctgcgttggatttttgctccccataaatgtttgagtaccccaaacggacacttgaaaaaatagatttttttgttttcggggcagtccccccgaaccgatgcgcccagatttatggggagaccgaatccttcgggagtagcttccctatagcctgtactttaattctgcgttggatttttgctccccataattgtttgagtaccccaaacggacacttgaaaaaatcgatttttttgttttcggggcagtccccccgaaccgatgcgcccagattaatggggagaccgaatccttccggaatagcttccctatagcctgtactttaattctgcgttggatttttgctccccataattgtttgagtaccccaaacggacacttgaaaaaatcgatttatttttgttttcggggcagtccccccgaaccgatgcgcccagatttatggggagaccgaatccttcgggagtagctttcctatagcctgtactttaattctgcgttggatttttgctccccataattttatttacatgttagtttaggcactctgatgctttttctatcaaagcctaaactttttggcctgtttaaaaaggaattaaaaattttaaaaattttattcatctccctttttaactttttagtgaaaattcaatcactcatttttcgagtagtgatcagaagcgcaccagattttgcaggggcctaaaaaggtcaaggaaaggcgtctctgcgttgatttagcagtagtacctatgaatttagattntctatgaatttttaagttttttgaaatttttttagtgcaanagtggtggtgtctgcaaaaaattttcaccgggt

SEQ ID NO: 16154 - DNA, 2229 bp, Heterodera glycines
atgcccgtcacaatgttcaaaggcgggagaaggcgttgatcagtcccttcttctccagcgtttccatcacgcgcctttcatatttctaaagccgatcaaatggagaagctccaacaaaaggaggaaacaccattcgacctgcttaaatgtgtacggctcgcgagcaatgacaaacagcggaaaattgcaattgatgcccaaaatggcgtactcatagcgacgcccccggcgaaatgccgaagagggaatgccatcgccgtaagccgcgtcaatgacgcgcactgaaacggacttacggaatgagccgcaacggcagcctttttccattttattctgcacttctttcccaaccattgacttcctccggcgtgtttgaacgtctgaacacaatttgtccgggccgtggcataagggcatagcccgaactcagcagaggctgttgctgcattggcattggcattgtgccaatgctttcgtgccaattggcaaatccgtcgcgtggcgttgtccgatttccttttggactcgtaaattggagggtttgaaagacggaaccgacgccttcggtggaggaagaacggctgagcatttcgtaggagaacattgtacacatggaagaggacatcaacggactgtgcatcaccttaacggcacttttgcccgattaatttggtgtgacatttctttggcccacttcaaaccattgacccatcagagagtccaattcgaagttgtccatcgtttccccaacagaacaaagcggagccaatggcgagttgaggaacttttgtatgcgcgtgtaagtgctctcttcgccgtaggatttcttctcttgcttaaccgttagcgaggggataattttagaatggcactgcttccatccatggacattcgacccttccgctggtatttaggctttccaaagtcacctttgtgacatgtcgtgaagaatggtccatgatccattcggtaagcacctgatccaattcggagcttgcctttgggttgttgatgcccataaactgcaacaaactgctgaccaccccttgctgatagcttgacttgtctccatactgtttatgcttcattatttccaacttaacttgcatcccccacttggaagtactgcttcgtcggcttggccatccgtccgtcgccctccgccaatgatttcccatgcaaaacggcgccctttgcttttgggcgatttccaaagcttttcacggattttgtcattccgtcgattttcttttccacctttttagcattcagttcaagcagttttgacactatttctgttggttggtcttcctgcggtacgatgaaatccatggggacttttgggatgaatggaatttgctttggaatgccgctaatggacgaggagaaagacggcactgaattctcttcaagttcgactaattcctcgccagagccttccatgaactcgtcgtgctcctcctcctgaaacagcagctaatttggtgagttgtatagctagcggatgcttctttgaattcaataaaattggaccgttttattgtgtgctgcttgtgccattccgatgccatccgtttttgtgttctgctgctgttgcatttgcttctccttctccgttaggtacggtattcgctccattgcacggtagcgaccgtcgagaaaattgtccaaactccgttcaaagtactgtactaatttgtcttttgacgtcgttggacgggtgaaagtcggcgcgtttgtcgtgtccatgaatttgtcaaaaggcgggccgaggagagagtgcaaatcgacgccgatgatttctttgatcactttttcgggcggcaaatccaacgaaaagtaattgcggattgcctatagttgtttcgatgattagtttctcttttcttttcctttttttccttttcctttttttgcctgagggatttccgtccttcccatcaattccatgctttgtgcgtctttttgtttcagttggttcagctgttcctgccatatgctttgtgggtcgggtggcttagcgaattgaactccttgaaaaacgtatcgatgcgatggtcggacatttttccgaccgtcgttcggtgctgtgtaagaaacactccacgcttttggaaaggtttttattattaaaatttccaaaatttaccaggtgaatgttcctcttggatgaaagaatggtgggggcctaaatttgaaggaaacggtgggactccgaatcagcgagaa

SEQ ID NO: 16155 - DNA, 1539 bp, Heterodera glycines
tgcaaatcaacatttctttgataataaggatacagcaaattttaatgttacatatataatgtaatgttatagagacaatggtcacataatcatcgcgagactaatattttaatcatctcctcaatttcctctgtttgcctttggtaaagcgaccgttaatatggcacatgtccaatcccctcatggtgcggatgtgatcaatatgcataagaatagtttagtagttgttcactcattgctccaaattggtgagagcctcacacaaatttttgcactgcatctcgcgagaacatttgtcatatcaaatcgtccggatgttattaatctgcagctccaacttgtcaagactattgcattaggtaccaaagtgtcaattgctgtatacatactgttacgggttttgtatgtctgactgatataaggcatgaaaagatatcagcataaaagtgagccacagattgtaagtaaaaagtatgaggagggggagggggacgcaagaagaatcttccgtctatgttgttgttgacgtttgggtattgaaataaaagtcggaaggaagacggacggaagggaagaaaaggaccgaccgattgaatgccccgggggatggatcaccgaatgataagtgataaacaaattatcccattccttcaattctcactacgaatcggtataaggaaggtcaacttttggtgatcatttcaccacatgcaggtgcttcgcttgtcaaagaattaacaaatattaattgggcaattattaaatggacaattattatccaactctaaaaggactcatcgctttcaactcattctccaccagaaaaaactagagtgccacgggaccgggaattttgggcaaacccgggaccgggaccttttcgggttgaaaaaccgggaatttttggctggaaaaccgggaaaaaaccgggactagtcccggtcccggtcaaaaccgggaccttggtactcagttgtactcagttgtctgctaccaggtcccgtggcactctagaaaaagcaaagcaaaagcgattggcaagaaattagaaaaaaaaacaattggtttaaatttttattgttctaaaaatttttgtgaatgtaatgtgaaagagtcgtggattaatccgatgacgagttttgccaacgccaattgcctttgccaatgccaacgatgcctttgccaatgccaatgatggctttttcccatttgctgtgccttcctttccccaattcattcttttcttggcattcgatgttttctctctcgtgccgttccccctttctcctctctctctttccgctgctctttttttccgttctgtccctctctcaccgccatagaaaaagccatggcatttccaccgaatcagtcgacgacgaaacggacacttttccgatcagtcgccaatggttgcgaaactcggcaaacaaaacgaatcgaaaagacaatgagcaaagggtgaggaaaattttaaggtaaaatcggggggggggggcaaaagcggaacaaatcacttctgggtttagtggcggagaa

SEQ ID NO: 16156 - DNA, 722 bp, Heterodera glycines
agtctgaggcaagtttagaccaccataacttttttctttgttgaccaaatccaacaatgttggtatcattcgaaagcgcttaacaagctctatcggctatccaaaaatcacaaagacatactgacatataaaaaagttataaattaaaatatgcaaaaattctgactttttggtagtgttcatgttgcagcttttttataagtttttcaatcgcttagcaatatcttatcaaaagcttcttcaaaaattatcatttaaaaatctaaatttctctctgaatcctaaaaataagactaaaataaggacaaagagcttaaataaggacaaatcttacaaataaggacaaagggtaaccctgctctaagtggctgactatggtattaaaaaaccggtacttgtgcggtttacatgatacttttaacatacattttcagattcctataaatgtgttttagaaattaatgaaaataaggggtttttagagtcgctgatcacgaatacagcacccatttttgccaatttcgaactcctgaaccgaactcgaacaaaaataaaattagaaaatttgtaaggatgatatcttggcatcttgcccatgagggtaacattggtacaggaagcctatcaattctttttccctgtacagctcatgtagtgaatggtagcgctgatctgagcccggattcgtgatcagcgacctcgagaaccccttattacttatt

SEQ ID NO: 16157 - DNA, 2064 bp, Heterodera glycines
  unsure (1)..(2064): unsure at all n locations
ttttgcatattttacagaattttaacaattntaagaaaatccaaattaaaaaaaatgcaaatgtcaaaaaaaatttagctaatggtagccgtttgaatagagtgtaagcgactaacaatttntaattttatntaataaaattcggttacatttgaatcagaaaatgacatttttagaaatagtattattttatttgttggaatacatttaaaaatgggtgggtgtgggcttcttcttttcctcccccttcgtcgtcatgtttcgtaattgttgccgggcacagtccgaaggcaataagttatgcccagcgagtcgagcatttgtgccatgcgctccctggacgccttcagacgcttcatttcggtgccaaattcggcgaacaaacggtcctggaaaaggggccaaacacatggatcgagttgattccagaaaaacacacacacacggctatttgaatcccgaaacccgaacaaacatagattcaattgaaagagcccggtctcgaaaaagttcaaaattattggacactaaaattcgaggggccagtgattaggaatttgtcagtaatgaatgccaaagtgtgggtcagtcagaacgttttcaaaatgcaaaattcgttgaataaattttcaaatgtaaaatgtaatgtaatgagagagcgtagcattttcgaaatccgatcatgggatgcgatttcaaaagccaaaatggaagcatgtcatttttctggggactgcccagtctggtacttttcaaaaattaaaaaaaaaaataggtcaattttaatttaaaaaagggacaaaataggggaaaataagtcaaatgggggtgagaaatcctcaaaaaagcaaactccaaaattgaaaaaacgcacaattagcacagggttcagtgacaacagttcgttgtacagtttgctgttctcggcactgcgcagccaattgaggaagcatttggtcaactaaaaattgagggaaaaatgtcaattattaaatgagataaattatggttcattaagcccgaaaaaaaacgtggacatgggagtcctattcagaatttaaaaattcatattcgagtgatgtggaaaatcctttttttagatatttttggatgaaaaatttttttttttcgttttccccacaaataaccaaagtaggccaattttgaaaatttaaaaggagaatttagattttaaaattccatgagtgattattccttcacctccgcctccccaccatccgtcgttgccgtcgcgtccacggcagccccccgctgttgctgctgtccgtgccgttgtttgtccattgttggcgccgccatttgtccggcaccgttttctttggcattgttggcaaatccatcgccgccaccgtcatcgttttgcttggcataattctctgtcgtctccgtctcggcatttttgttggccaaccgcaacatttggccaattttctgcttggtcctccgttcccgttgccgttcagccgccccatttttgtcgccgccgccgtcgtccgttgccaatgcgcgccgcactttccgcgggattggcgtgtcgcttgaaatcactggaaaccaattaaaaattttttttagggagagggtaggcctacaaacgaaaactaaaaaaataattggaaaatccaatttctcccaattttctaacaattttttagataattgtttaaaaaaatctttgaaaattttaaagtttttaaaaaatttcggtggagaaaacgaagaaatgaagtatatcccaatttctgatagaaatttaaagtgattttcgaaaaattacaaaattttccaaatatttcaaaaaattttcgatttttatggaatttatacttttttataaaaaaaaattgtataaatgccaatggctcttaggaattctaaaaaaattgtagcacattttttaaattttgctaaacctngngtgtgttgcctcataaattcggttcaaaagtcggatagccgcacgttttcccatcggaccatggccatatttggcaagttcggccttaaattgacaaataatattaaagttgngtaattagaatt

SEQ ID NO: 16158 - DNA, 2190 bp, Heterodera glycines
  unsure (1)..(2190): unsure at all n locations
ttttgtgtgcttttctcccccttttaacgctaaaattcgctttttcgtccattctctgctgccggacaatttatgacagccgatgaatcgaaacgaaaaatgataaaagggacgacggaaattgaggggggggggggggagacgaacnaaacggtgaaatgccggaaagaataaattatccgaaataaattaataaaatttataataaaaatatttatatatcatttaattaattgagcaaccgattcgaaataacaaaaaatgagcaattcttcaaatgtatttgagcacttcgtaataaatggccagaatcagtgcccctgaagtgcacctcagcgaattgctcagcgcgcctttgtacagtgacagtacgccttcagtacggcatacggtagaaaagcattgccattgagtactgtactgcttgaattcactgcccgcttccaacattaaccgacggcggacagtatccagcggatagcaaaccaaactggacacaattatggaaaactgtggagggaggggggggggggcaattaaaatgggcaaatggtgccacaaaagcaaacccaaaaggccgtctcacctgagctaatgaccaaattgccgcgaaagacagcgcttgtcgccgttcctccgctaaggtcagccgaatggagtcgaaaatgccgaaaaaaacggcacgggagagaaaggtgaagttaagagaagcgagaaagccgcggtaaagcccagcagtgccttcgcgggagcgtatcaccgaaaagcagtgaaacaagccgcggtgcacacctccgtcaacggcaagtcgggtgcgcgcgaggtccaacgggtaacagaagacgagggtcaaagcggcacccgcaccgcccgcagcgacattgcctgagggcagagtcaatgactgccgacaaaaggcaaataaatgaatgcctgccacaaagcgaatgggccttttgcgacattcgatgccatccaaaaaggcgacacggaaccaatcgcggaaggccaaattgagcgcattgtgcggaaagcagcgaataacactgctgaatttcctcgccacagcgaacggatgccttcgtcggcgcacaaacgccgcaaacaatcgacgatgccgcggtaagggagcgaatgggcggaggggaggcgaacaacgggcatatggggggtgggaacagcggcattttgcaactgaatgggcgaaagagtaagcaaaagcagacgagggggggggggggtaattagggataatgacatggggtaaggtaactgaggatggtgacttcattagggtaattatatcaaaattggaaagaacggaggcaattgcgctatgcatttagcggcccatttccaatcggtttttgctcaattttttcttgcctgaaggcacaatttgactctgtccatcggtgccactgttgttttggaaatggcagccgcaaatgcgccagcggccattcccttcagggcatgctgattgaaatcgcttagctgagtgccaatgaccgatgaggtggaagggactgtactcatgcccaaaaatttgtacaaaaaatgcacgaaatgcccttgaaaatacaccaaaaaaaagaattttaatagaaaaatgaaataaaataaaaatcgaccagagagcaaaagaagaacggaaaacaaacaaaagttaattttgggataaaaacggaaaaggctctttggcctaattaaaatggacgctcagcagcccatcccttcctccgttagcaccatctcttgcagcggcggtctttcccggtgaattgttgagcactgctccccgcgtttattgatcaatgtcggtctctgaaacgacgacgaagggacctccccccccccaactttcgaagccaaccccacccccaagaaaaggcaatgagtgaaatgagctaaagaagcaaaaaggaagcgcaaaaagcagcaaaagccaatcagtcaaaacgattaggcaaatgaagtcgaaatatttgtggtcattcggtcggttttatttaatcattttggtgccattgtcgtgtttcacttcttcaaatacattaattttaagttatattttttggaaataagtaaaccctctcagttttcaaagcggcgatgccaatcttccaagaacataaattttatgagctttgcctaggctctgattaaaaaagcatacctatgcatttt

SEQ ID NO: 16159 - DNA, 839 bp, Heterodera glycines
ttagggtaataaatcaaaattgaaaaaacggaggcaatttcgttaatgcattaagcggcccatttcaatcggttttgctcaattttttttgcctgaggcacaattgactccgtccatcgggtgccactgttgtttggaaaatggcagccgcaaatgcgccagcggccattcccttcagggcatgctgattgaaatcgcttagctgagtgccaatgaccgatgaggtggaagggactgtactcatgcccaaaaatttgtacaaaaaatgcacgaaatgcccttgaaaatacaccaaaaaaaaaagaattttaatagaaaaatgaaataaaataaaaggcgaccaaagagagcaaaagaagaacggaaaacaaacaaaagttaattttgggataaaaacggaaaaggctctttggcctaattataatgaataaatcattaaaaaatattagaaatgctcattcccaacaaatggacgctcagcagcccatcccttcctccgttagcaccatctcttgcagcggcggtctttcccggtgaattgttgagcactgctccccgcgtttattgatcaatgtcggtctctgaaacgacgacgaagggacctccccccaactttcgaagccaaccccccccccttccctagtacacacatactaaccaattttgatgatgatggaaaggaagtgataatcatgtgaaattggaatggaaagattgcataaatggaaaaaaaggttcaaaaaagaaaagaaaaggcaatgagtggtcccagtgattgaaatgcaggagaacagagtcccagtgattgaaatctggtgggttgagtcccgacgattgga

SEQ ID NO: 16160 - DNA, 970 bp, Heterodera glycines
gcgaagcggccgagtgagtaccttcggtgcaggaaaatattaaggaagagagttcattatttatttgttttttgcaaaattaattcataaatattttttcagaaagtgctctgaaacacacaaaattttatttacaggttagtttaggcactcagatgctttcactatcaaaaagggagatgaataaaaatctaaaaatttttaattgctttttaaacgagcgaaaaactttaggcttaactttttttttataaactgatcagaagcgaaccagattttgcgagggcatcaaaaagacaaggaaaagcactgctatgatgctaactccagtaattctgaatttaaaattttttattaatttttaaagcttcactattttatttttttagcaaaattaattcataaatattttttcacaaactgctctgaaacgcaccaaattttatttacaagttattttaggcactcagatgctttcactatcaaaaagggagatgaataaaaatctaaaaatttttaattgctttttaaatatgcgaaaaattttaggcttaactttttttttataaactgatcagaagcgaaccagattttgcgagagcatcaaaaagacaaggaaaagcactgctatgatgctaactccagtaattctgaatttaaaattttttattaatttttaaagcttcactattttatttttttagcaaaattaattcataaatattttttcagaaactgctctgaaacgcaccaaatgttaattaaaagttaaataaggctctctgatgctttttctatcaaaagggagatgaataaaatttttaaaaatttttaattcctttttaaacaggccaaaaagtttaggcttatattttaaaaagtttcatcgaacctagcgcactaacatcgatataatctctccaaattattgcaggccttctccattgtaaaggactaacttaacctgaaa

SEQ ID NO: 16161 - DNA, 3252 bp, Heterodera glycines
gccgataggcgccgccgccccccccaagaattttgagtgtaatatattaacagaacttgtcccccaatgatcaaagttttggttaaatttgcagttttaggctgtttaaaaaaaagaaaaaataataatttttaaattgaaatattttttattaattaaaatttcaattgaaaaattatttaaagaaattatttaaaaaattctgtaccgttggggaattgaaccgaagagaaaaataatgaaaggcagaaggtttagccagcagaccatatttgaattagagctatccaaaaatagagaaaacattaaggaaggaaagaaagagatttaagattttttttcgcgtaaatttgaaaatttttctggctgctcaaaagttcaatctttaggggtgtattttcaactctcgcctctcgtcccaaaaaacgagaggcgagagacgagaggcgagagttgtcccacccctgctctacacttaccttttcaagtgttggcataatttccttcagaaactcaatgtccccagtggcaccgaaataatcgtaaaccaaactaataaaaataaaaattttaattaagtaaaaatgtaataaataaatggtccaaaaatagacacactaagtgaggaatggcggctgcgatcgtttgctgtaataaatgcgtccaccggcgggcacataaccaaaacggttgaccaattccgcaaagtttttgcacatatttttaacggatttttccattcctaatatgtaatttaaaattaattttttaaatagtcaaaaatataaataaaaattttacaaaaaagtttaatttataatttagatttttaaataaattttcatttttctgatcactttccacctgatgcgagcagcccccgcgcaatccaaaaggaatcccaatagcgaaactcgcgaaatcgccctccgggcacgaaaaaaggatcggatagataaatcagtgaatgcctttgattgtccttgttgttcatcttttaaatttttaatttattatgcgcattaattaattggattttttacatcgtttggcatttttttgctcaattccttccacattttgttcaattcaatggcccattgcttcaaattcttgtctttgatgttctttagattttggggattttcgacccaatcttccggcaaatgccttaattttgtaacatttatttatcggtttactcttaaattgggttttttcggtacaaaaaatattcgaggcatttttaaaattatattcccaatatttaataaatattattaaaatatttttaaatttaaattgccaattcaaaattcactccgttaatgcgctgtcggccgtcccaaaattttgccgtataaatttggacaaattgtccacttgggtttcgttcattttcgacaccataaattgcttccattccgccacattgaacactgttttgaattgttcaaccaaattcttggcatcatttttcattggacggtcaacaaaatgtttggagtcgcgcaagaaaagcattcgttcgccccaatcattcactgcctgcacaacaaattacaaatttggatttaatttgtaaaaattaaaacaattaataaattttaaactttgataaaatatgcactttgtataaatagatatttttgggcacagttttcctaagcataatgcgacttttgcgccggacaacaaaaattgacacttgcgccggggatatttgcgccgcgacatggccacgcagtcaaaaattacatttttatataattttcactattattcaacaaattttattaaaattataatcgattgacaaaaataattaatttaaaaataagcaataccaattactcattcaaaacgatagacatttaaaaaaatttttgttttttgcttttattttttttgttaagacgtgtatatcagggatgggccgacgtttcgcttttcgcatttcgctttttggcgcgaaatgcgaaatttctacccctaagaatgaacatatttgaaaatttaaatttttaaaagaatgcttccgtttattattattttgggctgcaggattaataattaccttttttctaacttgctatggcctaatacgcacgaaaaacgagtttttaactggtttgaagcttatatcttgaactttttggtgcatttttttgccttttttttttgcgattttagtgccttatgccgggcatgtaattttgttgccttttttgacctttgtgcctttttcatgccttttttttactatttttttgaaaaaaatagtaaattttttgaaatttttgcaacttttcctatcatattttattacaatttccaaaaaatttccggcggcgcctgacgacaccgccggaccctcgttaccttgatttttggaattttaacctctatgattttactattggtaaaaaattttgaaaaaatttcgcttttcgcgtttcgcttttcgcaaatttcgcttttcgcgtttcgctttttatttttcaatttggcccatccctggtgtatatcaaacagcaatgaacagattcttttcttcttttggcatgggttaaaaagattaaccgcccccctattcacccagctttttgcaaagtaatgcttaatttccgaaaacaaaatctgtgctttaataatgatgttgggccattgctaattatgatcttaaatagattcattcaaacaaataaaaatgacgaagaataccaactaaattgattggggacccgactgaaattgatttacgcattttctgaccgcccacggctttaaaaaatagattaaaagttagaaattttgattttttgtttttttgcttgctggcgcaaaaatcgcggcacaaaagtcggcaaaccgttcataagtgtatctcttttatgctaatttagcatattctaacaaatttacctcgagaattttcccgtcgcaaatgatgggtgctggaaattatatgtgtaaaatttatggcatataataaggagggttcaattttatatatgctaaaaaccctcaaaatatgttaaaaagcgaaaaaaatccaaaaaatttctaaattaagtgctaaacactgttgaaaaaaaaaattaaaatttatttaaacaggctatttttctccaaaaacgctaaaaaagacataaaattattttacacatttctctctttagggttgctccccgacccctcggggggtaaaaagtcgggggccggggacctcggggggcggcatgtcggggc

SEQ ID NO: 16162 - DNA, 1949 bp, Heterodera glycines
atttgtgtagtttttaaagctgcatccgatggcgttttcagattttgaaaattttcaaaatttttcgagctaggccccctcgaaaatttttcgtttttgaattttattattttttgccgatttttcccaggaaaacggagaccactttcaagcaaccgtttttcgagctctatcgattggtggcatttttgaaaaaatttcaaaattttccggaaatagaaaaattttccggaattgagctccccatttccgttcaaggcttataactcgtcaggcgttgattttagcggaaatttgtcttagagcatttttgtagagaattttaagctctatctaatgtgctttatctcatgtttttaccatgagtttaaaaaaagttataaaattaattgttattttgaaactcaatttgagccacggaaaatccagtgaaatttcgaaaattcataaatctcttcgtttttggtcaaatttaatggaataaagctttaaaaatagagaaaaattgggagaattttatgagatttatttggaatttctatcttccaaaataaaaaagttattccagaatttctggtaaaattcgatttttcagaaaaaaattcagaactcccttctgaaaaagtattttataaaaataatatactcaaaaaaatccgcaattttttgctctattttataaattttattttagctttttatcacttttttgaaaaaagttatagaaataaaagtgattttgtaatttgggaccaaaggggtgtgtgtgaccatgatttctgagtgggaaatttttttcaccaaaaatcttccaaaaatatgatttttagggttatttgggccgctgatcacgaatatgtaatcagtttttactttagcatggttaagacctcagaatccctgtgtgatttgggattctgaggagtgggagcgcccgtcctgaggccgcgaagcggccgaatatcccccaaaaaattaaaaaacgggcgcgaagcgccagtctgaggccgcgaagcggccgaatgtccccaaaaaaattaaaaaacgggcgcgaagcgccagtctgaggccgcgaagcggccggatccctcctacaaaattaaaaaacgggcgcgaagcgcccgtcctgaggccgcgaagcggccgaatgtcacccaaaaaattacaaaacgggcgcgaagcgcccgtcctgaggccgcgaagcggccgaatatccccataaaatttaaaaacgggcgcgaagcgcccgtcctgaggccgcgaagcggccgtatccctcccacgaaattataaaactgtcccggaaaatttggagtgctgaagatctattactaattgatttaactattaatccttaaagtttgaagttttacctacccaaaaatcctgtacaatttgcaaatgcttaagaccataatttttcccatccatattaatttttgcgtccagcattaattttgttacttcatcaaatctaattcgcaattatttttcgaaattgattcattgaaattgtttcctcctcagttttattaattagttgataaaatctacttaaaaccaatgcataaaataagcctaaaaaattaaaaataccaaaaggaaaacaaatcgcagcgatagagagagagatatttatctagagagagtgatatttcatcacgagggagagatttgtggacatttaaaataatattggcaagcacatagctataaataaaacgattaattattctgctgtcgtggagcaatataaaaatctaatctgtggaagtttgtataaattaatatcctgtttgcctaaattatttgaaaatcaaaatttaataaataaaaatattaaaagatgctactcaagggttaaatattttccttaaaatttgaaaacctgtaattttacccataccaaaaaccaaactttgaccgatcccgtttaaaaattaattttt

SEQ ID NO: 16163 - DNA, 736 bp, Heterodera glycines
gggaagcgtggggggaagggtggggagccacgcatgttgtggtacacgcatcgattatggaagccgcgcatgcactagcaacgaagtcctttgcgcgaagcgctcatgtaatgcatattcttttcatctctcacaagtaaactgtctacaccgagcaattactgtgcaaagcatactgtctacaccgagcaatcactgtgcaaagcatactgtctacaccgagcaattgctgcgccacaacacgctagttatatactactaaagaaacaaggcaactcatttccaaaaacaaaatctccttacggggcgtcgggaggggttcgaaatttcgaccttggggacaactttttgaggcgcatctgggaaaactataggtttttcgctccgagggccaactgagcgccaacggcgctgaaacggctttttcaaaattttttttgaagttgctcggattcaaaatttttttaaaggcctaaatgaaaaatcggcctcgtaaaggagcttcgtatggatgtttggcacattttttgtttcttgaccgaacccctaggccttaccagtttttctggaaaactgcgcaaaaatgggtcacttttttgggccatttcagcgccggccgaataactcgccagatattgatgataggaggtcggtgtaagcggcttttttgtacagcttgacgagctctatccaaccatgtttttagatttcagataattttcagtaaattttcgag

SEQ ID NO: 16164 - DNA, 1271 bp, Heterodera glycines
attgaaagaatatatttatgattatttcttaatttttttcctttaactccaattttcatcactaacttttcactcacaaatcagacccccattcttaccagtgcttgtttttcccggttcccggttgccctaccgggaccgggaccgggacctgagcttttcaaaatccgggaccgggacctcgaatgaccgggaattcccggcccggtcccggtcccgctctactctaccttaaaggatgaattctgtatttttacacaattttggaatttttttagagttgaatgcatattttatgcgcatatttggaattttttagtgcatacaacttataaccctattaataacttatttcaaattaaaattaatttttcagaagagaaaaggcaaatggattttaccctgaatgtccttgatgagctcctgtttttcaaaaattcgacctaattaataacactttttcagtgatgagaatttgataatccttccgaattttaattttaaaatttataaacctgattccatttctgttttttctgctatttggtttgtgttatatcggcgttttaattgctctaagtcaaatttagttttctcaaaaatttcatcaaatttttgttcaaatttttgttttagcggcaccgattgatcccgtgccaaactgacaaaattcgacaactgttcttggatattcatttttgttgttgcatttttccattttttgcacatatagcaaatgtcttcaaattcattggcaatttgctccgaaagtttgacaaatgcttcgccgtaaatgcacgggtcagcaaaagcggctattttgtgccgaaattctgcttcaaaaatggccaatttaagctcaacaacaaatttctccgtggcctctccaatcattgaaattccctcatcctttttttccagtccatccttttcaagctgttcagcaaacgaaaggagacggtctcttgcagtttggaaacggtcaatgctacagtatgctgcgttcactaacaaatgttcaatgttggcacagtgtttcttgagcgataccaaactttgcggcattgccaacaggtctttagcctccaactgcacacgtaatgtgccaagttctgccggcagttctttaatagttaactttatccggatcaattggctgtccaacagttcgtccgttgcttttcgcttaaaatggtcatttccgttcagcaactgctcacagtaacgcatcgccattttggtcagtttaatcagtcgttggtgcaccattg

SEQ ID NO: 16165 - DNA, 2637 bp, Heterodera glycines
tgtatgcaaaattgaaatggatttaacggtcaggaaaaaaaagttaaacgtcaggaagtaaatcaattttgtgtctattaacagagataaagaaatagtacgccaaaatgtttctctgcactctctatttattggttcatctctcgttttttgaaacggtgtgtataaaggtgctgagacatttataaaagccaccaaaaagagcgttataaaaaaccatcaaatgaaaaattttcaacaaaaatttgctcataactttgccccaaagcaaagcaaatttttaaattcttgatatcattcgacagcccttagaaatctttactagcctgcaaaatttcaaaaaattttgctatgtttcaaattagaatacacttaggtctatcgatttctaataataaattttgtcattcactgtctaattagtgcccactgtcgaattgtccgggagcccaccattgagtcgccgttgctcatttcagattgccaattctctgccaattccttcaaatttgccaaattttccgccaattcaacaaatgtttgttgcgttggtacttctgcccggtctttaactaattaattggaagatattaaatagagctcgaaattaaaaaataacatattctcttgccctgtcttaagtaactttattttctggtcaaaaaaaggaattgttttttgaaaaatttttaaacgggtaaaaaaagactaactcgaattatatggtcaagatagagattgagacttattaaaatagtcataattagagcccggtaaaaaataatttccgggagcgggaatcccgtaaaactcccgctcccgtacaaatcccgtccatttttaacgggagtgccgggcgggagcgggagtaattcgaaaatttaattaaataatcacaaaaatatttttaatgcacaaatttgaaggacaatccttttattaaagaaaaaaaacttaaataaaaaaaatagattttagggtcgaaaatcagaaataaattttcaaaattgcttcaaataattttttaaatcaatttattcgaacaaaaaagtttaaactttttatttccgaatcctttattaattttaacaattttttgctccgtactttttgaaaaaaaaactttttggggtccagggaaaaggagggaggccggcggtgccgataggcgccgcagggaaaaaaattgaatatttgaatacaatagattgccagattatgcccaaaaatagccaatttttgaaaacttgaggcatttttttaagcaaattaaggattttaagactcccgcttccgtaaaaaatcccgttcaccgaaaaaagcgggagtcgggagcgggactcccgtaaacttcctccccgctcccgccgggccgtattatttaataataaaattaaatacttggcagaaagtgttcggtgagcatgaatcataagcaaaaattttttaatctgtttaattcgatgacatataattttttcataaataaatatatctttattatattacagatggcacggtttttttactgttcggtttttaattctaagctccttttattatttcaagaattaatttatattttaatttttctttttttttaagaaaatgctatgaaatttatcttttttataatctttacatttatttttcaatgttttttatttagaaaattgtgtttcattttgctatcttctcgcgaacatgattatttttataactattttttacctttctttctttaaaatattttgattcaattctctcttgtcaagagcttttaatttttcattcatccagttttattttatgacgaatatactcgatttcggcactcagctggttggacgcattcagcttcgattcacgagccaacatgaacaagattcgggcctcgatttcgttcatctttgccttcagctataaaaatatttctatttgtttcgttttaaataaatgtgtttttttaaaattaaataataatatttttcattatagtattttgaaaactgaattaatttttttttttaaaattgtcttttagttctttgaaattgcaccggagatatcaccccttgcaattgttcaatgcaatataccaaaatgaaaattggcaaaaacaagtacttgccttatatcctgcagaatacacccaataccaataaaatttagtgaatttgttatcccttcactttatctgtataaccactataattaataattttagaaggttacctcatttttttttacttttatttttaatttattttagaattatcgtgttttatccaatgtcattttttatcaaataaagttaaaaatatttttttccataaatgctattaactttttagaatttatttttgtaatttttctttattgaataaaatatctacttgttgatgttcattcaaatatttaaattcaattctcgttgcagtgttagcacctgcttcatttattcttaaaggagaaaagttgggtgaacccggaatcccttgagattcatcattttgatgcgttttttttctttgaatttttgtttaataaaatttgttgatagcagtttttgattgaatatttcatcggaagggtcgtgattttatgtgttcttgttttaaattagcctaaaagaat

SEQ ID NO: 16166 - DNA, 2892 bp, Heterodera glycines
  unsure (1)..(2892): unsure at all n locations
ataagcagtctaggtaagagncctaatacgnaaagattttcacacacacacaaaattcgcataagatgtataataaataccattatatttatatgaaatgatataaaattacattagaatggataagaaaatggagggggaatatgaaaatacattaattataatatgaaattaattagaacattaataagaatggggggggggataaattatatttatacattaaattatatttatgaaaggggggatacatatgaaattacattagaaataatatgagaaaagtttgttgagaactcaaacagaatacagtgttttttaactctgcattctgtatgaggtgggaatacaaattagtgaaagggacaaggtcaagcgtgtgggcgtcgggattactagtcgataatgcgtctccgctgttagtgcaataatgtcagtagtgttctcgtgtgagttgaaccaatcgagaaactccgttagtttttccggcacttcttcgaaaggacatgcctcgtgcccgcacacttcgacgttaattcttcggataaaccggcgaccaatgggttagttgtccacataatatgtttgtgtaagtcgaccagcatctaaacaatgcatcatcatgaccttgcccactccataaaaattggaaacaagccccttgtaaaactttcaatgcgttcacggcgaccctgagattgtttcttcaattttttattataaatattttcccaatgacttagaaattcagcatgacctcaatttggcaaattccccggctgtcattttcgcaatatgccaaaaataatgctctaaatcttggtattttggatttcatagaccaattacaagtaaaatgcttttttaaacgtaaaaagctcgaacctgtagagttaattgttttgaatatgtgaagttagtatcatttatgaagccaaaataaagttggtcatttttgaagagggaaaaaagtaattaccaaaattttggcgccttgggaaaaacgggtaattttagccattttgattgggacccggcggtgccttcggcacctggcaaaattgatgctcagtctttgagtaaaatacagtaaccttgaaaaaatacccattttctgaaatttttttcatttcggggggggggggggggaattgccccgctggtttccgaaaaaattgctaatgtaaacttttttcaaaaaactttagggaaaaataccgagccagtgaattgcgatgcgattttcaacagatattccaaaaaatttaaaaagttgcaaaagttgaatatttccggagccgatacaaacgacaggctcggaaaaatttatgaaaattttgtagaatttgctaagaattgggccaaatttgaaatggactaaattttcaaaccatttttggaggggtaaaaatgtcatccctttagtttcagtgggcttggaaaaccctaccgatacccacctgttgcttgttgttgttgttattgttgttgtgccccttttagtgatgcgtttcatttgcgtgacgcgcccattctgtgccatcagtttggacaacagttgggtgagtcgtgcctcttcgtccaccaattgggccgggtaattggccacgggcaaacggagacaaaagcgatggaacggactgaaaattggggtagaaatcacacatgaagaaattattgtaaattcaattcaatattggatttttatttaatggggtatggctatcacaaaaacggtggttccaatgattttttaaaaaagacacaaattatggaaagttttgctggaaaattttttacaatggtcaagcattctaaagtctaaaaaaatgggacataatttccaaaaacaaattgtccattttcctcaaaattctacggattggaggcattagggaagcagggattttcacaaaaaaaaattaataaatttcaaaaaatcaacgataggaatacggacccaaaacaggcattgaatgcggtacacagtgtgccgtagtcgtttgtcggttggtcccctgaggcggcgacactttcgtcggtggtggtggtgccgtatttgcgcgcgtattggccaattgtggcgaacagtgcgcggacggtggccaatcggagacggcatttgtcttcatcagtgttggtggcatcggcatcagcattctcttctccatccaaaatgcaacccttttccgcctccaaatcgccaatgtttgggtggaaaatttgtccaagtaacaaattgccaaaagtgccggtttttgatgttgttgttgactccttaataaacgatgaaccatgaaaaggaaacaaaaaaaatagttttgaatgccaagaaaaaaaaaatttttttagagaaagccttgaatttcaataggcaatttttaagttgaaaatcactgtcagcataaaattggtcaccgccagaaaagaacccaatgtgtttcaatagaaaaaattcaatttttcatggcattaaaaataaataaatttggtatttgcacaccaaaatttcccagaggaattccgtctctaaaacttcgagttgctattaaaaacggcaaaaaatgctattaaaaacggcaaaaaataccatggatggatttcggacagcacaaaataaccaacctttggcgagacaaaaagcatttggcgatggggcagcgaaattgggaaattcatcgacggaaatggcacttctttcgcctcatttttgcacagctgaagagcgcccaacaaaaatgccaatacttcgcggaagaaacgaggcctataaattttcgaaaatttggaaaaaatgacgaaaatggcggaaggcacagaccgatggcaattaacgggaatcccgctcaaggaatggaaaaaaaattttttttttactaaaatttgggtaaa

SEQ ID NO: 16167 - DNA, 1095 bp, Heterodera glycines
agatagaaaattgtcctaaaaagagatagccattttctgagaataattcacaatttccgcagctctggcggtaatggaaaaattttgaagaggctctgcggaacggattagcatcggggttacgagatagaaatttgtcctaaaaagagatagccatttttctgagaattaattcacaatttccgcagctcttgcggtaatggaaaaaattttgaagaggctctgcggaacggattagcatcggggttacgagatagaaaattgtcctaaaaagagatagccatttttctgagaattaattcacaatttccgcagctcttgcggtaatggaaaaaattttgaagaggctctgcggaacggattagcatcggggttacgagatagaaaattgtcctaaaaagagatagccatttttctgagaattaattcacaatttccgcagctcttgcggtaatggaaaaaattttgaagaggctctgcggaacggattagcatcggggttacgagatagaaaattgtcctaaaaagagatagccatttttctgagaattaattcacaatttccgcagctcttgcggtaatggaaaaaattttgaagaggctctgcggaacggattagcatcggggttacgagatagaaaattgtcctaaaaagagatagccatttttctgagaattaattcacaatttccgcagctcttgcggtaatggaaaaaattttgaagaggctctgcggaacggattagcatcggggttacgagatagaaaattgtcctaaaaagagatagccatttttctgagaattaattcacaatttccgcagctcttgcggtaatggaaaaaattttgaagaggctctgcggaacggattagcatcggggttacgagatagaaaattgtcctaaaaagagatagccatttttctgagaattaattcacaatttccgcagctcttgcggtaatggaaaaaattttgaagaggctctgcggaacggattagcatcggggttacgagatagaaaattgtcctaaaaagagatagccatttttctgagaattaattcacaatttccgcaactcttgcggtaatggaaa

SEQ ID NO: 16168 - DNA, 4273 bp, Heterodera glycines
  unsure (1)..(4273): unsure at all n locations
agaaaaaccaaaaatcgtcaaaacaaagaaaagcacngagcagagcgaccgacccctcttcggcacggtcatcccacgagttgggcaccggacgaagagaatcggcaaatattcggggacacttcgactggcaaaagcatttgacagcagcgacagaattggcattttgtgcccagaggaaggctttggtttgcgcatcggtgttgaaagagttcatcaacagaagcggaacgggggagcgcaagtcggcgcagttcaacagaatgcggtgctgctgcagggcgaagtccaaaaaggtgagtccgtcacgcagttggaccagcgatttgggcccggaacagcccattgtagtgcctgccaaagccatcaatgtccgaacacttccttgtcatcctttgattttccctttttcgatcacttttcccacttttctctgtccatttactcattctgctgatcattctcccccctccccgccctttgcttttcatccgatcattcgcttctccttttgtcccccttcgcttacccaatcctccgttcagttttatcaccgcaattcgttccaaaattgcccttctctcctccgatccctccaccttcggcaaatgttcgtatggcatttgcttttcctttgccattggttgtatttcctgccaattcactttgtgcggatcctccaaaaattggcggaaaagttgccgaaacaatgccaaatccttctcactttggcactgattaatttagatcaattcaacaattgctaagctttttgaagaaaacctcggaaggattgaccagcgaagggatgacactgtccaattggtccattaaatgcgcaccttgactttcattttccatcgttggcactgatcggtcagtggtgatcaatccgacggaggaaaaatgagtggagactttatttattggtgaacgaagaggccaaaaagacagacagacaacaccacaaatggagttaattcctgatcagagtttgtcccgcccactttctccatctcccctctcgctctctctctatcttttcactctctctcttttctctctctctctcttctcttttatctctttctttccttttctcccactctctttgttttccctccacaattgcccaatatttctgtccttccgatcaaggtcatctcccttcttctcacgcgccttttccctctaatgaatgaatgaatctgtgatgaatggattgaatggatgaccttttctcgtcatcgcaatattggcttatttttgtttgttgctgcggttcatacgcaattaaaagttgaaaattaaaaaatatatgcctattttaaaataaaaaaagaagaagatgatttaaagggggtaaagaaagaaaatctgaataataaaataaatacactgctgggcagggttgttccgggttacccgatacccgaaacccgaaacccggcctttttctcgacccgaaacccgacccgatgattttgggtcgggtttcgggtcgaaataagcactggtaagaaaggggtctgggtgaaaattaggtggataaggaaattgagaattttttttgaaacgattgtgttcaatggaatcgaaaattttgtatttgtttttgttcattattagggctgccaaaagtatgcaaatgcatatttttttcctggcttctccatgctctaaatagtacgaaaaacactttcttttttgtgtttgcgtataaaaatcgggacttttatttacatatttttgcatattttgggcctttatgcatattttgccatttttcttcaaatattttccgattttggtgcatatttggtgcatatttcacgactttatttgcatatttatgcgcatattttggccacttttcgtgcatatttttggcagccctattcattattatcctttttctaaagatattttgtatgaatttcttgaatttaagcaaagcaaatggctgaaaaacctgattccatttggttttatttccatcgtctactgatttaagaaatcggttaagtgcagaaaatttggagaagcttctttttttgcatcggaatttaccaatttataatttttcttattgatttttaaacaaattaaaaatttgtcaattgacccgatacccgaaacccggcctttttctcgacccgaaacccgaaacccgacccgatgatttttcggccgacccgacccgaaacccgacccgatgatttttctcgacccggaacaaccctggtgctaaatagtgaaatgaggtgaaaaccaatatgcgacaggtgaaatgtccttcgataattggtaaaagaggtgaaaaacaataggaaataggtgaaatgtcctggtgaaaagagcgaaacacaataggaaacaggttgaaatgtcctgtgataagtggtgaaaagaggtgaaaaacaataggaaacaggtgaaatgtcctgtgataagtggtgaaaagaggtgcaaaaacaataggaaataggtgaaatttttaagctatagatggtgaaaagaggtgaaaaataataggcgacaagtgaaatttactgtgataagtggttaaatgaggtgaaaaacaataggaaatagatgaaatgtcctgtgataagtggtgaaaaaaggtgaaaaacaaaaggaaataggtgaaaggacctatgataagtggtgaaagaagtgaaaaactataggcgacaggtgaaattttcagttctaggtggtgaaaagatgttgaaaattctaagaacattgatgaaattctaaagaagggatgaaaagaggtgaaaactaaaaacggaaataagtgaaatgtttcaaaaacagatgaaatgacaacgaacgacggtgagatcttcgtgagtgacgataggcaaaacaaaacaataattgagatagaagctattttaaactggtgaaaaggcaaagaaataatggaatatgtagaaaaataataaaaaaatttaagagatttaccttaacaatggcaaaattaattgctgttaactgtgcaaaaggaaagttttgtgacgggtattgttatcacaaacacaaaaagacaaaaaataaaatttggtggaagtgtgaactttatcaacacggatgcaaaggttggggttatgagagtaacggtgagtttttcggcactcgaatgcataaccatcctccatgaccaaattctacttcaaattgagggagaacaatagatttgaatatgttaaacatataaatcagattttacattggaatttcaaaaatatcacgtgaaattatttttcctctcagcgtgcgtgattttgggtaactcaaaacttgaaaaaaaagtttgatatttccctactctgagcttttgaatgagcttaatttttgttcataccggttcaatttcagggattgaataaatgacaattaaaaattgcggctaacaggtgcttacctacactttaggtcgttcccaattgatggtccaccagaaagttggcaccgggtgtttggaaatcaggaagtttgggcatcagaaatttaatcaattagtacagctaattagacatagggtaggttaagcgtctacttttttccgccttagaccatggaaacgctggagactgcttggctttcaaatcacaatgccgtcggtcggacatcgtcgtcttccccagccgtcggtgtcagctcaaaaagttgagccattctcgtcaccacatgctaatcactaattttatttctactaattagaaaatttttcacccacaaatggttgacaaatagactgaactgcgttttattttgcagtagtaaggcctaattttgaaaaataacagaaattttttggcagagtaaaaaaatagattaaatgaattgccatttaattgaacaaaaataaaataaatttcgagacgacaaaaatgaaattattccctttattatgtttaattatatttttaataattgtcaaaattggatcagaaaagaaaaaacttcagcagaaatcatttgatgcaatatttggagaaaattgggaagaaaaagaagaagaaaggcgaaatgaactcaaaaaaagagaaataattggaaaatattataaaattaaagaaaaaataaagcaaaaaggaagaaaatattcagcaaaagaatggaataaaattgaacaaaaaatagcgaaaaaattggggacaaacaattgttatattaaaaaatggattanagaatttggtcttcaaaaacaaatacagaaaagctacaaattanaaactgatgaagaaaatttagaaat

SEQ ID NO: 16169 - DNA, 1272 bp, Heterodera glycines
  unsure (1)..(1272): unsure at all n locations
ttaaatantcttttttataaaaataataaaaaacatcctcctaaaaatttaactttttataaaacaattttaaaagactaaaaatattttaaagttagtaattcaaatagaaattaaaactaaataataatatttctattctatttaatattccctttcggaaacaaataattaataatttcataaaatttagtcaaaaataaaattaaattcccttaaaagggttagtataaaagaaaaaaaatcaaagtcttatttacggttgaacaaagacatattaataatgcaaaattgatatgaggtaattttttcattaaaaagatggggtaaaaatagattcaaaaccatataaaattttttatcttaaaaccaaattaaattaaattttatggtttagaatatccattataagttttttttattactaaaagatacctacaataggaccagataattaaagattttattgaaatttataaaatgtaaataaattttaaaataaattaatcattactataaattaaaaaaactaattaatagctttgaaataaattatttattaaattaataattatatctgcttctgaatttacacaatgttcttggaaagcagaaagaaaatttagtcttgtggaataatgaaatgaaaattaaaaaattatgaacaaagcggcgaggatgaccaagagatctatgaggttgaggccatcttggacatgtcggtgctcacaacgagcgagcggttatactactttacgtggaaagaaaaatttgattttcattgagttcaataatttgacgtcaaaacttaaaaaaatcaatataatcaaaataaaacctaataaaaattaaaaatatatacgcacggaaaattaaatataattaatttttaaattatcatatataatgttattgaaatgaaaattatataaatttaagaaagcgtatgataatatttgtaaattcgaaaatttataagaaatatattttaaaaaataatattgttattctgaaaataaaactgcaatatatgtataattgagctaattttgcatgatgaataaaaaggtggctaaaattaaaataatggaaataagaaagttttcttttatttaatataaaagataaaatgaatcaatttaaaacacacacaaaaattatattttatatttagaggctttcttttacaggatttcatcctaagaatgaatttcaaaatatggacgtgacacagacaagaaattataaataatttatttttataataattaa

SEQ ID NO: 16170 - DNA, 1935 bp, Heterodera glycines
tgatttaagaaaatatagagaattcgagtctcgtcgcctcaaaaaaaacacgcacttcagaacaatttgaaaataaataaatcttttcagtttttcataatcaaaaatgattttaaatttttttcaattaataattcggtcaattaattaaatcaaaattaaactaataaaaacatatttattttgcaaggttaaagaaaaaaatccgttaaatattattatacaaaaagttgttccgcaaaaaaaacaagtaaagtaagaattttgactgcttttatttcttttaaaattcttgaaatagtagtctgtataatatactcctttcaaatttaaaaatgctcgtgtctaaaacaaaaatggtcgaagatatgtagattatttattaaaatataattttaatgcaaatctcattaaagacatactgccttcaactaagtttaatttaaaaaattttcttttaaacaattatattttttaaattcagaattaaccattttattttttctttctcttaatatggccaaattcatttgttttaaacaaatattaaaaaaaaataaaattaaaacaaccgttaaataactgctgcaatacagttttttttgttgacaaaacaaaaattaattttttttaaacaaaaataaaaattattttttatatttcattaattttttagatttaaataatttgaaacatgcgttattttcttaaaaaagagaaattttatatttaaaatttaatatgtattcatcaaatttaataattttacaaaaagtcatttgtataatgaatttattttgtaagatgcaattaatcgatgtaaaatacgcttgttaggccttaagataagccgtatagacaatgatttattcaattctataatttccttgttcaagaataagtaaataaaaatttagtcttttttaaaaaatttaaataataatttatgaaaaaatacttccatataatttatattatattaaatataaatttaatgaatagaataattaaatttaattattttatcatcactgagtttttttgcatcgcccaaactgagtattttttcgcatcgtctcagcacgttttattcattactcaatttcttgaatttttttctgtaaacattttttttattacttatccattctgtataatttaaatgattatatttttatatattaattcgagtgccacgggaccgggaattttgggcaaatccaggaccgggacattttcgggttgaaaaaccaggatttttgctaggaaaaccggggaaaaacaatggactagtcccggtcaaaactgcgaccttggtactcagttgtaccgcttttttcagtacctgtaccggtaccgctctactctagtttgtagtatcgaaataaaatcttgttccaaatcgctggttatcacgttcttttgcgcgactgaagaagcatgtttttttataagtaaaattctgtttaattaatcttattattaaaatgatttttttatattaattttttataaggttaacataaaattgcatttttttatttatttattttttttaaacgaacgaattatttttaaaattaattttgtttttatcaattctttttgatgtcttttatttatgatgctacattcttcgcgccacgggttgatcgttcattctcgttttcattatatcttttcagatataataaccgaaaaataaatttcatttatattaattttatttttttggtcgcataaggtgcactattcataattgctttatattttattttatatactaatgtagaatatactttttcaattcattaaatatcaaaaaaaaaattttgttaaatttatgacttttaacttaccggcttctatattttatttgattatataaaagtgttgttttttattttaattttatgagtttttagtcatcatgca

SEQ ID NO: 16171 - DNA, 3651 bp, Heterodera glycines
aagtgccatttaaagtccgcgtaagagaattttgattattttgttgaggtggtggggctgaagtgttgttattcatctgctgattgcaattcactgctggagactctgatgagaaactaatgaaagagctgcttgaagaaggcacgacctaaaggagagaaaccaaaaattaatcaatcaatcggtgaccataaataaaacaagcatatgattatttcgttaatacaaaatgccaaaaataaaaataggatttcctgttagaataattttcaaaacaatttcgacatgtgattaaaaaaaatcccaagaaacttggccatggctagttgcatcttgcgtcatataaaaaactattttttgttttctttttttaaaagaaaatttattaatttaatttaaaaaaatagttctttctaaagataagaaataaatttttagcaaatgcagaagtgtcagaagaataataataatccgtcgtgtcaatccaactgttgttgggtactataataaagcacattcacacatttataaaagggatgaacaatcgattattcagctcagtcagtcatcgtcatcttaaacatctaactaaaactaatgtcaaaggcatttgaatccatcgccacaaaaaggaattttcgaagcacaaaaacaccccaaagaccgacgaacggtggagagaagagatgggagaacaaaaggagaagaaacatttggacgaagtctgtgcccaccttttgcttctctccgtttgcggcgttcattttcagtgcgttttcctccgtccgccgttcttcggaagatgacccccccggcgcactgctgcgatcgtcaaaatcaagcaaaagcaccggactgttgttctccttgtcctcactgcaattcggtggtcttttgccttcgttttccgttcctttgcatggcgtttcctttctctgcatttgttcgtcgtccctttgctcctccatttttgcttctttgtcattatttgttgtttctatccccgccaatgccttcaattccatcgccgccttttcccttttgctgcgttcttcttcatcttcggattgttcattatctgtgacaacatttagcaaattgcgtgaagtcgagtttttccgagtgcctggcaatgaacgcgccgaatgaatcacttttttgccctcattagtggaggtcagccaacattcttgcgaggtcacgatgttgctgttcttttctcttaattaacaaaaactatttttaaaataaatctgaaaacttacgcataggccaacagatgaaatgccaattgttcagctgctttcagtgtctgtgcaatggcatatgtccgatcactgctgatgtaatcgatgtgctcaatgtccagggtttctgtcacgtgatcacttcgtccaacccattcgcgtggaaaatacaaacttaaagaatcagcaaaatattatggtaaatgcgcaaatgagttgagctttttccgctcacatcggtttgaccattcggacgcaatcgatacggaatttgttgagggtggggcgaatgagcagacgaggcaatcgcaaattgttgccagcccttatgagcaagtcgtcgagtgtcacttttgaaaaattgaagtcgaagaacaaaaagccaaattcattagcctgaaaactctaaaacattcttatttgatcgaagtttgcagaaggagagtgaggagggataataataaaaaatttatacattacaaatttaaatttcgagaaaacaaggaataaaacaaaaaatttttgtacctttttcagtgtgtcggcgatataatcaaaggcgggtaaataagagtccatgtaccagcgacaaatttgatcaaattttcggccaacttcagcaacgcactgctcgacaaaattgacaaagtcagtctcgcgtttttccgcccattcgaagtccattttgttctgcaagtcatccaaaaaggcaagcaattgcgttctgccaattaatgccttccattttcaacattttgtttggttttcttacttttccggcattggatattgcaatggaatctcccaataccacgagtccacaacttcgattatgtactcgtagagcttgcggaaatcgcggctcaatgagtttcgtcctctgcgtttgtcacgttcatcgcccagctgttgtatcaactgatgcccaaaattcgcataaacttgcccagctgacgttaatttgacggaataaccctcaagacgagccaatttctcaagcgtatattcaatgtcacttacaattaaatagagaacaacttagaatttaaccgattcgttttgacttacgggctgtcgtttgaaaatcggttgttctccaagtcggcacttccaaatccgacggtggcatcgcaacaattggctccttcttggtcggaaattcttaaattcccataataaaaaacaatggaagaaatgcaaatgctaaactcacaattcaatatgactgttatcaaagaaacaagttgaacgtagcatatgaatggcaagcgcttctgtgatgccaaacccatcagaacataaaccaatttttggggccatcagcaaaaaacaaatgttaacaagacaaccttctcttaagacttcactcttaaggctcaaataatttaaattttgcgagaaattccaaaaataaaattgaattatatctaatacaaaaaagtcccagagtcaaggtaatacaaagtccaagaaggaatttttttaaaaaaaacaaaaattttttcaataaaaattttaaaacaggaaaaaaaaattcccccccctttccctggcttggaatttttcgaaaaaacaaaattttttaaaggggaacctcccttgtatagggcaagttttaaattttaaaaaaaaaaaaaaaaaaaaaaaaaaaaaaaaaaaattttccccaaaaaccgtcccccggccccaaaaccccccccttggggggacctttattttttccaaaaaaaaattttgggccccaaaaaaaaaaaggggggcccccccgcccgcccacacccccccccaaaaattttttttctttttttaaaaaaaaaaaaaaaaaaatccccccctctcgggaaagaaccaccccccccccccccccccctcttttggtgggtggttttaaaaaaaaaaaagaaaaaaaaataatatttttttttttttttcgggggggagagaaagaaaaactctcccccccgccccccccccccctctttttttttttttttttttttttttttttttttttcaaaaaaaaaaaaaaaaaaaaaaaaaaaaaaaaaaattttttttttttttttttttttttttttttttttttttttgggggggggcaaaaaaaaaaaaaaaatttttttttttgggggggggggggaaaaaaaaaaaaccccccccccgggggggggggaaaaaaaaaaaaaaaaaaaaatagggggggggcggggggcggggggggggggccccccccccccccccccacccaacaaaaaaaaaaataaaaaaaaaaaaaaagaaggggtggggggggggggggggggggggggttaataaaaaaaaaaaacaaaaaaaaaggggggggggggggggggggggggggggggaatttttttttttttttaaaaaaaaaaaaggggggggg

SEQ ID NO: 16172 - DNA, 995 bp, Heterodera glycines
  unsure (1)..(995): unsure at all n locations
tatgatgacttancaggcaaaaacaaaagctgttttttaaatgtaaataaaaattgagtttcaaaaaatgtgaaattaaatctctgctcaaagctcaattcaataacagaaaaaaatgaatgaaaatcccataaatataataaaaccaaaatacacaattcaacccaacacgtcagtttcataccggggccatttcgtaccagaaaaaacttctctaaaatgatttaccccataactttttcttgatcaactaaataaacaatctatggtttcattcgatggctttatactgttagtgaccgctttttaaacggccactaccgtatcagcctcataaattgccaagaccagtttttatgatgaaaatttgtaagcatttaatttttgcattgttttcggcaaatacttaaacttattttggggaaaaatttttctgatatggatggaactggcgcggtacggaaccggctgataccaatggcaattctttccgcaaataaatgccatttcattcagaatttggcgcctctttcgccatttcctcagcaaatgaatttttcttttcctctaacatttccaaaatattgttgaccatttcctttgctttttctatttgttgtttcgtttccatctccatttttccaatttcattttgtttttgcttttcttccgctttttccaatgcaaattttagtttttcacattttttgaccaatccttttaaatccaattctccttttaggctcacttttaatgcctctatttggggaaataattccccaaatattttctttaaaaattcatttatcctgtacatttccatttccattccaaattctttatcatttatctcattagaaaaaattttggtccaataaatcaaaaaatcttccaatctctcatggatatcttaaataattatttattggtttttcatttcatttatttttattttacctttcgatgcattgaattcgaaattcattgccaattca

SEQ ID NO: 16173 - DNA, 2884 bp, Heterodera glycines
  unsure (1)..(2884): unsure at all n locations
tttgtttatttttccagcgattaaattcagttttttgttaataaaattaaataaaaaatcaacgggacgcggatttttttggaagccccgtgaacacggctcacggattaccgtgattggaaatgcaatcacggccagctctgtccgcaacccccgccccctgcgaactccgcccccgcgggggtgcgggggtgaaattacacacctaaggattcggattttcgtagatgagtgagatgtagttggctgtttatataaaaattttatgctcacaaatgctttaaaattatagtattattactaataaatatttttggaattttttcaaaatttttctctatcataaaaaatcaaatttaattcaaagaatttttttgaatttacattaattcgttttcccactcggccattggaaagcattttaaaacagcaaaaaatgcacgaattttgtcctttgaattttccccgaattcttctacaataattattccttcttcgtttttgccatgaacaagtgcctcaagtcgaacagcaaatgaaaaaagcaaattgaacaaaagtgtgtcaatttcccatttcattttttgttcgattgttttgtgcatttctttatttttaattgctgctaatttgacataattttgctcattattaattgagttaattagttgctttatttggccggctttttctctgcttaatattacactaattgccttttcgaaattgacatttttcaataacactttctttgcccggcatttaaattgtttttgtttttgtgggttttcgtcgaccattaaaatttcttttgttgaaaaattaaataatttttcaagaaaatcatttacaattttaaaggtaaaaaaaggtctatcttcaggattatccataattatttccacaatatcggccattttcttagaaatttccttttttctatataaaagatccgctctgtatggaatttcaatttcgtacttatttatttctttttcacatttgcctattatcattggccgattttttgcataattttttcaacatttaaccccatcacctaattttccccggttcttcaaaattaacaaattacataaaaattttaaattaatttattccccattggacccttcatttttaaaaaaggggtttttttcctttaaatgggtttgggtttccaaaaggaaataaattccctttgggtttttaacccccccaaaaagggaaattttttatttttaaaaaatcccggccccccccaaatccaatctaaactttttttttggatttttttaaaaaaaaattaaatttttttttttttaaaaaaaaaattggaaaaaatttttaaacttattttttttttttagggattttgggggggggaaaaaaaaaaaaatttttttttggcgccctttttttaaaattttttttggggggaaaacccccccccctcccaattttttttaaaaaaaaaaaaaaaaaaaaaaccctctccccaaaaggggcccccacaaattcaaaaattcctctggggaaaaaaaggggggaaaaaaaaaaaaaaaaatttttttcccccccccttttttccggggttttgcccgaattttttttttttttttttttttttttttttttttttttccccccccccctccctttccccccaaaccccaaaaaaaaaaaaaaccccctcttttttttttttttttttttttttttttttttttttttttttttttttttttggttggttatttttgccggcgggggggggggggaaaaaaaaaaaaaaaaaaaatattttttttcttgttttttttttttttttttttttttttgtcaaaaaaaaaaaaaaagggagaggagaagagaaaaacaaaaaaaaaaataaaataaaaaaaaaaacaaccccccctcccccccacaaaagggggggggggttttttttgtgtttttttataaaatggggggtatattttttttttttcccaatatttttttctcaaaaattttttttttttttggggggggagtttcaaaaaaaaattggtggaaattttttttgggaagaagaaaaaaacccccgggggggagaggaaaaagggggcaaaaattttggtgggtttcttttttttttcaaaaagttttttttcccgttttttttttttttttggtttttttttaaaattttcacggggaggccaaaggttaatggcaaaaaatggtaacaaaaatggggatcaaaaagtgggggatcaatggggttcattgggggatccgggggttgattaaattaatttggggatcgggggatcattggttgctttgcttggggctgttttttgtgccttattttagtgattgcaatttgctaattgcttctttcttctcatgttttttctctttttnccttttcnttgtttctttttctcagcttttcttattcctttctgcaatgtcttctcttctcccctatctttatgctttttttcttttttctttgcttctttcccctgcgtttcctttttttcctttcctcttccttcttctcttcttccttttcctcttcctcttctcttcttcttcctccttttcctcaaattttcttcctcctcctcttccctcctcttctctctctcccatttttgttttgttccgcatttttcacctttaattatgctgctgctctgctgttgatgacgatcatttgcttgcgcaacagatggataataattaaccaattaatttgtcatggaattgctgcattttttcccccctccgttcgtccgtcctttccttcgttcgttcgtcaaattccccccctccccccaatgccttaggcagtctttgctcattccctcccanaaatgacgcaattaat

SEQ ID NO: 16174 - DNA, 3110 bp, Heterodera glycines
  unsure (1)..(3110): unsure at all n locations
cgtcgtattgcatcagatatttctgctcncaaaccntagggaattggaataaaataaattatctttttttttttgctttttttggtcaaaccccagaaaaaaaaaattattttaaaaatgtcgaattatagccggagtcgtcaaactaatttttcttaagcctattacaaattgaaaaacataaaaaagtntaatataagtgtgaaaacactgaaattaattagaattttgggtataaatgaatgcaaaaaaaatgaaaattcatcgacttgattatgtacaaattgagactacctcccagggtttttttttatggaccgtgattcttttttgtcaaataaagtccatgcccttagttagtccccaggtcaaggataagacaaggaattttttttcaagctgtcgagccccctaagaaaaaatatttattcaaaaaatccgtaccatttggatggcaacaatgatttgcgccatgacaatcagcagatcgccagtgatcactccgttgatgtcatcttttgggttgtcgtcaaacattctatgcaaaagggaaaaaaacagtcaacaaaagcaacacgtctataaaatgccgagattttgcagacaaaatgagcgggtaaatcccaaatgaatatttattgaaaaaccgaggcctgaatttttttcaaaaaaggggacgagatttacaagggatgcacaatatttcttcccacccaccccccaaaaaatttttttttcggattttattataaaaattcgagttttcagcaatttgttggaaaagttttcgaaatcttatgtggcactcactactctattagaatgtcaaaaatgcattcgccaagaaaatttgatgaaaatttccgaatttttgacccaaatttccgaatctttactctgccgcaacgcaaattcaatcaaaatttggggggtgagaaatttggtcgatgcattattattcacatgtccgtgacgccaacaatcacaaggccgaacgcgacaaggcccatgccgagccatttgaagccgcgcagttgggcacgcaaaaatgagacggacaacagaccggtgaaaatgatcacagcgcctgtggggcaaaggggggggggtggttaaatttaaaaattttcaaaaaaaaacccgaaaaaatctgacgaatgttaacccaaaaaacctacacaaacttaacattgttggggcaaaagacagagtttattaaatgggctaaaaacacgccacattctttccaacggcgataatttcatatttttcagttttttttgctaaatgagggctttacccataaaaaataattgcttaaaaaacctctgagcatttgaaagctggacgctgtcgtcaggtttagaccaacgtacatctgcacaaaaaaaacatggaattatttaaatgcatttaaaaacgggaaagaatggaaatttgtcaaaatttgtcttaatcccaaccaaaaaattgtcattccaatccatgaccaactaaatttcaattgtaatatttgctaactgtgcttgtgcccaacacatcgcaacaggcgggcggcaagaaaacgaacgggttaaagcgcgggagggtcggctcctcatcggtgccaatttcgatgatggcacccccgtcgccgtattgactggagaaatttttagcaatttttttttttgaaatatgagagggttcgaatcatcatcaattccaaagtctggcatttccttcccaatgccgaaagaataaataacattttgtgagaaaattttcgattttccttattggtattccctccaagtcatccctcacccaaattttacaaaaaatttcacgaattggaaccgtccctgtcacatattttccttccattccctgaaattcacgctcatccccccaccttcctttccattacatttcgattgaaaaaaattggttttttttgtcttgaatctccaccaactttcggttcttccatcgccgctttttgaccaaataggcgacaacaaacacaaccaagcagctgaactcgccgatgaacatgcaaaacgcttggaaatagggatggtcaaagaggactccgtccaccacaatgctgtccgcccatctgcacacaaaatatgaaaagtgcatattttttaaaatctcgaatggttttccgtatttgtgccttttcgatttgaaaaaactgtcggaaaattccaaatttagaataaaaataattttgacaaaaaagaggtactacataccaactacaccacgaatgtgtgccgatgccctcaaaaaattttggcaatcggcattccgacggcccaaagaaattttggaattcatgtccccaaaatgttggaaggaaaccagcaatcggaaattggcattccaacacatcgctggtcttttcacaacttcttaacccagtctgttttttcatttttagcatttgtgaatccggggaagcatggttgtctcaacccaaacacttacttcgctgccaatgtgttaacgctgccttaaaaaaattcttgatttttacagtcctaaaaataaatgacggacccgtaatgaccatcatcaccgaaataatgatggaaattagccgttcggtgtgttcttcgtcaatttccataatttcaagggtcaatatttagcttaaaaggagcagttgcatttgcggaataaaaaaagcaaagccaagccattgatggaaaaaaagtgagacactttttttgaatgaattcataaaaaatcagtggcattttatcaattgtaaacatttaaaatacatataatacagtaggaaagatattttagaccggaatacctaaatctggcttgaacgaggcgaatgaagtgtgtgatggttggcattaatgcaattttagccccactttttttggtcaaaaatttttntttggtactttcctgttatgcgactacaagccaaaattcgggcatttaatgcatataatggcctgtgtattgacacttggctagacccttcaagacttcacctgggcccgtagaaaaagaacgaggtaagggtaaggttaccctcagctgcgagtaaccttatccgttacccgtagcaaaagagcaaccccgagttgggggtaagg

SEQ ID NO: 16175 - DNA, 1041 bp, Heterodera glycines
tcctatattcttcacaaatcattggaggcttaaaaactttgtggtgctcaacccgtgccaaatcctgctcttgaactcagtgccgtcgtgcccattagaaggcgggcggcacaaatgcttctcccgctaccgcactttttgtgctttcctcgagagtcccgaggcgccaaaaacgctctcgaaaccggcaaattaaaaaaaatcccgccttttcgcgaagaaatgggcacagaatgccaagaactgatccatttctatatataagtatttttcacttcggatgcggaagagcctaccgtataaatatttaaaaaaggggaaaagcaaaagcacatttttgtcgggcaattacactaatacacccttttaagtggaaatcgtaatttttttcctatgtcatttttacgagagatttgttttttttttaaattttgaggggttttttttgaatttttgtcattttgtttaattaatttaattcaaaaattctttagggataaaattttgtgtttttgtatcagaaggatcttacgtaattataaatgcatatcaatgacggaaacataagctataatctcattttttaattatttagggtggaacataatttttgatacccaaattttttttattaaaaatttttttttgaatttcaacaaaacacaatcatgattcaaaatacccgccattattatcaataatatgttgccattattctggcaagagatcaataccaatggaaaagtatttagggagttagagttaataagtaaaaatggtcattttagaggtaggtatttttgatggctgatttaaagaaaaataaaagagatacagagccagagaaatagtgattaaatagagcaaagttaggactataagaacacaaaaatataaaattttaattactaaaattgaattatgggagagccgagactgaaagtggtctccaaaacggcatttttcaagaccaccaaggaacataatgttttaaaagtggttttggaaattctgaatttgattaaaacaggtaaatcgggt

SEQ ID NO: 16176 - DNA, 2345 bp, Heterodera glycines
ccttcacgacaaaatttcgaattttcccatttttaaaaataaatataattaaagttttcttttaaaaatttagatcattgcgaattgtcgctgtgctgtgcctgcaacacgcccattcacgaccaatttctttataaggtgagaaaaaaatttgcaaaaaaaaaattttttgttttttcattcgattgttaccccccaaaaaattcaaaaattttcataaatctcaccaaagcacccattaattttttgtttcttttaaaccatagaaaattttttggcaaaatcattagctcaacccgcaatgttaaattttcaaaaatcaaaaagccccccgacaaataaccgaaatttttcaaattttcatttgtaaaatttcaaaaaccaattcctctccctgaagagccaggcagccagccctaaaattttcatcccacctctcgctgtgccaaagaataaatttttccaattttcatcccgtctcccacccgtggttaaaatcttccctccctctcccccccccctaaaaaatcccaaaatttttcctctcccttcatgttgttcaaaacaaaatttttgtaacccccccccctcgatattccaaagttttgtaaaacttccctccctcccctccatgtctacctccacccccctaaaaattccataatttttggaaaattcacccatcccacccatttcccgaaaaaaaaaacctcaaaatttttttttgtaaatcctccctccccacgtgccgtgcccaaggtgctggacgaccagtgctaccacgagaagtgcctgcgctgttcccaatgtggtgacccgttccggacacggacctgcttcacccggcatcggctgctgttctgccagcagcactttttgcagacgttcggcccgcggtgtgcccattgcgcggcaccaattgttgaacaaaccattgtccagcgtgttggcccacaacaccatttaccatctggagtgcttccagtgcctggtgtgcaaagtgagttttttttttgaagcgagcgagccatcgggaatcgatctgatcattctggtctgatcaatggtctgatcaataaacgacaaatcagtttgatcaatttggcacctaaacgggcaacgatcactctgatcatttttgatcaatcgggaaacattgattattctgatctgatcgataggcaacaaattattctggtcactttgatcaaatgggtaaccgtcactctgatcaccttgataaatcgggcaatctgatcattcattgcccattgctcactgatcgatcatttgatcactttgactgatgccaactttgacaaatttcaaacatggaatctttgaaaaaacaactgctcttgcagagagagctgagccggggtgaccaattctatatgaatccgattgacggaaaattggtgtgtcggcacgattatgaggccggaggaaagggtgagtattataatattaaaaaaaaattttggcaatttttccgtaatttttgaaaaatcggataaatttttcaattttttaaattttaataagttactttgtattttgacttttgtgagagcttattcaattcactttcttgtttattcattttgatttatatttgtcagtttccatttggtgccgccaaatttatcaaaaattcctgtgaaagtgccataatttttcaaatttatcaaaaattcctgtgaaagtgccataatttttcaaatttatcaaaaatttgtgcgaaaatactacatttttcaaaattgtcgtaaatttaagcgaaaaggccacagtttttcaaaatgtaccgaaaatttaagcgaaaatgccacaatttttcaaattttcgaaaattcatgcgaaaatgccacaatttttcaaattttcgaaaattcatgcgaaaatgccataattttttttctcgcgtaaatctgtgccaaattttgtgaaatttcgctgcaaatttatctcaaaattttttgtttcatatcataattttacgaaactttgctgcttgttttttcgaaaaattcttggcataattttttgcaaaaaaattggtgccgcttaaaatttaattttttttttttgaaataaaattttttatttttttaattccttattaatccgcttcaccgcttttccattaaatcattttcccggaatttgcacacaaatttaaagctgctaggccatcaaattgctgctgctttaatccaccggatatgttaaaccatttttggcaacatattcttcaatctttgacagctaaaaattaattttggattttctttaaaattaattttgctttttcttagaaaattaattttggattttctctaaaa

SEQ ID NO: 16177 - DNA, 1109 bp, Heterodera glycines
gcaattagtgaaaattcccccaccaatgagccacgataccaatacacggtaatccgtgccgagactctcgaataggggagggggggggggaggattcgggatcgggattagcacggttttttcttcctgaggcctgggtttccgatctttcccattttttatatgggaatcagcgcctagacgctcgaatagggggtcgacgggaccataattagtcctggttttttttttttagagagacaagtcccaaggcctggatccccgatttttttttctattttttcttatttaaaatttgcaggcaaaccctcaaaattgttgacagatgaaagcgattttgaattctctggcgccaaaccccgcaaaatttcgttgcttttttttgtgggcctttaaaaaaaatttccctcaaaaaatgtgaacaccaccagcagcaaggagcagctgcctttttcatccaaatgctttgatttttatacgatgtatccactcaaaaaacgagcattttgttgtgtaaaaaatgggggaaaaaattggatgagggaaaaggacgacaaaacggacggacgaatgattggggggggggggcatttaattgtatgaggaggaggggaagaggaggaggaaatggaggaggacaacccatccatctcaacctccacttatcccatccgatgatcccatctcaatggatgaatgagtggataaatgtgttcgttcttccgtctttgttgttgaagaggaggaggaagagaagggagcagcccccgggggacgcggaagaacgacgcgaaaacattggcggggaaagaggaggaaaaatggggacacggaaaacggaggacagacgacgaggggggaagggatttgttggacatttaaagaagagaaagaagcatgacagatggacgatggattggatttaagtgaaatgtggttttgtgttaggcacattatgtaagcgggcatttttctttttccctaagggtggttaggggtgtggatttttttaaatttttctttttaacctaaggtgggttaggggtggggattttttttaaatttttttttttttacctaagggtgggttaagggggggggattttttt

SEQ ID NO: 16178 - DNA, 2528 bp, Heterodera glycines
ttttttaaatttttcttttttccttagggttggtagggtggggatttttttaattttcttttttacctaaggtggttagggtgtggatttttttaatttttctttttacctaaggttggttagggtgtgattttttttaattttcttttttacctaaggttggttagggtgtggattttttaaatttttcttttttccctaaggttggttagggtgtggatttttttaaatttttcttttttacctaaggttggttagggtgtggatttttttaaatttttcttttttacctaaggttggttagggtgtggatttttttaaatttttcttttttccctaaggttggttagggtgtggatttttttaaatttttcttttttacctaaggttggttagggtgtggatttttttaaatttttcttttttacctaaggttggttagggtgtggatttttttaaatttttcttttttacctaaggttggttagggtgtggatttttttaaatttttcttttttacctaaggttggttagggtgtggatttttttaaatttttcttttttacctaaggttggttagggtgtggatttttttaaatttttcttttttacctaaggttggttagggtgtggatttttttaaatttttcttttttatgacaaggcggtaccagggggagggaaggcgggttaggtgctaggggtgtaactgggtcccgcgaaatttcgggacttttggggccagaattatctcgatattttgatgcaataaatttcaaggagatttctaaattttgttttgggggcctatagattacagccctccgaaaaaagtgaaaatttctcaatgaaaattttttcagtagaacccaaacccaaaaatttttccattgtggtactcggtggattaatccaaaatcctgggatttcgatagaaaattggatatgtccctgacatttttcgttataagtgatcacccactccctgatcacattctaaaattggaaggatccaattgaaattgggatttttcggcattttagtggggatttttcccttgaaacatgggactgactgacacaattttcaaggaaaaatcattttgattttatagtcaatgaaatttgataaaattctttataagcctccacaatattctcggcggaatatttgtgtaaataaaagattttttgtaaatttttcatttccatccgtggaagagatttaaaaatggaggaaaaagatgatgactcatcactcccgggagatttatttgtgtctcgagaataggacggacgagagtgaaagggcacacacaaccaatgaatggatggataaatgaatggtccgaggacgacacacaagcaaaacaaaccgaggctttttggggggatgggacggacaaaagaaattggggggcccattttggagagaagggcacattgtgccgatgccgaaattggtggcaattgcgaccaataaacaaaccagcaaaatgccacaaattatatgggggaggggggagggatgtgctccgttttgtgggtggaagaactgtctcgaggataggagattagaatcttgaattttggctgggcccctgactcgagaattatccttttatcgacaaaatgccgaaattcagcccagactcgagaatgccttttcgagaaatgccggccttttttgtggggatcttaaactattttggattgaatgaataccaatttcttcagagtgctcatgccagaaaacatattttttggctcaataaatgctacttggggagcaattaatatatctaatgacccatgagtaatttgttcatcttcaatcattgttaatagtcgagagtctcgggaaaagaggggctcggaaataattcaaccgaattttcaaaaattttaatcacggaaattgtgaaaattctcagtctcgcgactcgagataatttgaaatattatagaattcagcagatggaaaacaaattgtcgagagaggaacatttatctgtcccaattttgtgatcgggagggcggggattttggaaagtgatttctgtctgatgctgctgttgttgttcaatcggtaaaattttgatcggaatttaaaggcgacaaattgtaaaatgaggtgtcagtttaaatgcgataaatggatgatgaaagtgtatttgtgtgatcagatcagtgacgccttccttatcagtagcgatcagagcaggagcaggtcgagacttgactgaccaccaccattttacctctcccaatgttgatcagataaataaatatataatatttatatatcccgcgattggcgggaggagtgatcggacggaatgtgtcattcatttaattcatccctttcccctggggggagggggtccgatcggactctctgtgctgatcaattaattgactaatgagatgatgtttgatccgacccagcgattattacacaaaagcgccggttttggaaatgtgtaagcagattaaaatttggcacagttttcccattttgtagtaat

SEQ ID NO: 16179 - DNA, 2935 bp, Heterodera glycines
tttttgagaattttaaaccaattaatattttcataagataatttttttttgaaattagccttatatttaaaaaaattatgtctcagtgacgaactgaacggtgacgaaacgatcagtgacgaaatgataggtaaccgttttttctcaatttaatttttgaatttattttcttttccctaagcgtccaattccgtcccaacatttttccgtccattcgaatggttacggcgccatcgccgccgatgcgacgcggccatcggtcagcggttcgtccaattcgtcgtccgatggctttcattgtcacgcggacggcgaccgacggccaacggacgcgcaaaacggcgcaagtgatcagaggagggcacggacagtgctgtggatgtccgtgggggtgtgctttgtgtttatgatttgcgaagtgatcggcggagtgttggccaattctttggcggtcggttggattcattagtcaaaggttcaattagtgaatacttcagattataacggacgccgcacatttggtaattggcaattagcagtggccatacggaaaatgaaacatttatttgaaagtttttgaaaccatttaaatgctatatttaaatattttaacaaattattctgcttcgtccgataaataaaaacaacacagctgaccgacttggccagcatgctcatttcgctgttttcgctttacattgcctctcggcccgcttcccagcgcatgagtttcgggtggcatcgcgcgggtgcgttaaaagcccccgcccccgctaattaatgctaatgctaatatttcctgcatttcatttaataatgatgcaattccatttcccttttagaggttgtcggcgcttttatttccgttgtgatgatttgggtgctgactggaattttaagtgctttcaattgacaatttggcctttccacgactttccggtcgctttagtgtatttggcgttggagcgaatgatcacttccgactacgacatccaagcggggattatggcgatcactgcagcgatcggagtcggcgcaacttgatgtgtgttttttgggtcgaaatgagaaaaatactcgacacgaatgtttcctatttgagcatgggcctcttactgtaccttggcggacattcgcacagccattcccaccatgggcatggcacacattcgcaacggcaaaccgaccgtacgaactttgcagagcacgagtggggtacggtagacggacggccgggccaaaacggtggcaatcgccagacgcacggcacgcggagacagacgaacatcaacgtcagggcagcatttgtccatgtgctcggtatttgttgagaaaggcaaataaacaaacttcgaattttgaggtgatctgatccaaagtgtcggggttttgttcgccggattgctaatttattggaaagtaatttcgaattttatttggggcaattaactaattaatggtcagccgaattggcacattctcgacccaatttgcacgttgcttttctccgcaattgttctcagcaccaccatttatatcatccgcgatgcgctcgttgtccttttggaaggtccgctttttatatcttcttttatttatttcaacttttttaggtcgtccgtcgaccatcgattttcgccatgtttttggtaatccaaattttttgcttacaattaacacttttaatgagtttcagacgcacttgagcacattgaaggggtaagttactaattgttccttcccctttgacagcaaaattaagcattcgatttttcctaagatttccgcttactcgtggacaaaaaaataataaaataatccacaaaggaagcaaatggataataaataacacaaataaagagaagaacaattaatagaatctcaaaatataaatattatatctatatttttaaaaaaaatgcaattttaagaaatatataaacttcgaatatgcaccaaatatccaataaaaaatttttggaaattataataattaattaacaaataattggttttcgcacttttttcggtcagaatagaccgatcctttcattaatcgttcaggtcaaaaaagtgcatgaccttcgaatttgggctctcactatggacaaaggttgtttttttgtgaaaaaagaaatttttaaattttaattaaattatttttcttatttttacataaataaatgtgaaaatgacttgaatcgtttctttggcagttgcaatttcggtccatttggaggtcgaatcggctgcggactcccaacaaattctgagggccaccactttgatgcttcgacgcgacttcaacgtgcacgagtcgaccattcaaattgagggctatcagcccgaaacggccaattgtggccaatgtgtggtgccgacaaagtgaaaaagggcaaaacggaagggaaaggagaagagagagaagcagttaaaccaagcataaaatgaagaaaaaacaactcgagtttttgttgactctttgaaaatgttgaataaattaaaggcactaattaattaattggcgagggaggtaatgatttatctattttctaccattaatattaaccattaattcactgttttctctacaaaaagtgatcgatcgttcgattagcttttccctctttttcgctcttcaactgttcgttttgctcagctcttcccgtccgtccgcttctcatttcctttcttttttatctccagagggattactctcgaattttgcgatgaaattttgaatattttcgccgacaatccttcgccgtttgcgtccttttccgaaaagttccgtgccaattgcttcatttcttcacatggttggcacatgcaattggccttcgacttcgttctgatcagtgccatgaggtcgattttgatctgctccttcactaccgtgttgaattccccaaattgtttggtttggctttttctg

SEQ ID NO: 16180 - DNA, 2062 bp, Heterodera glycines
  unsure (1)..(2062): unsure at all n locations
cctcatcttcacgcttagtgtcagctgtactcctactgttactgccactgctccactgctgatgcgtcacataacatttgtcgttgtcgccggtgttgttggcatttttcaaattcttaaaaatttaaattcatttattttccatttttatcagagaatttccaaattattatataaataaaatcatccatttttgaattaaacataaaacacataaatggcctaattctgatcaattgaccacaagaaaaacttaaggctcttaaaattaatcagataaattcaataggcaatgcgtttattaagatagaaatagtgccatccctcgatgacacaattagacatttatacaatgtaccaaacacattcccatattggtaaacattcaaattgttcatattgcaactcgagagtcaaaattttgatggactcgagaactgacaaggagcccgtgaattgaatctgagacaaaaaaaaaccgcttctttagaacgagaacctaaaacagccctataaaccattataccgtacaatcggtttacttccattatttttcaagactttttccttcccaaaatgtttgatgggcacaagcatttttgtacatcatcatcatcatcatcatcactcatcacccattttggtcatcattacttcacacaacacgagggaggaatgaactgattttgcgagcgcgacgacggcggtaacataaaaggggacggaaagacggacggatgtgagcactaatcagaagccgaagaagaagcgaacgagaaaaaatcgaagcggcgagagagtacacatacaaggaagtaaaggtcatcaaatcacatcacatcaaatcaaatcgtgccaatgttgagttgtgagatgattactcattcattccatttccgtcgtccacccgcccgaatttgcgggacgagtgaactttttgcgtgtacaaaacagcacagaaaaccaatgattagcaaataattcgcaccataaaaaaccaataaaaagttgccgttgaatgcaaaaaatttgcgaatttgtgaattggtggtgctatttatttgtttaattgatgatgatgacgacgacagcgataatgatggatgaacgagacgcgcattttttgatcacaaaatcagattcaaataatcaaatcagagagaaatggagcaaaatggtaattggaatgattttttatgagtaactaatcatattagaataaacgattgattaacagactgatcagagacaaaaatgcgtcgtgaattgccgaacaaaaaacccaagcgattagaaagcactactcattctgatcacttaccattgatatttggtatagcaacaataagaataccagaaggaaagaaatggaaaacaattaaataaattagatcaaattaaaatggcatttaaactgtttatcaaaaaaagcatttaaacaattaacgacttttgttttgggtaaacgaaccgaaatgatatgctcaatgtaagctttggtcgacgcctggacagaaatacgcaaagggtggaaaatggaatcgaaatgaattttggcggtttgttgttgtttggccttttgtcagggtgaatcaaaaataataatttaaataaaatgggagaagagagagtcgcgaaatttttttatattattactgattaaatctgaaaattgctaaaaaaattaatggcaaatttgggaaaacggaggcaaatggaataggaaaaaacatttatttgatcatgaaataatcacattgtgcaaaatataaatttaaaaaatcgtcgtgttttcaggatcattatcaaaaatagtgataaatttggttgcccgattanaaacagcacaccacacacagagagatagacgacggacccatcatgatatgcatagacaaacacagactctctgctttcgcttattaccccacgggttatgccgtcgtcgcccgctccgcataccgacgaagaggggggggggggggggggggggggagggaaaaaagaaaaagtattagggaaaaaagcaaaaaaaaaaagaggggggaaaaggggggggggg

SEQ ID NO: 16181 - DNA, 857 bp, Heterodera glycines
gtttataaacaccacagcatcatcaacatcatcatcatccgatcgtttttaataagttttgcaaaatgaaattaatgtcgcgcgttgtaaaaaaaaataaaaaagaatgcccgccggggatgaaacagttctcactcagttcatcataactacatgaaatgtaatctcaacagctagcctcaaggggtgattggagcgagtgagtgagtaataaataataaggaatgaatggggtggactgatcagtcagaagtgcagtggagtgactgagggggggggggggggggaatgagtggcggtcggtggtgagtgatctgactgaactgatctctctgctccgctactctgctggggaatgtgcgctgggggataaatgggggatgaatgtgtgaggggggcgaataaatacactttttcggataaaaaaaatgtcatcgatttgatcgctggctgctgctgcactgcttcaaaatgtgtgcttttcacacacaaagaacaaaagggcggagtaaaaatgggtgaagaggggagggggagggtgcaaatgaatgatcaatgggcgtctcgacgccttccgcccctcacggcgctctttgttcttcatttttctgaaggatggcagcagcattttttggcaaaatgtaaatggcgtgaaacaaaatggtagccaaaatatggaatggcactcaagtttcgaagcataagacatttcgtaatttgaatgagtaaaagagagagagacagagagagagagagagacacagagagagagcaagagagagagagagagcgagagagtgagagatagagggtgagagagagagagagagcagagagagaaagagagagagagagag

SEQ ID NO: 16182 - DNA, 1139 bp, Heterodera glycines
gcgggggtcagagtcacccggcctggggtgagccccaaaaacctgtcccgcccccgggggcggggtccaaaccctacttttttgtataaattcaaaattgattttttttttgttgtatttaattgttaagtaagcaaggacagcaggaaggaaagcattaaaatttggattccgatccatacttttgttaagtaaaaaatgacatgagctcatgcgattttgagttgtcttctgttggtgatcatgaaagtgacaccaaatttgtaatgtgatttcatccgatcgttgatttaatgtctacatatcattaaattttgaatttttttgtttaaatgcattttttgtcatttttttgggcctaaaaattgaatgtaatatctgttagcccactatttcaaaagatcaacaaactgtcgatggatgttaaaccaatttaaaatgaaaactgttgacaaatcacaatttgagaaacgaaatcctaaagaatgcacgcctttttcattctccgccggcgattgtttccatcgctttcgcgccaacgtaaattttgacatgtaaaagaggccacgctccagcggcggtgccaacagagtgtccaggtggacatccgtctccgacagcaattggtccgcctcgtcaagttggtcgttggacaactatggcagggggagagagttgagaacggcacttttaattgttggggttggaaaatgtggacaaaggcacatggaaacaaccaaatttaaatgggggaacgaattcaaccccaaacccccctcccctcgccgacggaccttcaaatcggccaattttctgctctcaatggcctcaagcgttgcagaagtgggcataacacaaaatataggaagaatttgtccgtccgagaaaaattataaaacaattagacacattgtgaaaaaagattgtgacaccaaaacaaatatgtcggggcaaaaaaacaattccgtcacacaattttattcagtaaaaaagtgtcgcacacacaaaaaaaagtgaaacatttcatgtttataaacacgtggttgaaaagctaagactttgatgtcttcacactgattatatttaaaaaagaaaaaaaaaaagaaacaattgtcgaactatttttatagaggcatttt

SEQ ID NO: 16183 - DNA, 1706 bp, Heterodera glycines
  unsure (1)..(1706): unsure at all n locations
gcattttacgggtccaatcaaaagtttgcgcgtccaatccaaaagtttatgtgtccaatcaattattagaaattatttaattatttaaaattattggcaataaatgcttaaaggtcaaaaatgaagactttgattaatacaacgaaaagatgattagacagggtattgaatacgtatttcttcgagaatttgctgaaaaattttttcgttagatgcgacgcagtgttttcaattgtgtggccaaattgttaataaaaaatcacaaaaaattttgatatcagaggttatcgaaaccaaaataagcacgcacaaattagtctctctattattaaattttataacaattgattgaatgcgtatatacctatcgatactttgataataagtgatcaatgacggatttaaattttattaaaaactagcggggaaagcgccttcggcgcatcccccgctaggtagtacgatgtattattgagctatgaataataaaaccgaaaatggctcggccgcttcgcggcctgggactcaattcttcggcattccaatcacttggaatcactcaatccacctgcattccaatcaccaacaataaatctcgccgattcttctgcataccaatcgctgggactcagttctacgacctttcaatcaccgttactcaatccatcagcactcgaaacacctggactcaatctcaccaattctacataggcaaaacattttaacattctactggcctttttgattcttgtcatttcttaaacaaccctcggcatttcaatcatcggaactctatctcaccaattctccggcattccagtcactgggaccaacccaccagcattccagtcactgggactcattctcctgcatttcaatcaccgggactcaaccctccagcatttcaatcactgggactcaatcctccggcatttcaatcactgggagtcaaatctacggcattccgaacactgggactcaattctccagcatttcaatcactgggactcaattctcctgcatttcaatcaacgggactcaaccctccagcatttcaatcactgggactcaattctccagcatttcgatcactgggactcaatcctccagcattccagtcactgggactcaattctcatgcatttcaatcactgggagttaaccctccagcattccagtcactgggactcaattctccggcatttcaatcactgggactcaatcctccagcattccagtcactgggactcaattctcatgcatttcaatcactgggagtcaaccctcatttcaatcactgggactcaatcctccagcattccagtcactgggactcaattctcatgcatttcaatcactgggagttaaccctccagcatttcaatcactgggactcaattctccagcattccagtcactggtactcaattctccagcattccagtcgccgggactcaattctccagcattccagtcgccgggactcaaccctccagcatttcaatcaccgggactcaacccaccagcattccagtcgccgggactcaaccctccagcatnttcatcactgggactctatcctccagcattccagtcactgggactcaattctccggcatttcaatcaccggcactcaattctccagcattccagtcgccgggactcaattctccagcattcagtcgccgggactcaacctccagca

SEQ ID NO: 16184 - DNA, 1174 bp, Heterodera glycines
  unsure (1)..(1174): unsure at all n locations
ttgaaaagcgaacctntaaaacagacgatcccaatgagtttttgaaaaacgacctttctgacccaaaacacctcaaaccctagagaagtgtcgttcaaactctgccatttttgctatttgtgcacttttttgcggaaaacagacgatcccaatgagttttttgaaaagcgaacccttcgacccaaaacacctcaaaccctagagaagtgtcgttcaaactctgccatttttgctattgtgcactcttttgccgaaaacagacgatcccaatgagttttttgaaaagcaaaccttctgacccaaaacacctcaaaccctagagaagtgtcgttcaaactctgccatttttgctattgtgcactcttttgccgaaaacagacgatcccaatgagttttttgaaaagcgaaccttctgacccaaaacacctcaaaccctagagaagtgtcgttcaaactctgccatttttgctattgtgcactcttttgccgaaaacagacgatcccaatgagttttttgaaaagcaaaccttctgacccaaaacacctcaaaccctagagaagtgtcgttcaaactctgccatttttgctattgtgcactcttttgccgaaaacagacgatcccaatgagttttttgaaaagcgaaccttctgacccaaaacacctcaaaccctagagaagtgtcgttcaaactctgccatttttgctattgtgcactcttttgccgaaaacagacgatcccaatgatttttttgaaaagcaaaccttctgacccaaaacacctcaaaccctagagaagtgtcgttcaaactctgccatttttgctattgtgcactcttttgccgaaaacagacgatcccaatgagttttttgaaaagcaaaccttctgacccaaaacacctcaaaccctagagaagtgtcgttcaaactctgccatttttgctattgtgcactcttttgccgaaaacagacgatcccaatgagttttttgaaaagcgaaccttctgacccaaaacacctcaaaccctagagaagtgtcgttcaaactctgccatttttgctattgtgcactcttttgccgaaaacagacgatccaaatgagttttttgaaaagcaaaccttctgactcaaacatctcaaaccctagagaagtgtctgtcaaactctgccattttt

SEQ ID NO: 16185 - DNA, 998 bp, Heterodera glycines
  unsure (1)..(998): unsure at all n locations
cgaaatcagagaaacagacgatcccaatgattttttgaaaagcgaacctcttctgactgatttttgaaaagcttctgacccaaaacacctcaaaccctagagaagtgtcgttcaaactctgccatttttgctattgtgcactcttttgccgaaaacagacgatcccaatgagttttttgaaaagcgaaccttctgacccaaaacacctcaaaccctagagaagtgtcgttcaaactctgccatttttgctattgtgcactcttttgccgaaaacagacgatcccaatgatttttttgaaaagcaaaccttctgacccaaaacacctcaaaccctagagaagtgtcgttcaaactctgccatttttgctattgtgcactcttttgccgaaaacagacgatcccaatgagttttttgaaaagcgaaccttctgacccaaaacacctcaaaccctagagaagtgtcgttcaaactctgccatttttgctattgtgcactcttttgccgaaaacagacgatcccaatgagttttttgaaaagcgaaccttctgacccaaaacacctcaaaccctagagaagtgtcgttcaaactctgccatttttgctattgtgcactcttttgccgaaaacagacgatcccaatgagttttttgaaaagcaaaccttctgactcaaaacacctcaaaccctagagaagtgtcgttcaaactctgccatttttgctattgtgcactcttttgccgaaaacagacgatcccaatgagttttttgaaaagcgaaccttctgacccaaaacacctcaaaccctagagaagtgtcgttcaaactctgccatttttgctattgtgcactcttttgccgaaaacagacgatcccaatgatttttttgaaaagcaaaccttctgacccaaaacacctcaaaccctagagaagtgtcgttcaaactctgccattnttgctattgtgcactctttttgcgaanacagacgatcccaatgag

SEQ ID NO: 16186 - DNA, 2819 bp, Heterodera glycines
  unsure (1)..(2819): unsure at all n locations
agcctttgcgtacaaacaaaaaggcatcgttctccctttctagggagcatccctcgganngancggncccgggcccggctcacgtgncaaaaaactttttcatctccttatttttcttcagttcctctttcacgtcacactcgtaaaacgaaaaattaaaaaatttctaaatttatatttacccaaacttctccgattgaaaagtttttacactgttcggtccacacaatgggtgctaagccaatgtttagtgtccaacaaatataaatatttattttgggtgcagacaatacaatttatttagaagaaaataaatgaagagaaattggggaagaacaataatgtcaattgcacaaaaagtgaactgaatagggaagagtgaacatgaatgagggaaagggtgaatttaaataacaaacgaacagaggggaagggaatatcgattgggtcaaagggcattgcgtgtggcgttatgttgaccacactcgaaagccgaagggcgctgcccctaacacctccccttttaagaagtgccgcttccgcttaatgagggctgtagcggtccggtggtcgtcgattccgtcgagggtatactcggggagtgatcggcctttcctcattcggctgttcctcctgttcgatccgtccatcattctgttcttcgactgcccggccgatttcatcctcatcggcttcacttcgaacggcttcgtcttgaggctgtacatcttccggttcggctcttacctgcggtggaaggccgaagacatcattgaaaatgttcaattggtccatcgttttgtcctcaatttgccgtgggcgtatttgattggcgtgaaaccgattggtcgtgccatccatgaatttaacgtcgtaaattacgccggtctttttgacgacgtttcctggacgccaattctgcgaaattcggtgacgggcgaagattttgtcgccttggccaaactctcttggtttggcgccaaatcttttgttgaaacgccgctccatcagttcatcacgctccattggctgaaactgcggcgggcgcaacaaatctaatatgtgaatccgttgccatggtttgctcgccttcggccatgaatgcagctccgctttgatggacgatttggccgcgagctggcaaggctcacaatttctgacgaaatcctcgatttccgcgtccagttttggccaatacacgtggttccgtgccagttgcttcatccgctttattcctggatggcctttgtggagcattcgtaggactttcgctcgaaattttggcgggatgacgactcgttctccgtacatcagacattcttttgtgatggagaggtcatcttttcgacgaaagaacaattttatttcttccgtttccgaagcaattgctttatcattgggtcatccatctttgacaaatttcttaacctttttgatggtttcgtcttcgttccctgctgaaattatgtccttcgatgagagtgacattgtttccaaagtgttgatgaagaaattttcggcttccttctcaaattccatggacgcgatgactcggtcttcttcaggactggtgctttttgcaatcagccttgagagcgcatccgcttgtccaaattctgtggtgttcacatactcaatctcgaagtcatacgccaacagcataagtgaccatcgtaaaagacggttagcactcatttggcggattccctttttgttgccgaaaatggcgaggagtggcttgtgatcagtttgaagaacaaattttcttccgtagatcattttgtgaaattttcgcactgcgaaaatcaaagccaatccctctttttcaatttgggaataatttctttcagcgggtgtcaaagatgatgaggcgtgttcgatggccttaattgctccgtttggaaatcggtgggaaatgactgcgccaattccatgttctgaggcgtcagcggccacgatgatttccaattttgggtcatagtgcgtcaggagcaaatccgaggacaaaatttccttgattttaatgaatgctccttggcattctttgccccagtcccagtctttgtccttcttcagtagttcatccattggttatcggatgaatcgcatttcttcacaaattgttggtaatggtttaccattccaaggaacgtgcgaagtgacgggacgtcttttggtgctggcatattcgttattgccgcgattttgccttggtcgggtcgtcttccatcttagtcgatgatttggccaagatacttgatttgttcttggaaaaacgaacatttgtccattttgacccgaaatccccagctttggattcgttcgaacactttccagattttgaaagtgctcttctttcgatttgctgacaattatgatgtcatcaaggtacgccgtcgcaaactcgagtccggccaggagcttatccataacggattgaaaaattcctggtgccgtcttcacaccgaatggcaatctgttgaatttgtagtagccacggtgggttgcgaccgtgcatagctttttcgcttcagcagtcagctcaatttgcaggtaggcatcttttaagtccacctgagagaagacttttccaccattcaacgtcgcaaaaatgtcatttggcaacggaagtgggtgctgatggtccaatagagcgttgttgaggcccgtcgagtagtcgatgcacatacgggctgttccgtcggcattcttcacgattagaatcggtgccgcccaatccaagtgctcaccttttgtgatgattcctaggctctccccccaaacgagctctttctcgacaacttaccgtgagtgtgagg

SEQ ID NO: 16187 - DNA, 2051 bp, Heterodera glycines
ctgcacttatatttgaagaaaggctcaatctctttttactactttatttttttgatttggatttatttatttcgtttttttatagttttagagaattttagttatggttctaattagtctttaccgttggcagggccctcgttttttattattatttttttcagatggatccaaaaaatgtttagacaattgactatttttaagttaaaattgactaaaaaaatatcccttttttagcaatgttaaaatttggaaaagtacagtggaaaagaaattttggggtaaagatcaaaaaaatacttcggattctcctctgattttttcagcttaagcgattttttctcgccatacacgtcctcgtatttcatcattctccatgaattctgtatgatcagtagaaattgagtttgatctgacccctgagttagcaaatttagttaaaattttcattgtaaaatattaatatcaacgtaaaataaaacattaaaaaatacttttaatcaataatttttaataattattttttatattatttataaaaacttttaattattgttttattgtttttttaaagtcaatcagaatgttaactttttttaggataaaaccatttttttggggaaagtttatatatgtgaggaaatgaaagaaatattaatctttatatatatatctcaatcaggccgaaaatttagtcatatatgaataaaatcattttcaaattaaattttaaggttaaacacattcattttaaaaagattcggttgaaattctttactcattctggtttaccaccctttttccagaaattcataaccaatatgaaattatgtaaaaaaatttccctgattttattgatggttttaaaaaaaaagaagaaatatataaattccaacaaataaaattattttcttatattagttataattaaagacagatttttggtgttaaaagtagtgaaaatgtactaaaatatgtgataaaaaagtacaaaatatgaactaaccccgtttttaaggtgttaaaaaattcgctcaaattagagaaaatgtgttttcgttgttctctcgtcaaatactatccgtaaaaatatgttaaaaactaaaaaatcaggactctaattttaatgaggttaaaaccgtaagctaaattgtagtgaaaaaaagtttatgtgcatttttttgcgctaattcaaaaatacactgataattgtcttttttgcacaatttattttattcctaacctgaccgaataaatttagtatataaaaaggttttgaaatggagaattttttctcttcaaaaaaagtaagcaatttaactcatatgaaaaatattatgaaaattttaaaatttaagttataattcacctcctaaactgctgattccaaccaaaatgctaaaactaatcattttatattgattctaaatgtctaaactgattagtacctttatagacttataacaaaattataagaattagctaatttgatgttttttagtatattaaagatgtgtaaatagtacgacaaaaccagagaaaaaaaggtcattaataacagacttatacttttatttaatgttttaaaataattttagttatataaaaggtttttagtaaaatcgttttgcaccagtgatttctaaaccttaaatttagtaaaacatttttgcatcaaaaaacattatttgatagaaataaataatttaataaattttaattaaaaatcataaaaccaaacctaaaataatttgttattaatattcatttttattatttgttcacaaagttagtgatttaagatctacaactcaaaaatttttttcagaggtaaaatttaatttatgatcagtgataggcaattcccaataactttgaatttttttgagaatgaaagtaaaaatatatttttaaaattaaactttaaaataaatcaattgaaattatttaattttctcttttgatgtacaagaacgtgttggttttttcaaaatttcgaaaataagtttaaagggaggttgacaaaattttattatctatgtacagaaaat

SEQ ID NO: 16188 - DNA, 1520 bp, Heterodera glycines
  unsure (1)..(1520): unsure at all n locations
ttttaatgactaccaaactcgtccaatcacaaaatcagacgtcaccgattaccaattccctattctgctctaccaccatgacaaacattttgatggcatcaaaactttgtcaaaattttggaacaaacgttactattgcctctcctgtgaatcagcattcagcaataaaccacaacattcaatgaactgcacatcactctgtcacggctgccgagaggtgggcgtcgactacccctgcgaagcccaacaaggatacttcaaaaaatgtttgcattgtaacaacaccttctacaacaaagactgctatgaacgccacctacacaaggatttatgcactaaatttcaacgatgcgaagagtgtggggtagtttacaacataaaagttcatgggagtgttgggcataaatgcggagaaaaattttgtcgtctgtgtaaacagtttcacatcaaagaaaacgaccaaatgaatgcttgcatgagctgtttcattcaacctatgaagcaacaacgaattaagccgtatagaatcatagcatacgactttgaggcgacacaggacaagaaggtggagaaccgtttcgaacacgaggtaaactttgcagcggctaccatcatctgcaccgactgcattatcaacggcgactggaacaaatcacttcagggaaaaaactgccaaatttgcggtcctcaccgctcaattaccttttcaccatttgactacacggagacaacagttgaccaaaaaatcgtcacgcaagaaccgctacgcaaattcgttgaatggctcctttttgaccacaacaaaaagtttccaacagttgcctttgcacactttggtggccgttatgacataacgttatttatcatggaaattattaaccaaggtaatgaattcaattttaaacatttttaaatatttcttaaggaatacacacaccacaaataatcaaacaaggaaatcgtatctatgagctcaaaatcaacgacaatggacactgccccctcacaatcctacgcgacagctacaatctaatgcccatcaaattatcaggactcatcaaatcgtttgggcttaaaattcaagtgaaaaaataatactaatagtaaatacaatttaatttaaaataatttttctgttttccaaaaaaatttttttgactattcttgttttttattgtcgatttttctgggagtaatctacaattttatgtgatcttattagtttttttaaaagatttattaattcttaggactaaaaaaaacatataagaattagagaaaacatgtaatttgtgagagaaaaaattaacactatttctaaaataaatatttatcaaaataattaagctcttttttgtaaaatcaaacaaataattttcttaaggataaacagtacttccctcatttatttaacaaatcatcaaactacgataaggtcctccagcaccttcctccacgtgaagactactggtctanccanaagaagaaggccgatctgcagaaatttgacgactggtaca

SEQ ID NO: 16189 - DNA, 1320 bp, Heterodera glycines
acgccgggaattcaaacaaaatacacaacggaatggtaaacatggaggaatcgacattctttgcaaagcaatgaccatagccagcgcctgtgtcaaaaattatgcactcaaccatttgaaaccgaactctcttgccatcgtcccggaaaaaggttacactcctcaacaaaaccaaagtgcactgtccatcaaatttcttgactggtactcgcacatcaataacgtcaacattcaaactgcacactcccgttacggtgaatatgtgtttaagcgtgaagggcaggtataccaagtggacggctacatcaaaggcacaaatgggaagcgggacaaaataatagaagtgaatgggtgtctgtggcacggctgcgaggagtgtttttgtaatattgacgaagaaacaaaaatgccaaacggaaagacgctgcgggagattagggaaagggaagagaagaaacatgaaatattaagcaggtacgtcgacttggaggttgtttgggagcacgagatcaaccagaagctgaagaagaacaagcagatgagggagttttttgataactggagggaccgctcgccaatcaaaatcagagacgcatttcatggaggacggactggaccgatgaagctactccacacagctaagcctggccaaaaaatcagctacaaggacttcacaagtctctacccgtggaccaactttacgacggactacccacttggtcacccaaaaatcatcagtgttccaccaaatgagcagacggttaactggcgcaccccaacagacaacccctacaaaggtctactcaaagtgctgcttctacctccaaacaacaacatcagcgtcaatgttatgcctgtaaaaataaatgatcgccttctttttccaacttgtgaaaaatgcgccaaatattttactaaaaaacaccctaacggcctcaaagacaacgactattcctgtccccacttcaaccctaacgaccgcgccttcgtgtccacttgcacccatcttgagttaaacgcagcattggaggccggctacacagtccgcaaagtcttccacgtcctccaatacgaccaatggagcgacaacgttttcaagtcgtacgtaagcgaaatgatggccctaaaaatccacgccaccggcttcccgtcatggtgtggcagtgagagggaaaaggacaaatacattgaggagtgttggcgaaaatttggaattcatctggagaaggaaaagatgaaaccagagcccgggaagcgctacatcgccaaactctgcctcaactcgctttggggccgcttctccatgaggaatctcctttc

SEQ ID NO: 16190 - DNA, 3282 bp, Heterodera glycines
  unsure (1)..(3282): unsure at all n locations
tgcaggtctnnttcgacaaacatttgagaaaaaagtgacaaaaggccacctctaagcaaacgaatgaattgggggggggggagagggcaaccttcattcattcgttaagggatagaatgccaaaatcatgcccaaaaatatacacactaaaaccgttgaattatctaattagtcggattgcttttcgtgactttaaattcaaatttgcacaaaagtaatgctaacttgtcatttatcaagctccttaaaatgcttaaaaaatggcattatttggctttcaaatcctttttgttaatattttcgatgtcaactcctcgtttaaaatcattttgttttttcttataaaatgcatttcaatattttaattaaaacaatttaaacatcatataaaaaatgcttaattattaatgaaatgatgttgctcattatttttctgtcatattcattgattttttagctccgttaatttggtaatggagttggcacatcatttctgaaaaataagaaaaatattatataattttaattaaaaacaaaatgccttggaaaggaagaaggagttagtgggatttcaatgttgatgaagctttttcttctctgctggtccaccactgtgtttgtgcttctatccgaatgcaaataattcctcacaaaaaaatcttttattttcagcttgggtccctgaaaagttaaattttaaacaaattattttaaactcggattttggcattccattcattttttgcattttaaatttcaattaatcatttttactgattcaccaaagtccggcgattgtccgcagcagcgggtgccctttggccccaactttgtgccaattgcatatggtaaatttgcgcattgttcgacactaccaaattttgtcctaatgcgtttctgatttgtattccgtggcgctcatttgctaccgtaatgttcgggtgtactgtggccactgaactcggagagccgaaaacaaatttcctgcagaacaaaattgatacagtaaaatagccaaaaaagtctgtttcaattcagacaaaataaattcggaaatcaaaaaaaattagaaaataaataaaatttgtttagaatttttggaaaaaaaatttttttgaaaacacacttttagagctatttttaaaatataaatgtgactttttatttttacagcattttaagattttcaaaaataacgaggctgttttaatgacgacgcacataaactgttttctgataagtcgctgtgcgtaaaaatcagcggcacaatgaacagcagagagtagagcgctaccgtaatgtcataggcatggttacagtacaaatggacgtagtaaagacactcgggaaccacgattttcaagattacgatcagcaaagtcatggtgataaaattgcgaagggtggtcagtgcggccagaaaaaggaaggtacgcagcacgcggattttgacagtgatctgaagcggaaggaataatccaaaacaaatataccgtatttcctgattaatagacccccttcaattgtaagaactcgtactggtatccccggcatggaaacaacacttttattattatttgatcgaattaaattttcgtttcgtccatagtttggcaatttattggctttcgaacattttcatttttttaattcatacaattattttgcccattcgttcattttgctataaatgttcttgaattgcttttcatcttttccttattttaattatttctttatataatatgaaatatttaaaaatgctcaaaatttgctattattttgatatatttggctttaattttccaattttacttgatatctttcatccaaactgatcgcacgcatcgttttgtattttttgcgattgtaaaagtacagtcgcaagaataccttaaatataaaacatatttattatacagtatacaatccaataattacaattttaaattatgcctttttctaaacaaaatttcatattcggaaagacactcctttcctcgaaaattttttcaagtgatataattttttactctgtctatttaaagggaaaaaaacattttttcttgattaaaaattgctctaaaatttgggataaaaattaccatccaactgataatgttaatcacttccagcacagcaaattggggcactgtttcaataatgcctgtggaacattttgtaaatcgttttaaataatatataattacttaccattttgttccaaccaatatataacaattgtagtagaccactaaattaccaaaaattaaacagtcaatatggtaattagtaagaaattgaccggccaaaaggtgttaattgcgctgagtgtaattgtggtcgatttcgttgggtttggccaaattgaatagacgaaaaattccattgtgatggccagagtgatcaaagtattgctaaaataacagaattaaattacacaattaagcaatgctttcacgcacacgtttatgctgacatcgtggaaaatttggacgggcgccacaaaagcggcgctgtaaagcgaattgatggaaatgtactgggggatgagcacgaaaagcctaaatatttcaaaacttaatttaaattcaaattcaaatgtccgaccgcgtggcggcgatgccaaaggcggcgaaaagcatgttgaggaaaagcactttcatagtgccggtgaacgaagtgatggcggagaccattttggcaaacggtgccgaggcgccgatcacgcaaacgttgacgaacatttcgaatatgcaaaggccgagccgagtcgagtccatttcgtacgcgtcgctgcaatttttggccgtgtgttccatcggttggattatgttgcccattttggacacacaaaatgatcacagttttggcaaaaatcttttattttggaaattgatacaattactttttaggttaattaaatctgatgaatcttaaattattaaacaaattaattttaattttttttaataaattttcttgaaatttaaaatgtgtcaaacggccaattgggtaaattctctgagaattatcaagtaattggcctttttaaagctaaaagttagatgcatagcacgaaacgcatttgtttctagtgaactttttttctgattttgcactaattacgatcgatttagcggaggcatatggtaacaattgcgtgttttgcctacaaaatatacacaattgcgcgtgcaattagcgngcttcacccgttggttgctttcagttcaattaataaaaataggtgttacgtcaaattgtcaaggaaaagcgggg

SEQ ID NO: 16191 - DNA, 1482 bp, Heterodera glycines
aattgttttaaaagttcttggggatgttttttattttcctaaaatgacacccccaatgtccgggatttataaaattttattttcctaggaatattgggcatttggtcattttattgtttaattttggactttttattggaattccaatatatttataaatagggatgccatattcatatgaatccatggtcagcaatagggctggaagtttaagtcagaggactttttttgtggactttaaatggcttaaaaagtgtttgtaatacacttggttggaagctgctaacatgcatttttttagactttttttctacttttgggataggttatcttttgcacttttatgacaatggttttattatgaaaattggaaatgtaccttttagcaattgtattgaaaattaattgtttttataaaatattcttctaaaattattaaaaatggatattcttttttaactttggctaatttttcaagactatttttgaattttttcgtgactttttggcgattgtttatgactaaggctaatattttaagggttttacggttttacctatttttcctgagcttcccgtggcctgaaacgcacgaaaaacaagttttttgggggtttgttaagctacttttcgagttattagagcctattttctaggtttttatttttaaaacctaaaaagcctaaaattaaaaaaaaaaattattttcacctattctgccgttttgcccaaaattataaagaaaaatgcaaaaaaacgaaaatacatccctaataaattaaaaattttctcaaaaattcatcttttaaattatttatttattttattgacaagaatttttattttaagtattatttaactcaatactgatttggattaattttgtttcttttttgaataaaatctcattttacaccccttaaatttgaggtttttagtgcctattttggcagtttttagagcctaaaaatataagccctacttatgactttttgtagtcaactttttggagatttttcttacttaaatgcccagccctaatgatcagtgtgactcattgtcactgagtccgaaataataataaaatgaaaaagggggcggcggggaaaagacgaaaagttcgaggcgttggctcgaactcctcgaaaaaattgtgaatgattgcagttaatcctcgcgatggaaaaagaaaaatggcatagagaaattatgaaaaaggtgggatttagttgggatcaatgggatgacgggacattagtattattattttgagagatgacggatgatgacggacgacggctggaaaagcccatcagtgatcagaaaaagcggagaatggccggggatggggaaggggcagtcccccgaaaagccattggctaatgccatcgccctttggccaagaattgttggtaatgagagagcgagagagagagagagcgatcgcgtgagccagtggaaagacaagagagggggagagag

SEQ ID NO: 16192 - DNA, 1755 bp, Heterodera glycines
tttataaacacagctcccataaagtgccatcactttttttgtttccaaatggttaaaggcgctgaaaagttgttggaattggtcggcccggtcggtcggtgtccatccaaccgacccatccgtccccgttaaattgacaccccggggcatgcaaaagcggcacaactgacaaatcccctgtggcatttgcccccggcgggcgtcaaaaacattcggcgccgccaaaagtggacggacaagcacacaaaaagctcatccattttttgtttgaaaccggtcagaagaagcgatattaacacagctaaacacagccgagaaaagaggggggaaagtgtaataagagtaatttaaaaatggaaagctacatttaaattggatttcaggactaggaaaagtggataaccgaaagggataccggagataacaaaaactaatttttgatcgaaaaaccggcaaatccggcctaattgaaagctgaaaaccacgtcctaaaacaaaagagttaagtaaaaatgtcaaattgagaaaaatgccaaaaacattgaaagaaggcggaaagtcggaaaagaataattattaatggattttcattgaaaaagtcacgagcagcagaaaatggcggcactatcaaaagttggggaggaaagaaaatgaatggcaatgaataaaaaaggagggggaatagggaaaatggggaaagaaaagcaaaatggaaaaaagaaaaacaatgcaattttaatgtgaattaaagcattaaacagctagttgaatttaagaccatttaaattttattttcattttcatgccatttttctaaataattccaagagaattttaattaattttaatccggaaattcgaattgcgacactttcgccttttgctgaagaattcattttgtgcacattaatttcctgctgagcgccataaaatgaggaaattgaaatttgaggagagaaagtgaaaaaggcaccgaaaaggaatttaaaaaataatttaatttataaaaaaaacttattatataatagattaaaatgatttgtatattgacaaagctaaaaatatttttacaaagtaaagaaaatgccattatccaatggattggctattttaaatgtgcgcaagcaatgccaatggtaagaaaagggcactaaataaaagcatatattttgtgccagaaaaacgaaagcgaatgaatggggcgttgtgccaatgtgtcgcggtcgcttcccccccccccctcccccaccgctcatcatttgttttggctcggtatttccgcttcacgaattttaaaggtgcaagtgcaaattgtggaaaaaatgaccaagggatggcctttttaaaagcaatttaaataattattgattgaaataaatatcattttatgttttttctggtataatggcactgaatgccaacgattttaaacccaaaaaaacgaattaacgatatgaaataacaattgttatacaaaaaacaatttcgatggaaaagacataaaaactgataaataaattctgtaaaaaaaataataattaaaaattttctttcattactttaagttttggcccttaaaatggtcaatggatgtctgctatatccgctaagattttgttaatatttcctttttgaatggttaagcataattcagaagcataattctgcttttttaaatccgtaaaaaaatctcaattatgacagaaattatttctcactccaacattaatacataataataataaattacataat

SEQ ID NO: 16193 - DNA, 1808 bp, Heterodera glycines
  unsure (1)..(1808): unsure at all n locations
atttaacataattagtaggaagttttaagatgccttttgtgaagctgtccaccctccgccccatcttcaaccaccctcattatgaaagtgaagaagtccggtactgtcactgtttttaacaaaaaccaacagtttgcttcaggaatagaactttgctggtttattcgctttacagtaggaaatccctcaccgaagtaatgtaaaaaattatcgtgcaaaattccacttttatttctttgaaggtgtaccattcgctgcgttcttcgaacattcatttttacgtgtttcagccgcaacaatgcatagagaaacacccaaagtgagttcataaatttgcttatgcatttttacccgtttgaatacggtagaaacggatgttcgtatttggaaatgtgggatgagcatgacgcgtccaacaaaggtcgaccatcattatgccatcacatttggaaggcgggaaagaatggtcaacaaatggcaccgtttcggcctgtctattggtcgtcaacttacgttgtgttggctctgtgattcgccagtgtttccgagggtggacgaacattttgactcaattttcatttgcctttttttaccatttactgcgtgtgagaccattactttaattttattctataattctcatttttaattataacaataaattttgattaaaactattcccaagttctaacaaatatccaaatttattttgaccgcctttatttttggtccttctctacgcaatttcagttttgctccgccctcctccccccccccccccactttctctccttaaatctctcaacattcgctcccttgtcagcgctcttcttcaaattcactcaactcaaaacccaatcgtcctccttttccctttcctttgctttattcccctaaattttttctttgctttttccgattccaccgatgtctctcttctgttcgtcctttttgcttatgctgctcattacacaaatttgcggtaattatccttttttattcctcccatatgtccatagaaattcctccaatggataaaaacggacggagagagaaaaaatggggtggggataaaatttggattattcagctgataatactatatttactattgttttcaaccgtttattttattccaccgaatccttttttaatcgtcgtccaattcctccgcccctaagaccacttgagtttaatctgccggatgagatgaccaaattgggcacggcataagaataaacttttggcaaaagcagcccaccgacgatggcaattccaactgcgaattggacggaaacccccgggggatttgggcattttcgccatttatgcaaataatccaatttctgcaaaataaacacagcaggcgaaggaggaagaaaaaacaataaaagttgagggggattaataacaagaaataaataaatggaaatcaaaatcgactaaaatgtcataaattggcgggagggaattgataggacctggacgcgttggacgtccgaccggcttttaccgagcccgttaaatgaaaataccgggcccagtcgattgtcaaagaccggtggtttcgaaattccagtctttattattaattacctttttttattttgattgatggcaaataaaagagaaagattcattgtacaatatttgcgaccaaaataactgtaagtagtcaaaagaaacgcactttgcttcgttcactaacaaaaaaaaaaagttaatccaaatccaatcggacggagacgaaagagcagagaaaggaggaaaatgggggaaaatgagggcgggggggngggaggaggggt

SEQ ID NO: 16194 - DNA, 1196 bp, Heterodera glycines
  unsure (1)..(1196): unsure at all n locations
ttatgcaaaatttctcaaaaacaaagaatcactatatgatattgaacaattttgagaaagaaanaacaaaatggtatgaaatacgttctgctanaatggaaaggatacagtattaaattcaatagctgggttccatgnagttctatctccgagaaaaatatataaaaactttattgcgctttatctttntaaaaaaatgccatccaattctttttacattgttcttccttcaaatacaaatgttgaaggtaacaagacaaattcattccgggttcgtttaccacgaaaactacaattcaactccgaatgggaagttggcctcgctgttattgtatatcctcatacttggccttcgattggtactgttgaacagcaatttgtagaagttgaatggcaaacaggaaatacggtgcgtatagaagtacccccatcgaatgtcacaaatccaatagactcgtgtatattggtctataggctagcgggggcacgcagtgatcccatagctaaaaaactgtaatcggaagggactttctctttctctcccattttccctcccgccccctccctccctctctctcccctgtcactctctctcctctctctctcctctgtcactctctctctctctctttttctctctctaactgttacagttacagtatgccgttttaaggttgcatggactcggcttcgtgacgatgctttgctcgcggtcggcaccagcacttttaccttggacccgcgttttcaggcatttattttgcgtttgagaaggcttgcttatccgttgttaaggtgtccaaaccacggcggaagaatgaatcggattgggtgttaattcttcggagaccctcgtgacttttaggggggaatttggagaataatgacgataattaaggcccactgatcagggctgttatctttgtggtaagaaaatggcaatgattggactaatccctcgccaatgtaaagaaatgaatacggagccaacgagctcaattgttccggtgtatctgaaggtgagcatagacagaaatgaagtgaggcgagaggaaagcgaagaaacggcggacgaaatgcgaagtgagtaaattaacagtcattaaaagtaataaaaaatgaattatccgcaaaaggggtgagggaataatgagaatacggaagggaaaatgatcggcgggtaaaagtcggataat

SEQ ID NO: 16195 - DNA, 2945 bp, Heterodera glycines
  unsure (1)..(2945): unsure at all n locations
ttggattttgacccacaaaaattaaaaatttttcttaaaaatacatatttataaaattntaacgaaaatattgattaaatttaaattttcttaaaaattgtttaattattttaatagcatatttagcgatttagaaagttttattttgcgttaagcgaatttgaagaaaattttgaaaaattataccctcaatttggaaaaatttatgtcagactttttgcaactatgtgtccatatttcgagattttcgtatgtccatatttcgcgatttttatccatataattccgaaccctagacatcagaatccaaaatttttaatatagaaatgagttttttttgagctcctttcttcaaaaatttataattattaaaaattgtgaactgtttagcctacaatgatttcagccgcttttaccgcagcgactaagtcagagaatgctccgttccgattcaggttgttgaagatgagagtttcggcgattgttgacccttaaaggtttctatacaaaaacaaaaagattgatttaaaattaccaagaaaatatttcatgtaagccgttaattcatttttggtgtacagcttgcgataattgatccgcgtttcaccttgcgaaccctcggctggttcgatggtcatctgagttaaacaaaaacaatttaaaaattaaattttcttacaatgacaattttggtacaatgacgatctaaccaacacgcgacagcatggccagtctcatggaaactaggccgttgttcttccacagcaatggagttccattgcatcattgctgacacgaactttaaaatatttaataaaattaactgggtagagggaaaacttgtcaactatcgtattttttggtttaataataaatttttttaagcaattttttacagctgggagtttatggttgtgattttccatagttttgccagattggcaagaccagcttcggcaagtgagttaagtattagtatcgcttttattttttcaactcccacacccaaaagaagagcttaatttagtggtattgacctaacatagatggactttattttcaactctgtttttcaaattcgaaatgctctttttggaaaatttttgcaaaatttttaactgcttttgagcgattttgcaacacacggcggtttttgggggtcctgatcacgacatcttgttagcattttctacctcatacaatttattgtatttatttttcaggaaattttatttgtgtaccacgccaaagatttgtagggcccgatgcacttaccaaccatgtggattttttaataaactgaaaattaagaaagaaactaattcattactttttcagattttgtgacatttttttaatggtttataggatatattttggggggtttttcgcacatttaaatgcataattggcgttttttgtaattaaaaataaaaatcctagccctcgttaaagtagaaccctttttattctcaagcattcaaacaacagcatgcgattactcttattcttccaaataaaatttttaattcttgtttttgtgaaatttatggaccgaaattgtcatggaccagaaatgccgggacctggccgaaattttcaattcggaaagaaaatagcgaaaagtaggcaaaaatatttcaaaaattaattttaattattttttaatgtaaatataaaaatctttttaaaatataaaaaaaatcaaaaaatgcgttcttttaaaattttgcttaaaattattctcaattgtttttaatttgaaatagctaataaactaaagcgtatttgtatgcctttcctttttcgacaaggcgcttaaagcggcagctgctgatggtctacttacgggtgagtttcgtgcattcacatggcgaaacttggcaaggctgtcattaccataatggcacccttcgaatacagcacgatgatattcagtggctgatgctgtagaccagtagaaaaatagaactgccaaaacaataatgaatttatgaaccattttaactctgtcaaaaatgtaaaattaaaagactcaaatcacggttgaatactgttttctttctcggtctcgggttttttggctcggaagccgagaaatttttatgctattaagatggcctcatcaattaatttacgtaagacaatgtgcgagtcgcagccgggtgggatgcccagtcaaacagggagaaggacgaagacccaatcttggatccactaaatggggattagtaataggggcggggattcccgtacatagattgtaaactggcgaataatgatcttcctggataaagggcattcaaaatacaaaaatattttattaatattttccatttttctgcttacataaatacatttttcgcttctcgattcgatgaaaaaacatttagaatgattttatttcctttaacgggattgatatgccgatgatattgacggccaaagcagctcccccccctcgtcccttctccgagtgtttttccgcttcactatagcattgggtggtccttcgtcccgtcctagcgctctttctttgtttttctccatgtactttatttttcgtagccatggacaactaattttatttcgcggagcggaatgggtggtcctttctgcccccccccactcccgaatgctttctcttctcaatttacgtccacgtcagggatgggccaaattgaaaaataaaaagcgaaatgcgaaaagcgaaatttgcgaaactgaaaaatgcgaaatgaaaaaaaaagcgaaatgcgaaaagccaaaatatgcgaaaatgcgaaaagcgaaatgcgaaaagcgaaattttttctacaactttttaatagttaaaatcataaagcaaaaatcattatttaaaattttattccaaatttaaaaatcaataaaacgcttttttgaggcgcgctttttcactagaatttagtagggcgaaagctgat

SEQ ID NO: 16196 - DNA, 1990 bp, Heterodera glycines
attatttcatgactatcatcttgaaaatttggaattctcttccatagttttaaaaattcgataataaactaatacgtaactattaaataaaaatataaaaaataataattttctatatattttagaaaccccaaaaaaggaaaagcaccgtttttatgcccgattatataataaatttttgttacaaaataatcccattggaaaatggaggacaaaaattacattggacaaatatttgtacagcgaatgggcagaaaattattttaacaatgaactcaaaaaatcagatgaagctggtaagaaaaaccgaaaaaaaatttattatttttaaaatggcgaaaaataataaataaataaaaatatatttaaaaaagaaaataaataatttgtcacgaaataattaaagaccaaacaaacaaagtgagaaaaaggcaaattattgatgagctgaattcgatttggaaatgctttgaaaaatacttttggcttaatgaacgaaaaattcgtgaaaattttgaccaatttatgcgaaaaaatcgaggaaaattttccaaaatgaaagagccaattcaaatttgtatagaattcagtgaaatagagtcggtaagaatgcttaaaccattaaaaaatttcaacaaaatgccagaaatgtaaattattttatagtcacaaaaacataatcctgtctttagatttattaaaagcagggcggtcaagtttttattttcaaaataaggacagatgaggctaaaactaagattcggaccccaaaaataagattttttctaaaactgatagtagcgcgaaggaaacgcaataaaaagcatgaaaaaacgacttaaaacaacattttattagcgcaaaaacaattgaaagtgattatcaaaagtatttttcccatccgccgattttctccaacaatttgtgattggaaattagcatttggtacatttgtgggcaagaaagatcaaaattggctttcgtttggaccaacgccttgactgtttcgacttgcaacaaattccgcgtgtcagtccattgtgagccacaaagagaaaacactctctcgacaaatgcattagagaccggaatggaaagaacaatgctgaccagcttgagcagatgcggcaaatttgcttcaaatagcttattccacttctgttcgggggttaatttttgaaattcatcatttggaaaagaattcagtatttggttggcttcgctaacatcgtcaaacaaatcatttgttaactcgggcgcaatttgtcgagccagagccaatgcatcgtcgtggggaattttgcgggatgccagcgcaacccattgcaacttttccggaaatcggtcaatgcgatgccatttgtccaaatatgccaaaaccgaggtgtaaaaagactggaaaaattggaaatttaataaaaaaccgattaatttttacttgaaattgttcctccaacgcttcgcgtgtgcactccccgactttttccattgccaaatcggcaccataaaaccgttcttgttttcgtcgctcaattttcgctctaaatttgtccatttccagcaaaagttcgggcaaaatggctttttctttctaaatttatgaacagaattttcatttaaaattagtaaaacaacctgaaaaaagtcaattgtcttgttaaataggcctagcacgtggtgtaaaaaatgaatgatcgcaaatgattgttcagaaaaaacgaaaaaaaagtcgtaaagaagtgccggacatttgtcaggttttgaaaagtaggcgattaagacagattccatccgaataattttgcccaacacgctgttcattgatgtccatcttgtcggcccatgtcgattcaagcgttcaaattcaacctaaattaacagcttagaatttttcattacttaattccgcacctccaattcctcacaaaatcctttcagctcctcaattcatttggttgaatttttaaaatgtccggccatttaaaaatca

SEQ ID NO: 16197 - DNA, 1793 bp, Heterodera glycines
gcatagcatcactcagggcacttttcagtggatggacggaaggcgcgaattggtcagggtcattcattagcacagtcacacaaaaggcgggatgctttttttgtctgtctcggttagcagtctctaatgctgctaatatcctttgcccatgcccttagcatttatttttttgatctttccgctatggcaaattggaaaaaaaaactagaaattttggcaaatttggacccgttggttttcatgtgagtgccggcactgttaatttcatgatcaattgctactccgcatttcgattttgaactgatcactttcccaaaatttggtcatgataagtgttattcaagaaaacaaagtcagttttgcaatttcaccaattgtttatcagattatttggagatttgaatttcgaccagtgctgggatttcaaaaatgatagactcactgatttgtcggattgatttcactgattggttattcattgaccatattgattataaatattctttcattatttttcgatgtcttacatttctttggcactgatccactgatcaatgccctcctccaggatggttagggttgccaagcccgatatccctacaagcaattcaaattttgagagccgctgtcttttttttggctttttaactcattaaaaatttttacatttcaaaaaatgaattttccgcgtctttcttgcgcaaaccgcgtgctgcttctggtggccgtgacgatggcggccgtggtcaacgcgtgcacgccgaccgcgagcggaagcgatgaattcaccctgggcagcgaaacatcgccgcccgtcaagttggaggggggcaaaggtgcggtaaaaaaacgaccggattcaggaatgttgggatcagaccaattctcgatcacgagactcgagttttaatggtagttttatcacttttttaaaaccaaaattggggcccatttgtttgacaaaatatatttttttgttgatttattgttcttggcagtttcggattcgcttatcacgaatgttcgacaaatgccgaacctgctgaatttgaacaaaggatcggaaaataatttcttgaattttcaacttttatttcgaattcgtcttagggattggaaattgatcaaaatgattgccatattcaggatcatcagcaacatctaaaatccttccgaaacatattttcataacttttgaatattaaaaattaaatcaaatttttgacataaaagggagtataagctccattagtgccgactttgccaatcattatgagaccatttgtccctttttcaaagcagtgattgcttccggcgttctggcggactgtactcaatgtcaggtcaaaatgaaaaaaaaattatttaataaaaaatttatcgcttccggcattagtttaaatttttgaaattgaatgcccatcagtcaccactgcttcctctcccatccctttttaagcatccacttcccgtccgtcggctcgtaatcaattcacgggcgatcactcagacggcaaatgccggcggcggtgttggcacattgccaaacggtggcagtcgatgtgcgcccataaataattaggccaaatttgggacaaaatgccaacatcaaaatttggaacaccacgttttttttgtaggcatttcattggcactgcaatgtgtgggcaatggcacagaagcggcagtcattttgacggtatctgaaatttaaaataaaataaagcaattcaaaggggcgaaaattttgtcaatttttttggtaaatttaaaaaataatgattatggtaaat

SEQ ID NO: 16198 - DNA, 3093 bp, Heterodera glycines
caaaatcggagataagtccacgatcccctgtgtcctgcggtctttgtggctgttagagctgaaagattggcagaatttttgatttgagactattggaagaatgccatgcccggaaattttatttattttttctctcttattgaattatacgattgatgggttgtggtaaattaattattatggacgaacaaaataagaaatacgcgatacctgcgaaaaataggaggccaaattctgattgaaaaattactaaattttaaattaaaaatatttatggtgtaataaatgcggaggtgccgataggcgggtgctgggtcctccttactcatcaaaaaccttttataagcattatggtttttgaagaacgacatggggaggggaccgtggccattcattgtgccgtgccagaaacacaccccaaatgcaatgttggctttttgcttttcccaaattgcttttttgttggcttttgcttctaaacgcattgaaaggcgaagggcgggcgaatgaatgcgcgcgcatttgcccttctttttttcttgtgaaaaatgattttaaacactaaactgtgaaagtaataaaactgcttaaatatgtcacaataattgcagggattcgtttcgtcaaagaaaagcgaactacggtaaagggtacggtacgcgtcattgtgtttctgtgctatacatccattttcactttcattgtttgtggaattgcgaaactccaccgaggcctccgagataccatcgtttgaaatatggataatggtacctggcgggggaatacgttattggaatacggttaatcgtcaaatagtaaacatagacttgagcctgtcaaaaaacccggacccgaaccaggactcggatttccgagatggatctggccgggctttaccaaaaactgactaaaatggacggaaataatttaggagaaacaaagttattaaagagaattccgatttattggtattttattacgtaaatgggatatgtatttgtgctctgtttaaaattctctcatttgtcagacccaacccaccaatagtgataactgcaggacattggccaatagctgaaacattcaaatggacataattaatgcaagaaatccttgtcttttttaatttattaatttacacctataataagaatcgggtggcaaaaattggaaacggtcgaagcggcgattgtaccaattggtgtccaactaaagtggccgaaaacgaaaaagtcacaggacgaattgcaaaagcacaaccaaataactgcgataggaaggccaataagaacggaacaatgggtaaaagttgtaattggagacgatgttgcacaagttgctggtcatcggccagtaatagggcttgtttttgggccagtatctgaatgtttgtgttggtcaacagcggcagcagcgatcaagccaaattaattggccaatttttgctggcggcgacctcgtgggcgaattgatctccgcgtatcgctgtgcgacgtccgtcgtggaatggacccgcgtcatcttcggatacgggcggtcggcccaactttcgggcacatttgtggccgactgactgcggcacaagtgacttcggcaaatgccgccgattgaatcggtcatgggaaatgcttcggaaatgtttaatttggtgaaaatgcttttgttttgaggaaatcaaaaaataaattgattttaattagaggtaaaagaatatttgttcaatttcacaaaataatcaatttctgacggagtttttgatcaatcgcatgggaagggccaacaaacagttgcttcagcattttgagcctttctgcttttcctccttcgttaatgcattttcctttctctgatattttttcctctcgaattctcagaattctttgatttttctcctctttaaaacagctgattaaatcattacgcacttaattaaaaatcggggaaatttccgaaaaaaattcctagggttgagaaaaattttctgtacgttttgaatagactcattaatttttttctcttaatttagcaaggcccactttcttggtatcaaactaaggcttgggccacgaaattgagtttttacattcatttttcataaaatatgcaattttcccaaatttaattcaacgcctgccgacgacgacttcttcatccagaggatctcaattcgcttgaacattggacgaagttgttctacgcccactggcagcaactccgatcaattgacgtcgcccgttaccccgttcgcccgaagctgcaccttctcactgcccatgtcgtcccttttgcgcgctctcatctttggtgggggctgatcagtaagcagggaatggaacatacctatgcacagaatgtgcaacaatttggtttaatgaataatttttctcattaaaattataaatccgggttggtcgttttgctcatctcggcactccagagaaggttgttgagaagttggtgaaacatgtgacactgctaaatgcacttcatgatcgaggcgtcgacaacaaccaagagaatacaagcgattacccaaatttttgatcaaatttcattttttcaaacattttcaccatttcacattttccatatctgaatatttaagtgaacacattttttcggtttcaaatagcatttttaaataaagattttagtcatttgaataaagtttattaatgttaattggtctccaaaaaaggcagtgatcagcgtttcttttgaattaacgcgcaaaaatttacgccaaatacgctaatccaactttcttgatatcattcgagagcccttcggatgctctattagcctgcaaaatttcaaaaaattttattaagtttaaaaaaagtttgagccaaaaaagtttgaaaatctggttttttttgttggcaaagaaaaaagttatagccaaaaacttgcgctcgtactaaaacggcccgtactaaaccgaccccgacccgtctaacactggggccggaacaggaccggttcggtgccagcagtttcggtgccagcccaagttttggactacaacttttttcattgttgaccaaatctaaaatcttggtatcatgaggggacaccctcgtttcggcgccg

SEQ ID NO: 16199 - DNA, 1873 bp, Heterodera glycines
ttcaatcgccacaacaaagaattgaaacggttcaacctcccagagagttgctgagagtagcaccccaaagaccgagccactaacaacaacaagctggagcagtacaagaagaccaaggattagcaataattcgagcacaacaaacggcgccagttcaacatccccaacaacatgttggagcagtacgaggaagccaaacgctgccaaggatagcacagccggcacgacaaggacaaaatggaactgttcaatcgtcacaacttcagcgtggagctgttccattgccaagagtcccaactccacaaccgcagcaacaacaccaacaacaacaacagcgccaagttgtccgaacgccacaattgcagcaacaagttggagctgtgcaagggcaagtgccaagacaggcaccccagcaacagcacgaaaaacttgttggagctgttcagttaccaagaatgacatcgcaacaacaaccatctactgggacagtccaaggaagtcaaaccttgccgagaatggcaccgaaaaatcaacaacagccacaactacaacttggggccgtcccattgccaagaatggcatctccgcagttacaacaaaatcaacgggaacaacaacacgttggagctgtacaacaaccaaaaatggcaatggcggcacaacaacacatgccgcaacaagttggagctgttcaaggaaaccaacaggtgccaagaatgatggcaccacaacaacagcaacagtggcagcagcagcaagaaattggcgaattgggagcggaaaatggcacgaatcgttgggaagaatggcaagaatgctgcgtccagttgcccgcaggcaattcagtcctgggcaaatgcatggcgaaaatgataatctgggtttaattcataggaattttagcaattttgtccaaaaagtgctattgtaaatgcctcaagcaatttaaaaataggaaattatttgaatttggcactcatttttatggtaaaagcttaagacttggcattattccatcccatcagtgttttgaaatattggcattgcatcttggcaaaaagcataatgccaaaacaacgtttaaaatttcatacaaattttcattctatgacattccgtctctttagacttcgatgaggaggcgcccaacgccaccatggagaccaaagtggcgggcggcggcgcggcgccgaagcgcgttgggcgctggacgttgtcacagctgcgccagacggacggtatcatcccgtcccaggccggttggaacaagggagactcgcagaagttgatgaccaactttggtacgccgcgtaacaccaccaccaaagtgagtgatttgtgatgattgtctctgatcaatcaatcagttatcgattgattgttttttaaccggcacatactgtactctgccccgctatgactacagtactataccggatcaaaattgatcttgattatatctgatcaattatcgattacgataattgcttttgaccggcacatactgtagcttgtcttgccagagctacaatagtactctgtttgatcaacacaggtcaaagtggagaatctggccgagattccggaggacattttgctgaaaagccacggggaggtgcgtctgcagtccggtaccaaccggttcgcctcccagaagggctttgtttcgttcgggtaagtgatcagagaaattgatcaatcacaccgccgccatcagcagtcaatgatttaaaaaatatgtaaaagtcaatctatcccaaaatggtgccatgacactttttgttcgtgatcagatttttctgaaaatattgattagggcccagaaatgatcaaaatggatttgagagtttgtggcacaaaattcttatcaacg

SEQ ID NO: 16200 - DNA, 1871 bp, Heterodera glycines
  unsure (1)..(1871): unsure at all n locations
ttcgcttttcaacatcccccaatattgtggtgttggtagtggaagataatcttttcatcaactaatccttctgtccgtgtcgggaagcttggacaaaaaaatgccaacaaaatttgccaacgaaaaatgtttgacgaaatgttttttttttttttgcttaaatcacaaacattttgtcactttagccgctgccggaggagaaaatccgcgccagtgacggcattgtgcgtctgcaagccggtacgaacaaattcgactcgcagaagggcatgaccctgttcgggtaagggtgtcgaaatgttttcaaaagaattattaatataaattatacactaattaaatgggatcagaattttaaagcagcactctcgtcttaaatcctcgggaaattaaacgaaaaaaaaacggatttatggaatttttaacaataattttgaaaatttgaggaaatttagatggtatgggtccgaaaatctaatgcaaaattttgaaatttatgaaaattttacgataaaaatgggtaaaattttcaaataatttatccaacactcgaaaatgaaataacttggaaattgagtcatttttaagaacaattataatggaaaaatttccactgaacactctctctcactacagtaacccatccactcccttccctaaccatacagtaccggacgtcgtgagaccaccagaatgaaggacagcaagcacccggagtactcgcacgagcgcgacattgacaacacggagattccacttcagatgggtgagtttcgcaggcttttaccgtatgtatatatttaaattggatactgtaaaaattgtcggactaccatattgtttatgtgccattgttgaacaggtacgaacaaattcgcctcgcagaagggcatgactggcttcggcacaaaccgtcgtgagaccaccaaaatgttggacacctcgcacccggtttgttgggagatgggactggattcaaattgattcatgggaatggtagaatggagccttgatcactgatcaaacaatctccaaatggatgattgattactgaccaaacaatgcccaagtgctttttggggattaatcataaaactttgtccatttgataatattctgatcagcaagaattattatcagacaaatgcccaaactatcttttgggcattaataagaggttttgtcaagattataatgtattctgatcaaaacaggttaatgatcaggcaaatgtccaaccctctcgaacattgatcatagaaatttgggctgggtctatacattgacccgttcttcaccatctttggtcatttaatccgatttatcaaaccacctaaatctgatcattctttccatcgagcctaattgaaaaaatgatcaattttgtcccgtccttttcaaggagtacagccacgagcagagcatcgaccagaccagcatcccctaccaaatggggtcagtttaaaattagccaataattgatattttgaaatttggcatcgggttgatcagcactcgttttttattgttccattcaaacattttacagatcgaacaaatacgcgtcgcagaagggcatgaccggctttggacagccacgttgggaggtgcttgacccgtccatttcgtaccagaaccgcaagtcgcaaggtaagcaagtgcacatgcgcaagtgtagaaaaggctatgggcgatcctcgagagtcttgaaatttgccaatttgngtttatcaccatatttcggatgtcatgcgagttgccttttgtacgagtgccattcactcacattcggctctttaaatgtgtgacaggcagcatttgtctttttcgatcactgcgctttctgatcagtgccaaacgaattttactct

SEQ ID NO: 16201 - DNA, 2682 bp, Heterodera glycines
  unsure (1)..(2682): unsure at all n locations
ttcggtgcaaaaggcgcccctgggtgccatcgtcgccagtcggtgccgcaaaacactttctcacgtgcagcacgagaagtagtagcaccgcggaaggtttaccgcgtggacgacgaaatgggcgaaccgcaggcgatgttcatgcaaagtcgcaaggacgcgtgcgcaaaattgggcgcgccaaatgaatcgtatttgtgcagcaaatcgcaggtgagcgccaaatgagtgggagccacggccgaatgggcaaagtcggagtggaaaagtgccaaaattagtggcggatgccaaaaaattccatgccatttatatgccaaggcacttcccattaacaccttaatttaaatgggcagaatttgctctttttctgctgaagttgaccttcaccaacaaataccctttctacgtgaatatgccaacttcgtccaaacaaagcagaaaagtgtcacttctggcaaatgcaattcgcacagaaaattcattcattgccgcacttcgcaaggagcaaagttcaaaagaggacggaatattgtcattaattagctaattgcttttcctttgattagtgtccgaatggaaaaagaaaaaagaggagggaaaaacgacgcggggaaatgcgacgagcgaaacgaacggcgaaactccgaaaagggcggaggtgcgaacaaagagatgtgccttttggcatttcccaactgaaataaatttctcataggaaaagcctccttcgatggtgccgaattcggtttcttcgccttcgatttcgccaccgtatgccaatgtcacaccaacagacgatctccaatgtaccgtaccaatgccaattgcgagtactgtaccaacaaaatgtgaagaacaacaaacggcctcagaaacaatgacaactccagctgaacaaagtgctgaagaagcatccatagtggagaatgtcaaaccaactcttcctaccgtaatggtcagagcgaaaccgttgacaactacggtaggatggacggggcgacaaccgccacaaaaaacggccatttcgccattggcacccgtggaaacgacgacagtgccagtttgagacgaggacacagccttggcgatttgaatggccaacccatgggccataaacagtaactcatgacatcctatcgtatcgcattcatactgtattttctatgattttagtagagcaaataaatttctttatttatgaccttcttttttcaattgcgcgttttgctttcaatcatattttgacgtaataacaccagtttaaatcggaaatttcgaaaaaaaatcctatgggtaggcaaatttaaatttggcgttgcgatcttagaaagacttttcggcttttacttctttttgtcttcgtttccctttttttcttcctccgtcttggtatcgccaaattttttgaacttatctttatgtatttactttttatttgtttttcaaaggggctatcatgtttaagtttattcatatccccctttttgtcatttttttggcattcaaaagttgtgaacacatgtttccggcgggggttttccgggatttaaattagggaccacaattctttaccattgcccaaattcgaaacaaaagtcgtagttctatttttctattttatgttcgcgttcgggttaaaaatggtcttggttttaaaaaagtggacccaaacttaacctagtgccttaactattcagttgttttcgttcgttataaattcacaaataaatctccaaaatgctcctttcttccaactttgttggcgttggccgtgtcgcgtctcgtgccgttcaccgtttcttcctgtcgacttccgctgtgcgccttcagcaacaatacaaagtggcggtttcattttttatttatgaaatacgaaataatcgaaacaaagtttagcattgcaaacattttttttaggaagaagaaaatatggacattgaaaatctcttctcggaacagcaaaatctgccgcaatcgcagagcgaagaccaaccgcaggtgttcgatgcaccgaagcgtcgcttcaacaaagggtttgtcgaaacgatcaaaagcagcccatccccgggggaggggggaatagaggcactgcccatcaagcacaaattatattggtattgaattataatcatacttttcgccagaatcaaccgtgttgaattgttgggcggtgtcggcagtcagccattggtaaaacagaccgcgcaaggctccgcttttgcctctttcaacttgtacacaaatgtggagcgtcgacttggcgatggcaccacaacgaccaacacggaagtgcacagtgttgtcgcattcggctccatggccaaatacgtggagaaaaacgtggaacggggtgagagcgagccttttacactcagcttttcgtttctcacattcgaaattcatttcctctttaggcactcgtgtctatttgactggccgtcttcactacaccggcggtgcacttttccccgacgggacgcgctctccacgtatttgttcggtgaacttggaaagcatttacccgctctccaagcaaggtgagtgacccattgggtttgttttaaagattatccattttcatcttttcaggcgcaattttgcgttaatgcgagtgaggcaaagagaaaacgaattttggcgatgatggttgaattgacccaggacctgcagnngcatgca

SEQ ID NO: 16202 - DNA, 1857 bp, Heterodera glycines
cttctacatttggaagattgaaaagttcggcttgcacctcccaagacgataacttgcggattgccaaacaatcggcggagtgtttccaccatattttcgtaattttggccacctctgtagcctatcactgcacgagaggctttccctttaaggcatcccatcaaataattcattttgtcgattggctgcaggtgagcctgattgtggaccgcattctcgaaggattgccaaaatgtcggccactctaacggatcgccggagaatatcggcatccgtaattcaggaagtctgatccttggttgatgcaggacttctctgacgggtgattgcctttgtactcgaaaagggagttgcctttcctctcgagcaggtgattgccgttgcctttgggcattttctcgcacggcattgtccccgttttgggaaccatcgtattctgactctcctgcaagtgccactagtatttcatccatcgtagcatgtgcgtcggctagcaaattcgctacttctctttcgttgatgaatgtctcgagtcgttcacgctccgcgacaatgttattgaacttagcgaatgggacggggttttcgctcttggaatggacttgtgggatggacagcccctttagacttagttggactgtcctggtggacttcgggataatcgagcttagacaaatgcaaacacggaactctgagttccgggaatgtcgaaaccgtagagaacaaggaacaccttcggaacaaaaaacttcttagacaagaagtagtttatttgtcggaatagcgcacaatcaaaggatggaataatgatttttcgagagacattctaaagggaaatattcgggtttatatatgagatttggacagggagggaaaattctaaaacacacctgaaaggaaatgaaaaatggggaaacttcgggaatattaatcacaaagatcacaagggaacattcgagaatcttcttccgtcctccacaggacttcctcatttctttcctccgggcggtcctccaaacggtcctccgagcggtcctccgggctgtcctccgagcgatcctccgggctgtcccccaatttccacgcgttcagtcgccagcggcgacaacagatttcgacaaaccaagttttggcaaaattttgaaaatccagggaataggtggtcagaaggcgggaaaattttgaatggtataaaatgagaaaaaaaaatcatccagaaaatgtacatttttttcttcaaaaggtttcaaaatgagcattatgccaaaactacattttttaattttttctttaaaagcaattaaataaattccaaaaaagttaaaatcacttttgattcaatcaaaagcatcaaaattgcttatattttacttgaaataaaaacaaaatagtggtaaatttttattataaaatatgtaacttaaaaattgttgtgaaaatgagaaaaaatccgtcctgaaatttaacattttttcttcaaaatgtcatcaattgcttcttctccttcacagccatttgcacagatttgtctgctgaacacaaatcactaaatcaccacccgcccacgcctttaagctgaagcctaagcctaggcccaagcaagcctaagcctaggcctcgaccttcgctgttctcccaatccaattattgccataccacagatcaaattggacaatgttcaaattggcgtcccaattttcgtcattttcccattgattcatcgccgtttccctaataattagggctgggaatttaagtcaatgactttttttgctgactctaaatgaccgtataatggcttaaaaagtgttctaaactagagaccggcgcgggacgggatcccgcgtgggaatttgc

SEQ ID NO: 16203 - DNA, 1529 bp, Heterodera glycines
  unsure (1)..(1529): unsure at all n locations
ttaattatttagatgactttccaagaaaaaatgcaatctgttccttatatggtgagattgataataatattatttacaaaaaaaatatttgattatttcaggatgaactttggcaatgcattttaaataaacaacacgattgggtactgattaatagggatgcaatttttaggttttagcctatttttagtgcctattttctatgtttttattttcagagcctaaaacctaaaaaaaatgtgaaaaacctattttggcaaatgcaataaacacgaaaaatacacccctaagggtcaagtttttgagaatttttaaaaaatacacccctcagaagcaactttttgagaattttgaaaacatacactcctaagaatctacccgaaatttttcaaaaatacaccccctaagaaatgaaaaatttcaaaaattaatctccaaaaaacaacgatttgatttcaaaaatcacttagctcaatactgattttgcttaattttgttacttttttgattaaaattttatcattttacacacctaaaaatgaagtttttagtgcctattttgggagtttttaggacctaaagcctacctattttggcagtttttagagcaaaaaaattgtatccctactgtttaataaatatttttcagtgtaaatcagggatgcgatcgaaaatttttcaaaatcagagcatcgggctcaaaaaaatcagattttgtgggcaaaaatcagaacattttgcaaaattgcttcaaaccttttatttttacaattaatttaatcaaaaaccattaaatattgtatttatcgcctcgattatcatctttaaaaattttggtgaggaaattaacaaagcgtaaatttcactgcactcgggatcaaaaaaatcagattttaaagaatttttttgccgcgcgtttttccaaaaaacttttgggaaatgggcgaggggagagtgttggctcggacggcaaaggggggcaatttggcaagggcaaaatgggagagagtgcgggaggaattaaggggggaataaattccgaataaataaaagaagtttatttaataaatataatataaagatgtgagtaagatgtgagaaaacgcggatgcttatatggagagagaaagcgtaggtggagcaattttagcagagcgacaaacaacaaaaaagagtgactaatactaagcacagaaatcacatattaaatatggaaatatcatagaaatataaaattaatcacaattattcaaaattatccaaattaactcaattaaattagtcttccacaatttccttccattctctctctctctctccctctttttccctcatttcccatcatttcttctttttctccactttcttagtcgctttggcgaccctccccgccgaagatggttcagctncgnttgtgccttcntcggccgnggctccgncnnagtttaaaggtcgggcggcgggtgccgtgctcggcgcnncgctctagcaagccaccgtctggcgatcgacttcagactgcaacagtg

SEQ ID NO: 16204 - DNA, 1208 bp, Heterodera glycines
  unsure (1)..(1208): unsure at all n locations
tttgtccgaaagaattgtctaaattttgccaaaaatcttattntctgnataaaatagttacattatgccataaaattntaaaattatgagtttatntaaaaaatcagaacaaattttgctcgctactccaaaatcagaacatttctgacaaatcagaacatttttattttatcagatttggacccttcaaatcagaacatttctgacaaatcagaacagatcgcatccctggtgtaaatagatgcccaaatttgttgagaaaataatatggctaaataactttagaattctttcttaaactgcttaccaatttccgttgacagtgcttgtcgaagttctgtaagtgtttttgtctaattttgtataacttttcaaaatatttaaatccaggaacttagagacttctgctctgaaacttttgatttaatatactcggacaaagtgaaaaattgtgtacgcacttaatttaattaaaatgaatgaaatattaaaattacattcactttaacgacacaggcacgagccaaagaatgttttgtgcgtcaaaatacattagtaattttctattactgctactagaatttaggtcaattctaattaagaaaaatgtgcacctgtgttttaattatattacgttggatcacacctatggcgaaattgtcttcaatcaaacccgttgtgtaagtttagaaaattgtaataataattaaatgtgcaacaagtctaagtgaaatttaaaagagctaaacggacatacagggtggcccaaaagtttccgggcacttcatttgttcataactttatttataacagagttagagaaataaaacataaacaaaacaataagaacataatagggaaaacaataatcattggtttttaaagtccccgcagttttcgttaatacagagacgaaaagaaaaggcttgggaaaattttcgattggacccacgaaccaagaaaacgggatttttgcccgtgacgaattttcctacccaaagcataacagaaaacggattaaatggaggttttatcaagcgcagcggaaaaaagtatattttacttataatcttttattttcgtgattatgggcagttttaattgtcaaaattttcttagccgaaaaaggaactgaggacctgcggcatgcgtaaggaccagtgggaatcttttgactctggcacgcttcacctattctcttagaaatt

SEQ ID NO: 16205 - DNA, 1499 bp, Heterodera glycines
aaaaagctagttaaaataagtttctgaaaaagcgaaaaaagaaagctaaataaatttttgagcaaatttctataaaattaaattaacgaaataaatataaataaatacacaaaaaaattaaataaattaaattacattaaaaatttttgacatttttaaaatgtttaattctgatgaatcgcacaaatatttaaacacaaaaaacctctccaaataaaatcacccgcaaaatttgtgtgtaagggaaaattggatgattaagtgggggggggggggggggggaaagtccggttcttttctcgtcgataatcactgcgatcttgtgatgatcagcaggcgaacattttgaagagccgccccaaaaaattgcggaaaatttgtgaaaaaaatgggaaatgaaaggggggggagactttttttaatccatttccccgttatttttgggaaacggccaatttcgcaatgattaaattaaattcctttaatttgttttgacgaaaatattttcgcttgaaaattaagacgaataataaatagaaataaaacaaaataaagaaaaattaaatttgaaaaaggaaacaaataaaaaaaggacagacaaaaattaagaaataacagaagcaaagaatttattattcaccagccgtagcaaaatgcagcataggaaaaatgtgcaaaatggggaaatgtttggggggaatatattaaaaacgacaaaaagaaagccgaaaagggcacagatttcatttttaaacaaagattatcgaaaaatgttttaattgtcaagaagaggtaatgtaacaaaacaaaatattttctaaagtcgcattttattaatttgaaggcaaaattaaatttcagcggtattccgaattttttattttaggccgcataaaacgattaacaaattgggacaatttgtgtctaacgttgtaattgccaaccgaacaattatgacttgagtcatttcattaattcagtgaggaaattttttgagggaaaagggcgacgagaaaatgtttcaatgggagtaaaggcaaagggacggcggttaccttttatgttttttgcattttaattgatcattgatttttttatgcgatgtaaataggcgaatattttcgactgaaattttccaaatttgaggccaatcggacagaacaaatcataggaatcgaaatttgaaagtgcatttttgaatggccgttctttcatcgccgcttttcactgatcgacggttttcgtctttgatcagtcatttgtttattagctgtgggtttcggagagaaaattgctccgccccccgcggggacattttttggctgtgcttttgcactgatttcagctttgcagaagatcgctaatttcgtggataaataaccaattgggcgaacacacacatcaaaaacaaaagcaaagcatatggtccgccctctgggcaaaacaaaacaaaatattaataattaaacgcaattacggagtgaatttgcgcgcgtaac

SEQ ID NO: 16206 - DNA, 2558 bp, Heterodera glycines
  unsure (1)..(2558): unsure at all n locations
aagagaagggacgacagatgggacacacagccccaccccccacctcncctcgggggaagtgtgtccgatcgttagttcacttgacggttntatggattatcagcaagcagcctttgaattggtcacaggcacagatgggcgtacaatgaataaccttacttttacttaagctcacaatcagcattatgaaaaaagaacctggcctgaattttctggacaaaaatcaaggaaaagcccaggttgccgccattgtctagatctgaatccaggaaccgtaattgtttcagtcagtcgaactcttcaacaacagcagcagcaactgttgtgactttcatccatttccgaataattaacttctcctttatttttgtttgcgcattttattatctttaacaagatatgttaataatctttcgttttttaatttatttttccaacaaacaaaacgatattacgatgatactctgaccactaaagggaaaatgccataaaaagaacaaagtaaatgataataatgttttgaaaataatgtgcaggtttcgatgaagaatttgtggggaaatgcgtgtccttacagtactcatctggcgagggcacaggcttaaagatttccgaacgctcgacaaagcgattcaaagttgagtttgtctcacaaccggtgatgtttctcgtcatttcctcgaagctgggcgaattgggaggccaataaaacgcctgaaaatgattgtgaatatcggacaacaaacagattttgaaagcacctttatatagtgctcgagattagtagcgttttgccacagctcaaacgtcacacaggcggaataatggggataactaaataataattggtaaaaccataatttattagaggaacgaggatccgacccgtcaacgtcaaaattcgttttgttgaagcccagggctgagaacagtgcggcaattgttgtgtcatgctaaatgacggactattaattatgctattaattagaaccgtctaaaagcaccgcggaatatgcgaaatatttcctggtacgaatccaatcgcaaagtggcgacccaattggcgatttcagaccttacaattagaattaagacacatagacataatcaatgtaggagagaaccaaaaccaacccgaaaaagactccgtcacattctcggacagacatttcaatttgttttgcatatttccaattaaaatccaaaggattggcccgccccttatccgtggcaattcgatgtcaaagtgcacaccgtcgaaagcggacaagccttaatagaagcaaagcaattcaaaaaagagcacaaaaacagtggttatcttgacatgcctctcccgttaatccattcttccaacaaaaaatccatctttgtgatcatttccctcagtgttcggttttgagtccattccggcatcggatgaggcaatttgtcgcggtattgatcctcaataatcaaattgttcaacaaacggacataattttataagcgaatgaacaaaacctcaatgaaaagtgtgtcagcgaccagcccaaagttaaaaatgtcaattttctcaccggtaaaagttgacaaatcggagaaaagttgctgaaaaggttctcgttaaaagcggaaaacccagttgttttaagcacaaaattggattcagaaaccaccaataactaatttttcgtaaaaaaatcagagctaggctagaaaaattactttattatcgtccatcaactgacgatattccggtgtgttctgcataatttcatgaattttgctttgtcttggacatgggacgtctggaatgtcggggataatgtgatcctcgtaggaagcgatcgtgtgaacagccactggggtgaaactaaaaaataaattacaatatgacacaatcaaattcaaattgtaggatgaaaaagcaaaaagacaaacaaataaagttcgcgtttcatcactgacccctagaagtatgtttaaattgctgacccatgaggccaccattgcgactcgcgttcactcggataatccgtccccggcatccctttgctgtaaaatccgaccatgtttgaaatggcacttgtcagcgttctgtttatatcggtgcttcgaatgtaaatttccttgtttaaatagcgttcactgacaaaatgcagctggtcaatgtatcgtgccttcagcttcctgccaagaatgacgtgttgggccattcctttctgtaacatttattgaaattaattctaaaacgaatgacaaatgaatgccaaccggagacaattgtccccagccctgaggccacacttcttcctggttcgggtcggttctgaacgttccggttggggaacgatctccatgacgccataactgcaaatcaaaaacagatgaaatggcaacaaggatgtattataagtaccgcttggacaaggattaattcatcattagtggcggcgacgaacaaatttaaaaaacaatttataaagaatagagattagaaatatgaattcatcgtaaaaaattaaataaatccatagaagggccacgtctcagtagatggggaactgcacataaat

SEQ ID NO: 16207 - DNA, 944 bp, Heterodera glycines
tcatcattttttcacttttcgcgcaacgacctagcaccacagagagccaagggcaaatttttggactcatttttggcataaatttctaattttttagataaaatatacaaaaaaattgcaaaatatgaaaagtgagggaagcaaacaaaaataataataatactaataataataatcatttgaacgctacctaacatcatgtaaatattagcgtcaacatttaaattttcccttttttatgaattactgaattaattgctttagtaaagtttataatttttagactaatatcaataaacatattttttaataattttcatcatttcctttcatttaactcattttagcaaaattttcaacaaaaaacaaacaaataataagcatatacatttacgtgtaaatattaacaaatcgattagctaagctagagaattgctttttaacattcaatgttcattttataataaaatattacatttatttttatacaatattataataatttaaaaaaagtaaatttgaaacatattaaatttgtgggataatttcttttttttgatgattattaatttcccatcaattgatctacctattcctaatagtttaatgattattaaaaatattttttcattagtctcagatgaaaatcagtgtaattataattggactgacaatttttgaaactttgtttggcacaatatttgctgggtttttcgattgcttttttggtcgtgacagtgatgagcgcaaaccatcgacgactaattacagaaagccggccccaattacgacatcaagccgatgggatatggacggtaaaatgcttaatctcatcattctttggtgattttcagaacacaatcaagatatcaagctgttcaaagaacattccaaaaaatattttgatgatttaaagaaaaaaagcagtcgtcaatatggcagcg

SEQ ID NO: 16208 - DNA, 1120 bp, Heterodera glycines
atagatgaaaaaactcccaaataggtaaggataagtatttaaaactgggtccagaagcagatcaaaactaaggtaaaaatggggtttttcttgcttagctacacgcattaagtgcgcaaaaatcgtaggtatttacctacaaattccattagtaattaatttcaaggtttgatcaaccaaggtaggggagctcagcatgcttttgatcaatcattgaaaagctccacaagaaaaagccccgagtaccaatcaattctagatgagtggaacaaaccaaagagcaacaacaatcataataataatgatattgcaaggcaaaaaacaaatgtatacaatcgtagaatttcaagaatagaccatggaaagagttcaaagcaattgggccaagtttatgctgaacagcgaacagcaacaagccgaaatcgtggcaaaaatgttcagggccaacgttcaaagccactgggccaaaattacactggaacaccaagacgaaatccgggaaaaaatgttcaaagtccaggtttattaacaaggctatttagtcgaatgtccaattagcttataagcaaaagttcaggcagcagccgtttaaaccgaagcaagtcgggccattatgccaaagagttagggcaagtgccaaaaccaaagacgcaaaaagtgattcgcattgatgcacatgaatatacaaaaaagcacatctatgggcaaaataagagtaaaattattgtttcaaatttaataacttaaattaattaatagttttattaattccaaaataaaggatgaatgaaataatattaatattaatttttatgtatgcattaataaaatattttagaagtcaaacctcaaaaggatgaatataatttgccatcgcatgcattggctggcaatggtaaatcatcacgtggaaaaagcaagaaacatagtcaaaaacaaaaaatcaaagaagagctttatgaattgagtgactattattaattgatattttttttaaattgttttattttcaaattttagtgaaatttcggaccgtctatgtcattttctttaaatttttggggaacgttttgtaaagttattatttattctaaataaattctgttacataatgcattat

SEQ ID NO: 16209 - DNA, 1098 bp, Heterodera glycines
ttatttgccaaagcggccaaattcaaagctaaatagaaaatgaaaatgaaaatgtatttatttaaaaaaattaattttatcaattaacagtaaaaattactcctaattattgtattttgcctacgcctttttgtccttaattaatttatgtttagtttttatttaccaattaattaattagttaattaattgattgattgattcatgctctcccgacatttacctttcaaattttcctcatttggcataacagttaaactatcagtcatgtattaatctctttcttccaaactcattactttttaaattattttattgtgtgcccttttccctcactaattaattacttaattggctaattaactaattaattcccccggccgtttgtttaccttccaacttttcttccgcatggatctttccgctgcttcggctgctttttccgctgctccctccgccgcttcttccgctttggctccccccaccgccccccttttttccgcttagcatccccaaaattcggcccaatcgcttcgccgcccttttctccattttctccctttttttcctttccttttctatttggaccaattgtccgtcaatttcgcccatttgtctgcccaattccgccgccaccaattggccataaattgtcatttgtccgaccgtttttttacgcgaaactgcgcggcgttcggccaattttgaccattgctccaaagtgtcggcactttgccgcaattggtcggcgaattcggcacatttcttttgtgtcgtcactttgccgccaaaaaatgcttaaaatttttataatttattttcgtattaacaaaagaattaaatgtctttattttttcgaattcgtaaatttaaatttttattttcgttttccttttcctttttccgttcgaaattgttttatttttccacttttaccttcggcactgtaaaattcggcactttcgttttgcgtttcgtcccttttcatttgaattggcattcgcttttcctcctttttctcctctttctcttcttcctttccctcttcaatttctctctctttttcctttgtctccgatgtctctccgcgttcgacaa

SEQ ID NO: 16210 - DNA, 3038 bp, Heterodera glycines
attaaatttgaagaatcggaaggcgaaaattggaggcgattggttgaagaaatcgctacaaaaataattttaattaaaatcagattattttaattaattaaatttatttgatttaatgccaaatttgtttcacttttgccgtacgacggtgaagaatcgtccaaaaacaaagtgccaacgatcgtttcgcacttttccacaattttttggatatctttgcgaatcgaacgcggcgaatattccacttttgggctccgtatgtccgaatcgtcctcctcaaaatggcccaataaagcgaatttcaattctaaaagagtttctttccattttattgcatttcaaaaaagaaatattttaattataattctcctcaaattatacaattttaaggcgggagtggtcattctcgacataatcgagcaattgggtcccattttcggatgaacttagagatatccccaaagaattgatcagtcctgatcagtaagacctatccgattgaagaattgtaaagtaaatgaatgaaagactgccgattatctaattggcacagttccattagcaaattgtctcattgatcaattgtctaattggccaattagctcattatcccattggccaatagtctactgctgaccaatttcccattgactgtttgtcccaatgaccgtttgtcccattagcaaatccttcccttgcccaattgtccctgtttcccattccctcaccgtccatttgttgcggccattccgtcttggtcaccaaatgcgccttttcacgtgccattcgttcatattcttcgtccggcaaaaggacttgttcaaattcgcgccaaatttgcacaatgttgtgaatgtgatggtaaaattgggtcttttttgctgcgcaattccctccggggccacaaaatttgtaaatttcgtacagagaattgatttcgctcatcagctgaaacgctcttttataaataaattcaaatggtttatctcttgaattcgagatcccattatcattttcatttctcctccaatttttggctttattccccggctttatccctgctcttccccattttttgtccttttcccggctttattcctcccgttccacatttttggccctatctcccggctttatacctcccttttcccatttttggctttatcccccggctttatcccttatctctccccattttttcgtacgtccgttgtcgcgtccattataaaagttaatcggctctgttggatgcccaatattctgctgattgcgcgcaaattttcacccactttttggcacttctctttccctttttcgccctttaaaatgccctcaaattttccccttaggcaatggtttttcgttcgttttttttgcccttccgtcgccctttgcttttgctcaatccgttcgatttgcttttcgatttgcccatttgtctgttgccggtcattttggtagcttctcgccgcactcaaaatgccgctcaactgaacgtagcactgctccaactctttgaggatttggttcgctaaatgcatgccatttggatttttaacggataccaaaacaattaattccccactaatttttaaaattgaaattttaaactttaatttcaattataatttaaaattgttctcacaatttcgctgttcattttcattttcatttgcttttgtccattcatttgccaacgaagcgcagaaaaacaaaatcaaaaacatctaaattattaaaaaaataacaaaaaaataaattattaaaccaaattttaaacgaaaaaaaaaataattcgaatgatgtcatttataaataaataaatccatcaaaaatcttctgaatgcaaattgtaattttgtgatggtgccgccctgccggtcacatcatttttttatttcttcttaagcattaattgctaccacgagaatgatgtcactttataaagtggctttttatttggttttaaaaattgtaaaataaaacaaaatataaaaataataattaaaaagaaaaattgtaaattattaaatttaaaaaaataaaaaacaattttttaagcaattatatttcctaatctgaaacttaattcttctgtctagagaatgaaaaattctgctaaaaaataaataaataattaattccaataaaaatgaaaatcgattagcaaatatttacacgtcccatcgctaaatgaattaattaatttttaatcttattttattttattttgggttttctgtccagcagattgatacatattgttgaaaatcgttttatgccaatcaatcgattgattatccggtcgatcgatagatcaatcactccgctcgcgcgcgtgcgggccggttttccgccccgctcatcccccgccgtcgcccgtctcttccgcgcgcgtgtgccgcgtccgtttgccattggcgcgccccccggcgacgcgtcgccctcgcggcgttcgctggcgagtggcggcgagcagaaattcctcctgcagcgctttattggtggacgaagttgaggagagagtgcgcttctcctgcagaacaccaaaatgaataatggcattcattaattgtgccttacctgctccgttttgacgctcagcaagtcgtcgtccgcccccaccaattcgtcgccgtcttcgacacctccgaaaatgccaaagtcatcctccccatccatcgcaatgccttcctcctcaaagtcggactcttcgcttccaacttcgtcgtgcactgaagcaaacaaaatattaaaaatcccttatgtttaaagttatgaataaagataatataaattaaatttcatggcattttcgaaatttaccctaggttttcaaatttacaggcaaattagaattagtgactatttttccaattcaatttcaatttgtccaccaccgattatgccaatgcgttgtcccaaccatcgcgccttctgcacaacgtcgtcctgcatcagtttgaagcacattgcgatcagtgccatgccgaacagcaaataaagggcacagaccttttttgtgggggggggggggg

SEQ ID NO: 16211 - DNA, 2610 bp, Heterodera glycines
  unsure (1)..(2610): unsure at all n locations
cctggttctgttccatcccccccccccccccccccactctttcagtgcgcaatttgagcgaccaaacaattttttaaacagactgatcagcaacagagaacaatctgacttttgttgtgtgccgcactgatcggagaaacaaaactaagcgggggaaaggggggagggggcggaactttcactaaaaagtgaaagcgacaattcaaattgtttttttccatttaaattagtgttttatttaaataaatgcaaagcgaaaggactgatattactgtatgatagcacagataaataaataaacaataattgattgccaatcgtttgatcactcattgtcagttgatcgccttcggaatgattgtgatttttcttgagcgaatttgaccggccaacaacggatttaaagcggcgatccaatcgaacaacttaaaaatgcccaactatataaattatcctaattaatatggttcgtatttgacttcaggcagtgttgggccacccgaaaaaaagggaaccggcagaacccctggcattttttattacgtcgtctccgggcagtgcctgcatgaaaaatgcgcgatgggaagtgcacacggtaaaagtgttgggggcgttttcctgctgttcgtcgttgtactcaattttggcaattgccaagttgattatgccacgaattacctgtcaattaagggacagttccgatttttagcgatgccaatttccttccaaatgtttttaatttttaattgtgaaattttccttgccctataaatcagttatttttattttttttttaaattttcgtttttctctgtttctctctctctcgccctttctctcgcccctctctttctctgctctgaccaggtctttgtcgtctctgtacagcaaaatgtacggccttcgaatgaccacccatcgtcggaccctgtaaaaacagcacaacgtttggccaattgttgttctcccataccattcttgtcttgctccctccagaaagtgcatgtgtcccttcttggacaccaccaaaccgaccctttcttctgtgacctgtcaatttaccttaatttgataatttccataaaactcgcacctcgggaattgttgagggtgccgttgttttgaacatgtaatttccggaagtcgaacgggtcattgactcgttcatggcaccgtattcgatgttcaggtcgtcaaaagaccgcgacttggtgcgaatgtccgcggtcagagtgacactctttggcatggtctgactgaacaaattcgcatttccattggcttttcccaatttgccattggcttttcccttattttgccattttacccctcaatgcttccgccactttgtgatgaactgtcgctgcttagcatttccatctgtttatgtatttttccatttgcatttcgccttttatttcgaaatttcccacttttttgcccgtcggtgggtctttgttcactgggattttcagtcggatcaattccaacacttttgtggccaattttcgttcctttccactcattttcacagaattcggaatgggaaatttgggcgaacatggtgaaatcttccaaaaataataattaaatatttatttttcgacttttcccaccggtgtgtcgcctttgcccgttttgcgcgattttctcagctaaattaaaaatatttttccaaatgcgaagcactgaccataaggaacagtcgcattcgctccacttgctgaagtttgctcagcttctccaactccaattggtgctccaaaatgattgagtcccctcggggcctaaataattttaatttaattattatttttaattggaattttcgcttttcctccgccaacctccaagtgccaagattctcttcgcctcgcacatctgtggaaaatgaaagaatgaaccgatggctcttttttgttagctgtcttcccacatgttgacgatgtgtccaaaattcgccgctttctccgtgccgtgccgggactgttgttcgcctcactgtcctccattacggtgagaaggtaaacgccgggcacacggttcatttctgaaggcatcgaagtaggccaattgttgccatttttgtcgcccatttacccgcgctttttgagattccgccgatcagtgaccggcaaaatctgctggccgcactgatcttcgagtcccgtgcgtacacaatcagacccaaatctttggtgataattgccgactgcgcacaattttcaatttccatatacgcctaaacaattaataaaatgaataaattaattgaattattaaattgaattgaattcggtaccgaaattgtcatgtaaacgttttcgccgtagcccgagacgcggttgagaagcggcgaattgtgcagcgaagagtcccaagcggcctcnaattggaaagaaaccctgcgaaaganaaggaaattgtattnaattaccctatctatnntatatgattaaaatccacctgtcgtccatggagaattcgaggtaagtgcccggggaaaggcccaaactgagcacgtcctcgtccctcccaccccgacaatcgggaacactgcgggatccgccgactaacagctggaaacaataaatggcaaattgcaaggaa

SEQ ID NO: 16212 - DNA, 1015 bp, Heterodera glycines
  unsure (1)..(1015): unsure at all n locations
ggggggggggggaaagaggagggggtaattaaaagtgtccctttttacctcttgacagtctctccagcgaatgtctcctgcaattaattatattatgtcttttttataatgctttttgcccaaaaaacaaaacctttttcgtggcaaattgtgattttaatgcgccgttggatgccctggtggagaaggaaaatgccatgggttggcagtccattggcatggtcaaccacctgcatttattttgggggaataacaacgattggttttctttgcaaaatcgaaccgctggatggtattctccgttgctggtgaattcgcaaatttcgaaccaaatcagcaagtcatactttgatttgaccgaatttgccctggaatttctctttatcgtcgattaattaattaattaggctttgcctcgggcagccgttgccgctgaccaccaatttgctcttcagcggagttgaaatgaccaacgacggctgcaagttgctcagattcttcgacattttgcacctgtcaaaaccagaaagtgccaccatttatgccatccttcgttacttttccgactgattgttcgccgtcgtcccactgaacatgctctgctcgtctactttagtcaaatggccgaacacttcgaaaatgatgggaaagtgctgcaggtaatggataaatgccgagttgaccaccgctttgaactcctcaaaagggcaattggaacaattaggcaatcattgcaaatggtccattgatagggcaatggcgtttgctaattatgccacctgcacataattatacggtaacgtgcgatgttcgcccttcgcaatccctttgactgggctctgttgaaaatgcttcgtcgtgccgatggagaaaactggagggaaataattataaaacgaagaatgngatgccattggcattcgcatttggcctacttgaaactgacaaacacgtccgtgtactccttgngaacnngtgagcattcgacgacagtcaaacggaaaatgaattcact

SEQ ID NO: 16213 - DNA, 1322 bp, Heterodera glycines
ttcaacccatttcgaacatttttacatcgattctgaacgtttttaagcatttttgagtttggggactatgatcaatatttaccaagccgataataattaacaaattcattttaattgtcatcaaattcctcttccgtttgcccattcttgaccattcattctttgttgtttttgcctttgttggccaatgcgcacttactaaacacatttttctggccaattggtgacaacgttcacctaaaaaaatcgttggaagtactgtaataaaaggagatagggagggtatacggtagcaaaacttagatcaaaaatgaaaagcgtagctgagtgaaactgaccgggaaggtgacggcacgacaaaacaaacgacggaatttggcacggccacgaacggcacttaccgtagtgcaaccgacagaagcagcgccaatggcattgacatttgacgtaaactgaacctgcgtcataatttattttagaggttcttttcggttttgtgaccccccccctgaaattttcaaataaaaagtcatttctagggtaatttggggcgctgatcacgaatatgacatttatttttcaaaattccgaatcccgaacccgaattcgaacaaaaattctaaattcataaattacaagggaaacatatttctaggggttttagaggtcgctgaaaacgattatgacatgcatttttgccaaattcgaaactcgaaccctgacttgaacaaaaaaccgagatttaatttactaaaaaatttaaaaggtaaaatatccatcataggtcccagactcaaaattgcataaaaatacttttataggttttcttaggtgctgaaaacgcctaaaccatcaaaaaaaaactgcgcggcaaagcgcaaaatttacacaaattttgtatcattcgaaagctcttgatgagctaagttaaaaaacaaggtatcgaaccgacgccatctgagcactgggacaactaagtcccagtgaaaatggacatttcagtgccgaaaaataataacgggaaataacaatttaaaagcaaaatttcgcaaaagggagcatgcgaagacggagcaagtagtgaggcgagacggagggcggaggaagacgtctgacgagcgccacaggcggtggcttgcgggtgcccgaagggcccccgccaatcggtcaaccgcctgcggatcacgcgcggacttcttccgtagtctcacccacctactggccgccgtagtcgagtgtgcggcggttttttagcgcaataagcaaattcaatcttttatatttgacgttcttttactaatttctgactatggtttaaaaat

SEQ ID NO: 16214 - DNA, 1523 bp, Heterodera glycines
  unsure (1)..(1523): unsure at all n locations
tttttgatgcgaaaaaggtcgggcaaatccgaaggaagaggagtaaacaaatgggcgcaaaaaatgttaattaattaaaataataattttcgattttatttaatctaaaaattatttaaataataattaatttttatattgttccatattgcacctaatacgctcattactttttcttccattgattgcccttggggtgtgtgacctttgggctcctccattttccatctgcgcatttcgcatttactcactcttttttttgtgtccatctgctgctgttagcgctgaagaaggcatcattttgagcatagttttaccagttcacagaaaatgccatagttttaactgcttttggcatttttgttccaatttttttaagaaaaatgaattggacccagaaaattntctaatttttaagctattaaatagccgaatattggtttgaaacctattcaatttattttttagcatttaaaaatgggtcttaaactatttttgatactgaaaatgtcggacaatccgaaagaagaggagaaacaaatggacaaagaaatgtaatttaataaaaataataatttacgattttatttaatttaaaaattatttaaataataatttaacatatttatttaataaatttcaatttctgttccatttgtcctgctgattggcacgcggtgttcaatttgctgccgacttctcaactcggccttggcattgcgttggtcagctgtcgatttgacggacgagtggacgaacacttcgaaacacgcaaatggacgctctactatatggaaatttgctgcaaaattggcgagaatggggccaaggaaatggaaattaaaaagatggataaaagccctaattggggttggaaaatgttgccaattccgcagaagccattgccgaccaacgtcatcggatttccgcgcatccaaataaagtaatgaaaacaatgagtgttggtcgagaccggaaatttcatggcctcgacaccgagactcaacccaggggtttgagtattcaaaaaactcgagactttttctcggttgaggccgatattctaaggctcactgaaatgggaatggacagtttagcctttaaatttttattggtttacacataaaataggtgaattttcaaaaattagcccaatttatattaaacagtcagtttaattggcccaatttgtcttttggaaacaatttgtgacgaatttcactctgcccgaaaaattctttattttttgaaggttttcttaaatttaactcccatttatattgaaaaattctaagaatttttcaacgacccgtccaaaaaatgacaaaatttatcagattatacatcagttctcaattatttttcagttacattgaccacaatgtcgtcgtttttctgtgccgttttcttcccatttttgcttcctatggcacaaattttgccattcaaacggaaagtgaccgcgttttggcgttcgttgtgcgcaacgatttggccaantgttacgcagcgaaattcgcgcc

SEQ ID NO: 16215 - DNA, 3228 bp, Heterodera glycines
ccccccctggataaatagtttagagggaatttgccatttattagcagcaaattcactgcctacaataattaacaaattttcatttcttcagatttgcatcactcacaataagcctttacttatggaagaaaaaagcgcggtaagttttgtttcttgtctatcgcttagaatttggaccgtatttcggcactttaacgccctaatttcgtgccgtccatcaaaacggagagagtgaactgtgcagaagtttgatttatggggctgagatggtcggtcacggggctttttgcttggcggggaataagcccctcccttctcccccagtaacgagtcattgggggtcgagtgggcgccaaccaactgagcgcctgaccggtttttggggtataactcatttcatagttgcccgaattgagtgaatttaatatcattcgaaagctttaagtgtcctctattagcctgcaaaatttcgttaagtttcaataaagttctggccaaaaataaattcattcaattcgggcaactatggaatgccgggctggcgcccaggcgttaatttaacaaaaaaatttgctactttttgaaattttttttgactactgaaaatttttatgaagagcgaaatgacgcatgccaaaagcactcatttttagtaatgctgcatatttctgagccaaattggctgagtttttctttgtttcgccatgggagggcggggcgttctccgccactgacctcaacgccgtccatctccgcgtttagtttcaatcgactcattcatttatacattcccttttctttattagttttttatataataaaaactcatttttcatgaacaagaaatttttgcaagagttccctccataatggctgagtgtgccaaaaaatgcaaagttcaaattccgaccgaattggtcgctgaattggtcgatgttctccgttttgatgtccgttgggccatcgtccgcgtttcagcggcctttgacattttggtttttaaaaaacaaaatgcttttataattgccaaaacagttgcgcaattcatccctttaaaagtattttattttctctaattttagcagacggatctgaacagtgggaaaacggaactcattaaactcgtggccgggcacagtgacgaacattcgcttaaactacatttcaaaagtgagttcttttgactgcttttgcgcaacggcagccgaggatttttgaaaaacctttgtagttcaccataaaattttttgcaaaatttttttttgaatttctcaggggaggaggtgggtgggctgatacgaggggaaaaggctgtgtgtgagaaatgaagtgcacccgtcatgcgcggtcaaaattaatcatttaacaaatgcctaggccttcgcaatttcctcatgttgaatggcgttgctgtgagtcagtccgttggtgatttgttctccgtgccaactttcaaaaatgccgttgccgaaatgaccaaacaattgcctcacgatttgaagacacacaccggcatctgtgagtggtttttgggtcttattattgcaattgttaacatttaagttctgcaacatttcgtacaatcattaacaattgcacaaaaaaaatgcatctatgggtctaccggtacgatgaaaaaagactgatgaggaagctaattgtctaattattcgtttagtcttcattcattggatagcgtttaaagatgcaaattcccacgaagcattctttactcgccctggacagcccgctgatgtttgtgaatatttgggggaattctttactcgccctggacagcccgctgatggtcgtgaacatttggacggaaaaatgagaagcgccaagattaaactgtttaactatgcttacgtatttggcaatcctggtgctctacagtttcacattgaaagtgcgtaacttttgctttacttcccaaaaaactgatttcccagggttttttttttgtacaaacattactgttaagcactttggaagtgttttggtaaaggcgaaacagtgaagcgctcggacggtcttcagggcggatcaccaatgagctatcccatcttcatgaaggcgtttgagcaattaatcaccgacaaatgcacatcaaaagaaattgccgactcgttcgccagctgtaatttattatatgccaaaaacacccttaatcacatttagttgtggagtcattcattgattccttaatcgatcaaagtcgtttgttcaattcggtgtctgtgaatctatccgttgctggtaacgagggactgctcaccggtccgtcgtcatcgaattcgtccagcattgatgcacagcagaaggcatcgtccgttggtccgtcattcagttcgcccgttgttgatgaacaacagcagcagaaggactcgtctggtgtatcgtcggcacaacagcatggacaaagttggcaaatgcatcgaaatttccaatgattttcaacttttgttttcagagcgagccaacactactgatcagtgccagcatcctccgaagaaagaaagaggcggaaacaaataaagcggaaaggcggcaaatgaaggaaggaaattttgttggatttggagaaatttgtcattggaggcactttttgttgagttttaaatggacaacgaaacggcgtattttgttatttttggaaaatgttcagttatttatgttcttttaccaatatgcataaagacaatatttatgaagacatttgtaatcgcagattctcatgcaaaaaaaaacaaagtgcaaatgcccgctgcagtgggtgtggcgaggcgaaattggtcagtctcatcgattagcgcgctaattacccccatgaataagtgcactcagtcgcttgacagtgggcgtcagccgaggcggtccagaggggagggggggggggagtatttggatggcatttgaggggcatactgtagtcatgggctaattgtaagtttatcctttttttaattttaaatgttgtcctcttaaaatgaatgtgtacatttgcaggattttgtcggaatgcgttcaaacggtcaaatgctgaaggtgtgctgcagggagtgggaaaacattattaaaaattaaataattttggcacaccattccttccgatcactgtttttgttttatgtattgtcttattttggttgtacagagagtgagagaaaatgaagggagagatagagagagagagagtcaaggttaaaggagagacagtacgggaga

SEQ ID NO: 16216 - DNA, 3454 bp, Heterodera glycines
aaattatacattttaaatgcaattaaatattttcaattaaattattattttaattaaatttagttgaaccgtgagcctcgtcttgcgcagcccattcagctgttgacccgtctccatgttcatgtgttaaaccccgtggacgcaatgcgctcttttctggacgaaggtgacaaaacaaataaataaacaatttcactaatttattaattgaaaaatgttattaaatttttactaattaatttattaaattcaaaatatgatttttgcttttaatttataaaattattgaatttgaatttttgaattttatttttcacttacctaacgcttttaaattttattctttattatattttcaatattttaaactttctaacaaagttctttcattactatacatttgtatgcatttttctttatttaaaatattaattatgaagtattaaatttaaatttttaaattatttccggcgttttgtgttttccctacggcgctttgttggaccgcgcgttggccatgcttggccgtattgaagacattgtgattagttccgccgaacagatcaattacgacgaggtgagctcacaattagtagtagacaattactttttaaattattatttattttaaaaatttatttttaattatttcatttatttacattttaggccagcgatcagcttgatcaactgcaggatttggcacgccgtgccaatgttcactatcgccaagtggtggagccggaggcggaaaagcgcatgagcgaggtgccatagcaaaatttttaaaaaattccaaatttcgaaaattttaaaaccgtaaatctgtggcttttcagatgtacaggctgtcggcacagcagcgtctgcaacggttggactcatttctggtggagagcagcatgagccgagtggaaagagtagggcacagagaataataaattattattatttttttttaatggcatcaattttaaataattaatttcaaaatattgtccataccacttcaatttgtcttgttggttagcccttttcgcgaatgaattaattatttttgatattttgaaattagaaaaaacggacattcgacaaaaatgccatttacaaaatatgggactgtcgagagaaaaatgaatgccatttgtcgccaagttcctaacttttttggcactcattaaattttaattgctttttgaaagtgctttattatccaattaggagttgaagaaggtacatattttcattggccagggattttcaaatttttggcactcatttaaattttactgcgttttaaaatggcctttttcacccaattaggagtcggagaaggcgcacaatttcattgcttgggatctcggctttttttttgcactcattaaatttttcaatgccctttaaatgccatatttaatcacccaattaggagtcggagaaggcgcgcaatgacatgcgctgggagttggagcagttgaaggaccaaaatgcgcagctgaaaaaggagaaccgggagctgaagcatttgtgcgtccgcttggacggccgcgttgacgttttggagcggaagttcaaaacaatggcacggctgctgcaataatgactggatttgacgaagaaaaatgtgtggcacaatttgatcagttaaaattgttcgttggcgggccgatcaatcaatcgatcgatcgattgtttgtgcccgatcaaagtttttgatttttgacactgtttttttcttgataaataatattacactattttaaaaacatatagtacattttgacacaaaatgataaggccactctcgatttttgagcagtattttgaatgttccaccggcgaaagttgaaattgtgcaaagcagcaatacagaatgccaaaagaaaaaaataaaaagaaaaaaacaaagagaaatattttcactcttggtatgcaacagggatggtacggcatatttccgacatttttgagctcggaatcttctgaattccggctgggccgtccgaatttcgattgacaataaccaaaatttttgagcagttgaaattccgataatttgaatttcgattgcccaaattttttgagggagtcggctgtcagccataaaatttttcataaaatcagttacataaaatgataaataagttcattttcaaaaatcataaaatcggaaaaagtcgccccaaaaatttgaaataattcatgtaagcctaaatttttaagcttatcaaaaaagtcttttacgccaaccaaactgatcagaaatcactgcttcatcgtggtctgaaagcccgaaaatcgcttttcaaattcgattttcaaacaaagacgcattagcggagaattgtcgttgagccatttccaaaggccattttgtagaggattatgtgctctttaaatggatttattctgcggaaattttttttttaatcccctagaaattttcttcgaaaattttcctgattttcaggttttcagaccatgatgaagaggtgaaaatttcggttattattattattttttgtctcgactttcggcattaattaatctcggcctcgagtgtctctctctgtattcaatctcgattctcggctcgagaatatgatattcctgagatcagtagcacaaatttcacagatttcacaaaatttctcacccgaaccccttaaaaaacacataaattggcttcaatttcttaaaattcgaaattttttttgaattttcatctcatcaatttttcattcatcaatttcattttcgatataatcgcataaatctgtatgtaagtgaagataattatctcttttttttgttccagaaattaattaaataataaactacaaattactaatgtcgttcactaaaacaatgtgacattgacttatgaatgggacaaaataacataagtattatttaaaaatatttaaattaaaataagaataaatatttttaaatttttatagacaaaataaaagtaattaggtaattaagaaatatttattttaaatttatattaattctgaagcatttaatataaattgaaataataattttttttttttgaaaaattttatttggtaaacattaatttaaattaattaattttatttttaattctattttgtacttttaattaagaaagattaaattaaattaaaataattgtttttttaatattttttatggacaaaaaataaataattaataaaaatatttaatttaaattaattaattaaatttttatttttatttttttgaaatttattttgtacttttgcactttttattttaaattgatggaagatttaatggcattagttattgctaaaaacatgttctagatactacaagaatcataaacaaaaattaatgcctggaataaatatgtatttattacatgctggaatgccgaaaacgccttaaaatgccgttctcggtgggattgactttcgcg

SEQ ID NO: 16217 - DNA, 2992 bp, Heterodera glycines
aattaaatataaatgcttttaattaatttatttattttgtttttcattttacttgctctttgctcaaattttgcaccaatttttcccatgtgtccgattttcgttgttcgttctgtccatacatttcgcgcacctttcaaatcaacgagtgaacaattgtccattttgcccatttgctcctcacattttccttcgtcagataaaggccatcaaattcgcgtttgtatcgtttctccacttttttggcaatctcatcatcagtgccgtacccatcatcagcagaggacaacaaatgctgagaattgtaaatcattgctaattctggtgaaaattatttcctttaattggaggaggtttcagccaaatggacgacttaagttatatccaaaaattgtaattaataaaaagctaaatagaattacaaaacaagctaaaggtttgctaggggagatgagctagttggggaattcaaaataaatgatagttctggggcattggaaatgaaatgttcttttttcaaggacgtcttttggaaggacatgctgctataggaatataaaaacttccttttcaaggacataaaagatctgaggtgagactgtgagcaatcaaaataataaatttataaaaatattttaaaatttaagtcaatgaattgtttttgcattattcttccatccaccttcactgtgtccacttgctcgttgacccccgatgcttccatgatcagattaagccattcgttttggtctcggtccactaaatggaccccctccttcatcaaatttggcaaactcatttgcctttcaaggccatgcccttttgtgtgcaggctgaacagtgatggggacagaaaattagcctaaaacaagaaaaataaaaataaaaattttctatttttgaattatatatagataggtataatataacattccaatagtttttcaggaatttgggtgaaagggggcctcctgctgggcagcaggagatcaactcagtcccatcaacccgaactagctgagtacagtgtcttaaaccgtttgggactgagttggccggggacgtgttgtcgcgtttcgtccctgtcccgccccctctgatccgcgtggagctgatcaatgagcaattctgccaaaattcggcacctttcccctcgacttgctggccgtgacgctcataaaccgtggcgataaaacgtcaaccaatcggcccgcttccattgcttttgctctcgccgcttctccgccctttgccctccgttcgccgcttttaccgtattcctcgctctgttccctaccgtactcctccccctccatttcttcgtcataatttgccatttcatttctttttccttcgttgaattcgtccgattttgaatgttcgattgactttgactttctttccaactccgccaatcgcatgccgactttgatgccgtcattgaccaatttggcaatttgcgcttccaatttgcccactttgctaccgtaagccgttgtttcatcggccgaattcattttcagcagtgtttttttgtcatattttttatttgttgcaattgccgattttatgggctgaataaagcaaaagttattattcttttaataacaacaaattaccatttctttaagcgcataatccttccattttttttcttctcttttcaactgattgtgcgccttttttgccttttgtatttttgaaattgtttcttgccaacttaaaataataattttaatttgttttattatttactatattaatttgaattatagtattccttttacggtattgtccgtgttttgttcttccttcccaatatgccgctcatcaaaaagcgtgccaatcctccaatgggactgaggccaagtgttcgttttgcctccagcaaattgtatgaatgacttttcgaaattgcaatatttttgcgttttcttgccaaaaagtctttgtctaaatgccgttggtctctggcaaaaactgcttcccttttccgcactttggcaacttcaaattttggctttgcgctgtaataatcggttttacttgtacctaaataatgccggaaattaaaaaagaaaaagctctcaattggaagtgattaattaacaggcacagaattcgctcaatttttggcactttttaggttaattatatagtcaaaaaatcccatacccctaattatacaatgatacattattaaatttgcgaaaatttcatttaaggaaattcattcccattattcggcattttatttaccattaacagtttctttttctactgctgaattgctttcgtgtcctttttctgcctttttcttctgatgttccgtttgtccgttttcttcggcactttcgctttcgattcgaatttgtcccacccaattttcgcttttcaccaaatttttggtgccagcaacaattttgccatttttgagctcaatttcgaattcgttgttcaacagccgaacgatgcatttggccatccgtggcactgtctgtgcgccaaaataacattcgttgaatttgtccggcaccacgtctaattggtctttgttggaatgcctttaaaatatatttttaaagatttactaattaaattccatttaaagagcacaaataacagaaacgaacttttcttgcaaaaatactgacagaacagaggcaaatgcttgggttgtccaatgttcgtaaatctaaacacacacaaaaattaatttaatcaatttaaataattaaaaaaagtattaaatttatttacccgatatccctcctccgtggtcatttgaattgtggtgactttgggagaagaatgaagctgtacagcggagactgaagctgatgaagaagtaagcaaaacgagaaaagcgaatgccaacattgacagacaaataaaataataatttaatcttaaaataatcgcttattaatttcaaaaggaaataattcaaatctctaaattttttcttcatttaattacatttgacagatta

SEQ ID NO: 16218 - DNA, 2276 bp, Heterodera glycines
  unsure (1)..(2276): unsure at all n locations
ttttgaattttcatctcatcaatttttcatcatcaaattcattnttcgatataatcgcataaatctgtatgtaagtgaagataattatctctttttttgttccagaaaattaattaaataatagactacaaattactaatgtcgttcactaaaacaatgtgacattgacttatgaatgggacaaaataacataagtaattaattaaaaaatatttaaattaaaattagaataaatatttttaaatttttatagacaaaataaaagtaattacctaattaagaaatatttattttaaatttaatattaattctgaagcatttaatataaattgaaataataattttttttttgaaaaattttatttggtaaacattaatttaaattaattaatttaatttttaattctattttgtacttttaattaagaaagattaaattaaattaaaataattgtttttttttaatattttttattgacaaaaaataaataattaataaaaatatttaatttaaattaattaattaaatttttatttttatttttttgaaatttattttgtacttttgcactttttattttaaattgatggaagatttaatggcattagttattgctaaaaacatgttctagatactacaagaatcataaacaaaaattaatgcctggaataaatatgtatttattaaatcctggaatgccgaaaacgccttaaaatgccgttctcggcgggattgactttcgcgtcaaaggatgccaaaaatgtatttagtgaaaaggaaggcattaaggcttatttttccgtgtcaacatttcggttcagcattattttctgtgccattcccacaaaaaaattaatcaaaacaacaaaaaaacagtttcaatttgaataaataattttcattttcgcccagagatttttttattttcaatttttgaaatttagcatttttaaaaataattcttgaaaaatttgcattcaaaaacattggctaaataaattttacgagtcaatgaactcaaaaaaagtgcccaaaattgattgagaattataaattaaaatccgagaaatttcgaaattttccgaatctaggaaaggtattccatagaataaatatttaacaaaaattttaaaaaacccactgccacaagagttaagttaactctcgcccatcgctccccccccccccccccgctcgtggatagctcagtggcttcgtttttggaaactgggttttgtggcctggttcaatgctcacccgggcgccggccggtctctttcgtttatttccctttcctttttccccatctttgcccacaaattgttgcaatatttgttggttgtggcgttgtgtttgtgtgtatagttgcgcgaaatgtgtgcaacagaaacagcaaagtttccttttttggcgtaccgcacttttttttttgttgctttgatcaaatcgcctaatactaatgatgatgatgatgatgatgctggcggttaatgatgatgaccacacagcaaccgaccaatttgaccatccttttggggaagggaatggatgctcatcacccatccgtcccccgccccccaattttccccaaaatctctcccctcccaaaaatggaatggagtggggctccgctcgcaaccccccgcctcgccgaaggggggtggtccttggagaaatttttggttgggttgtagtgggaaatccggttttttcttccccgctttttttgttgttggactatgatttggcttggctctccgcccggggcgggcgcgattttcggcggttgctgcgcaatcgccatgcgcttttgcgcacaccaatccgcacccttatgctgctgctggtgatgaacaaacttccggattgcgctttgcgccctcattggggaggaggactaaggcgcggagcgcccaaaaaattggacaaacgacgaacgaaaaggacgaaaaatgaccaaaatggcgacgcgcactttcgtccgtccgtcgtcgtcgttttgtcgcccgtcccctcgggggccccgctttctctctcccttattcgaccatgggaagcataaggagttctccgattagcagcaccaaatgtgtgtgctttcatacatattttgcccaattacagcagcccatgtgcatgaaaaagcacatattttcatcagcaaaaaaaattgggttccgtttttttacatttttttttaaattttgctattttttgatggattatattatttgaaaaaggccgatcaaatgattggcctaatttgatgttcatc

SEQ ID NO: 16219 - DNA, 1507 bp, Heterodera glycines
  unsure (1)..(1507): unsure at all n locations
cggcgttggtgtggcgttgtgtggtggtgggagaaagatgactgacgtgcaaattttcctgccccgtcnccctgaggggacaaaaaaaaatcnggttttggtgcgattgtgtttggcattctgtcagccgccgccgctttccctgcccccacccctcgggggatgaaccgcgcgactgtgcgtccgtaaatgcaaaattgcaccagccaacgacgacgacgacgaagaggaagaccacgatggtgctgctgctgctgctgctgctgctgctgctgctactccgaccgatcagatcatcggatcatgggcggatctgggcctgtgggtgtggtggaatgagggtgaaagtggaagaaagagaagcggaagggagaagccggttcatggagagaaaggaagcagcgggagaagcggaggcttttgcatgaaaagcatgcgcgagagaaaggggggggggagagagagaaaggaagaaagagagaaatcagagagagaagatggctggcagagtaatcagagaaagcattggaggggaatctcatggatagggaaaagatagagagtggattgaaagagcgagaggcatgcatacagctagagaaaaatggatgatttaaagaagtcagaaaggagcgaaagagagtgagaaagagagagagagagagagactagcagagaaaaatgtgatcaaacgattggaattcactttcagattcaatcatccaaatttgatgggttttggtgcccctccaaaatgatatctgatcactttaattatgctaaaaattccaatttactaaaaaatttcaaatggcaaatcgatcaatcccccgcccccgcattatccaaacgcaaatctgcgactgactgatttaagtaaatccatccccgctgctcgccctcctactccgtcctccgtattcgtcgtgtgtcctccctccctcaaactgcccctccccttcccccccgtccccgttgtccccgtccccgcgcgcgcgacagccctgacccaatttggggggggggggggaattagtgctctgactgctggttggaagtggtggttgtcgagttggaattggtggtggtgtactgctccgctggtggaagaggtcgtcgtcatccgtccgtcttccaattccccgccgtccccgccaaaagcgcatttccccgcccgctttctccccgaaattgcgcatgtttaatccgccccaataacaccgatcatagctggcgcccccgcccccccggactcggcataacttgcaaaaactggcgactgatcactctgatcatcaggcatgcctgatcggataaaatgccggttccccgctttctttttagtgcccgaaattgcttttttaaaggtcaccgcttctatgaacacattaatcccgcttcggcggttcgtcccaatttgtagcaaaggatcaatgatcactaataaaccatcgatttnctccagtgtggtgctgtccccgcctcctcctccattccccgcttttta

SEQ ID NO: 16220 - DNA, 1501 bp, Heterodera glycines
aatcaaatacttgctcaacatcatcatcaccatttatctgtccatgtggaaaatcgcaaagcgttttccagccttcataatgctcagtgctatctcttataaagctttagcataagctacttcttttctaaaattcctgctaaaatcttcagacaatgagtctttaaacatattccaaagctcttccggtttggccgggcaatggactaaaatcaatgcaaaaaactctctcaatttccatggcatctcaaaactctctgcttcttctaatgctcttttccactcttcatcatttctaatcaaacctctttctaaacatgcggctgaaaaagtttcacaaacttttgcattgccattagtatcaaaaactgatttcaaatcatcataggagcatgctcccttcacatttaacaacaacagcctcaggtggtatcgttccggctcagccggtgacaccttcaccattcggccaattgtgttaaaatatgtctttctctctgtccattttcctttcttaaaacaaaacttttcaggtatctggtgataaaacaaattttttgccaaaacatttgtcttattcaattcaaaatatgccatcaactcagaaccattcgcaattctttcacgaatctcttcttcttccatattctcgtcaaaataacaaatatgttcaccttgtaggtgtacaggcaaagacataatacaatggcttctatcatacataggcaattcaaaaattctccaaactgcttcttgtgggcaaacataccgcgcatcaataaactctttaacttcatcatgatcatttttctcttctaattccaatcttgctctgtctggtggcttatgcacatacttatgcaaatactttactgaactaacactattaaccttttcaagattaatgtggcacttgaacattttcaacaggtacaggttgtgcgggacaacccatctgttgtctaattcatgtcttcttccatttgcaaatacttgaactgttcttccatcatttggtcttgcatacaaagccaatccattttcaagaacaactgtctcttcttgaaatactttagggtatcccttagagcatttccttcctttcataccatttttgtcaacaaactcttccatgcatgggcaatttgggttcaaattaccacatgggccatggatcataaaccttttcaccaaatcaaacagttctgcttctaattccttgtccggtattctcgcactaattcctttcttttcaacatcttcaccattaatcaatttgtcttgctccgccaatgtcaaaagcaaatggaagtgcggtagtccccgtccttggttctctaccggatacatccatgcaatcacttctcgaaaaacctttttattgactatctcattcataatagctttaacttttaaattaaaaactctgacaaccaaatctggtctatcacttgactttaatcatgaaacaaattctctgaaatctcttccccattgcggg

SEQ ID NO: 16221 - DNA, 3624 bp, Heterodera glycines
  unsure (1)..(3624): unsure at all n locations
atagctttataattaagaaaactctgaggagttaatatattttgnnaactntggtcttatctttatctcttgtcacagaaccaccgtctgctcctgtctatctcatagcacaagagcttgccaatggactgataggagctaaaattgattttgacaacagctttccgcactttgttctgctcccaaatcgtttattgtcaagtggtcttggtctgggtgacttctttactcctggtaaattggaagccgacaacagatttaccatcctggcttcaaacgtcacggagatgacaaaggagaggaaactttggattaatccaaattcctcaattttggcggtccaagcgaccgtaattgacatcaaaagtaaatatctaagtctaagattctgaaaatttatatatattttaccatagaaatgtggcaatctgaacaaatcactgagattggcacaattgtcgaaatcaatgaacgctttacacccaccgaggtcattccaaaatatgtgatgactacttcgggatcagcgtcttgcccaacaaaggtcatacgacgtcaagcaaattttccgcttgaacacttcagaagagatcatcaagtcaatgttgttctcaaaagtgttcagctctcatctggaattaaaattcacccatcctttattttgcccggaaattcacctttccgatggcaccctgacatcattcgtcccaatggttcatttgttatttctcgcatttatatttgatggtttaaaataagctctgcggagctactctacatatatatatattcacacaaatttgtctaagctctgcggagctgattaaattaaataaacacaaaaaaaaaacacaacaagtgagaaatgattattaaagggaaaagttcaatacataaattaaaaaaaaaataataataataataataatatttaaattaaataaatgaatgtagtattggtatatgaatcccgtgggatttaagttcttggatcagggacgatcctcagatatgaaggggaggtatagtcatacagtcacaccaaattatatcaaaaatccaaattttagtcgattggaaattaaatgaaacaattattaaatttatataattttaaaagttttaaatttcatcagattttctcttgtctcataatttgaaaagcaatgccaatttaattcaaatccaattgaatcagaatttcaagaaaattaatttaaaaagggcggatttcttttagtagctcaatgacagagcttctgtggattggttggaggaatgggttcattcccattagaggttcggcattttccatttttattttgagtaattaaataaatatttaaattattttattttcagttttggcttaaaatcaaaacaaatttctcatcgtaaaacaaatcaaaagaaagaaaaagtctgaggacttcattcaaatttggaaattatttaaattttaacgaccagggacggtcttttggagggccggaggtgtaaggccgggaccggaaatggcctttacccttctcccccccccccccattttatctctccgatagggctcctcccatcccgaggggcgcttaaaaggcaacggataaccagccaaaggggacagtcggagttcagtcgggagtcattcagtggaatggctaatcgatccccgcctgggaggtacccccaggcatccatcaacatcccttcccttccaagccctgcggggcctaattacggacgcgtaagagggctcctctggactatttccctcataagcactgggtatgggacatcacggctttactcaaattaaaaaacccaaattaatttacatttttagctcgcaatgaaattgttttataaaaaagttttgagatataatgacgtcaaaaggtgcaagctcatttaatttttgagtaacaacaatttttagttttttaaatatggaacaacgatcacagaccatttgtggaaggataagagccttaagaatgtatacatttggaattgagctaggcattgatgacttagctaactttgttgcgcacacaactcccccagcccaggtagacatcaaagtgttagtatatctcaaattgaaattggcttaatttttaaaattggcaaatttgacctcattcagctccgttcaactttggctttggcatttttcgacccgacgaggcaaaataaaatggccgagtttactttcgcccaaattttggctgtcactcattcgaagtgaattttgtgaaaataaatatttaagtataatgtaaatttagctccaaaagtgccgccggtgctcagagcgtttctctccaattgctcaacgtcgaccgtttcattttccaatcgccacgttccgccgaattagcccttctgatcaaccaaatgctgcatcatttacgccagaaatcgctgtacgccattgcgttgcaaaattcatgtcccgaaaacggtaattaccatattttacgaagtgcgaaagtctcccgcttgtggtttcgtgtcagtgtctttggccatttccccgctgacaatgaccgcccacggggacaaattggccatcgttgagccaaccggcggagtaattgtggactcggaggacgactacgaacatcgggtaaacgaagagttgcctcggaatatgcattcttaatgacaattttcatccctttttattactttgatttcacatttcgaattgctttcttttttaattaatctttttcaggtttcggtctccgtttacactgtcaatgcgttgtccggcgactgttgcgctccgtcgttggattggacttgtccaattccgttgtcgcccttctcccgcctctgttggctgaattttacagccgttggaaagtaaaatataaaatttaaaaatatcaatcttttattccttttcagtttggcaacaatggacgaaggtatcaaacaaaccaaccagtccttgtttttctgttcatgtggtcttaagaatgcactgtccgtctccatttacccggccctaatggtggcgtcggtctttggcttccggtgatttatggttctgaactgctccgtgagcctgaagccgactttctgtggcccattgctctgacggaagtgccacaaccccaatttcgacatatttattgccgtagctcaaaattccctaccttcggcaccaaatctgtaccggaaactgttccatggacgatgcctttgctaaatatggtggaaattgggccggatatttaattttctctcgatttattattttaatatttttaaggattccgaacgtggcaaattggagaatgaactgatgctaaacgaaatccaacaaattgtggttaggcattcagcagacgacaatggcactttggcgttgaacgctgtacagtcgcgtcaaattgcacaacttacccaagattacatgtccaacctgctcaaattgttttccgtttcgtgccaagtccgtgggaagggcacaaaaaatcccaaaatttaataacatttgaagttgaaccgtgagggacgggccaccgaaattgctcgtcgggacacaaatttcaagctgatacaagcgatgtgaatatacgcgtacaaagcacggcgacccgggctcagtgaaaa

SEQ ID NO: 16222 - DNA, 2909 bp, Heterodera glycines
  unsure (1)..(2909): unsure at all n locations
ataattagggttataagttgtatgcactaaaaaatgcctaatatgcgcataaaatatgcactaaaaatcccccaaatatgccctaaaaacccgaaaaatacccaaatatgccttaaaaattatccaaaatggcttttaaaccctcaaaaaaatgccaaaattgtgtaaaaatacagaattgactttaaaaactacaaaacaatggccaaggagcttttttagacaattgcaaaaaattttgaatttcaaaattttatgcaatttcgaattttttaaatttttatcatatgataaaacaaaattacatttttcttatatcaacaatttttttttcaaaagttcttacaaaaaattcaaaatttttcgatttttaagggtatattttttaaattcccaaaaagatcgatccttaggggtgtatttttcatttttattgcatttttcttattaaaatttgccaaaaatgaccgaaatatgctctaaaaattcaaaaatggtaaaatatgcatttattctcgaaaacccccaaaatatgcttttatatgcactaaaaaccttcaccaaatcgaaaacgcagaaatgcaatttttgagcccctttcttaatagcatatgcgcagaaaaaatatgcaaaatcatacaatttataaccctaatgataattaatatagggctgccaaaaatatgtacataaatatgtaaaaaaaaatcccgaaatatgtacaaaacaatccaaatatgtactaaatatgtaaataaaattttaaaatggttttttttaattccccgtaaaggatgaaatatgcagaaaatgccataaaaatgactttaaataggcttataatcaccttttagtttttaaaaattactttttggtattttacaacggtgtgtacattttataaattattttttcactaaattctccaaatatattaaaaatgaaaatatgtacaaaaaattttccgaaatattggattttttgaggatttccaaaaatttccgtaaaaaatcctcaaaatatgtaaaaaaaaataaaataaaatatataagaaaaaagtccaaaatatgtacccaatatgtaagaaaatcccgaaatatgtaaatatgtataaaaacgccgaaaaattaaaagtcaagattcttgttcgcaaacagaaaaataaagcgtttttcctactatttgagcatggagaagccaggaaaatatctatttacataaaattggcagccctaataattaagcatttatgtaatttcagcatcaaaaaattctaaattaaattcgaaaaaagcatgaaatagcaaaacaagcacaaaaattgaaaaaaaggtataaaaatttagtcatttttaggcaaaatttttttatcagttaacattanattcttaattttctttttcccactanagattcaaatattttcttttagcaaaaatggcatttttaaataaaaaatgttgtcaagaaagtggatgaatttttgagagtaaattttgcatttcttaggggatgtattttttgaaaattttaatcgatgttagggttttgtcttagggtagtgctggtagacggtgttttcgtcaatattttacaaaaaatgtcataagcactaaatgctaaaaatcacatgctcagcattaagcacaaaaatacgaatttaaacaaaaataagcatgaaaaagttggacctaaaagcctaaaaccaagttagaaattagttttcatgcttattagcacgccccaagttagcaaaaaatttagtgattgctgcaaagccggtcttattgttcgtcataactagagaccgacttttgaggcatatgccttttttctgctcattagttccggtatattacgcataaaaaatacattttgcttttggtttgaagcttctacattgacttttattatgcctttttttgtctttttcgggattttcatgtatttaatgcctttttggcattttgccgttttggtgtctttttagcgttttttccaaaaaatccattaaaatgcaataaaatcgggaaaatacactcctaagaaatgaaaaattttctcaaaaattgattaccaaattatttttttcttgttaaaaaattttaggtttaattattccttattcgaaaaacattttcaagcctagtatagtgcctttttcacgatttttactgaacctgcccgttgtgcaacaataacccgttgctgtgcatcattcgcaaccacaaaacaccgccccattctcagttgcacaacaatcgcaaccacaaccatttgcccctgttcaggacccaagtattcgtcagcatctggttcagatacttcagcaacaacaaacgcagcaacaccaattccaactgtcgccacctttgcagcgtgtcaacaaccccgggctaagcattaatccagtccgaatgataacatcaggtcaattgatagccaatcgtcaacaaagtcaagcgcagttacaacaacagcaacaagaacatttgttgatggattcgccaccagcggcacgttcgtccagcctacaccaacggattatacaacatatgcagcaacaacagctaccgcagctagccgctagactcccgacaatatcagttgaatagaaaatatttacgaaaaataaaaatcccgagtacggaaatgtgaagcccaatagagatgaatttaaaaaagtgctataataacagcccaaaaatgtatttttttcactatatttccctaaatatgaaaaccttccctatcaataaaaaaaacttacaaatcattgtattttaaacgactcctgtttccctctagtataaatatttaatggatatttcataaatatttttttattaaaaaatcggttttaactatttatttgttttgtttttaaatatcatgctttgttaaatttt

SEQ ID NO: 16223 - DNA, 1122 bp, Heterodera glycines
cgagagttgaaaaaggcaaaaagtaatgttggttgcattggtaatttattcaaatagggataaatcgtttttaaaaaagtttaatagccgtcagggctttcgcttttcgcaaattttgtactctcgcgttcgcatttaggcatgaaatgcgatattacacactaagaatgagggatgaaattcccctaaaattttcaaatttggccaacaaattggcaattttcactgaaaaccttattaaaaatgggcaaaatttccaatttttcaccgatggcgtctaacggcaccgcaggaccccaaaaactcatatttttttttaccaaaatggcaaaatttggtaatttttggcggaaatctgttaaccaattgatttattttcatttcgcttttttgcttgcgcaaattacgctttttgcattttatttttcgatttggcccatccctacataaaagatgcaccaatttatgtttttaacttttattcattataagttttttttattttattttttaaaattgattcactaataaaaaaaattttactgttagaattaattgagaacagaaaatcccaataaaaacatatataaactttataattgaagtacataagtaataaataagatttgtatgattaagagacatacgttatagaacaagttttttttaaaaaacaaactttattgtcgaaatcaatcactgtcgagatcaccactgtcgaaaactaacagcaccatttatcatgcttattttgccaaaataagtataaaaaaggtgaaaactaagaatagaatgccaaaaaaaagacttaatactctttgaaaaatttcttgagtaggcgattgggtcggcggtgccgataaacgtcgctgtcgaaaaagttatctcagacagtatttggcataaggtaacattaaattctcaaaaaaagaagaccgcgggataccgctcaaaacccaaatttgcagaccccgctgctggattgagattcaaaatttttgagggacgagattccgcaggataaatccagcagttgcgtaaacctcgcaaatcccgcattgcacaaaaatgcgaattgcagtgtgtcgcgaaaatctcgcgcggggtcccattccacgccgg

SEQ ID NO: 16224 - DNA, 1013 bp, Heterodera glycines
cgataccagttagatttttgccgttttttttgtccgcaacttattttttcgcaatagttgaatcaggaaaaattgtgcgcaacaatccgtcagatgacaaacagtccaccgagcgaaaagattggcaatgttgtgcagtgtgatacgcgatagtgcctattaattagaaaaattttgatcagaataagcctgttaaccttcggcagccagaactttacggtcttcagttgatggggccgaagtatttggcaaaaattcctgcaatggaattgatcggtttgctgcttttgccgctttctgatgttttccagttttttgatgatgagaaatggcagctttcccaatggaaagtaggttaatatcatcgttgcagacgacacaaagggcaaattcttcgccttttcgacttttctttatgtgccggaattctttttcgtagctctccaaatagatatttttacgttttgggggcattttggcatttaacatttacgaattacactcacgaaaataaattaaaatgtaattttttacaaaaacgaattaattcaaatattcgcttcaaaaaaatgatatgtaattcaaaaaattattcaatttttgcatttttattttcaaatcaaagaataagcacaaaacaaaggaggtcaatccgaggtgtccgtttccttcacttttacctacataccttatttttctgtatttttttttgatgtttattaaatatttacatactacataataaatggggtcggggtcgttttcgcgtggggcgagtttttgaacttaacttttttctttgtcaaccaaatccaataatcttggtatcattcgatagccctaagtgttctctattagcctacaaaatttggaaaaattttgttaaggttcaaaaaagacgcgaaacggcccacgcgaaaacggcctggcccgagtaaatgagtttcgatttaaatgaattaatttttattaaaattttaaaaagaattttttcaaaaaaataaaaatccatt

SEQ ID NO: 16225 - DNA, 2087 bp, Heterodera glycines
ggtttcaagccattttagggttttcatatcaccccgaaggagtgatctgatcactgtggtgcaatggactttttttatcagcatcaaaagttatactggtgtgaattttttcagattttttcttgccctataaaaaagttacatgtcttcaatttttgaagctataattttggaacagcaaatttggggaaatttttggataaaaaattcataaaaaaatttttcttttactctttccgatttttttttgtgattcttaatattttcatctttttcgtatacgaaaacgaaacgaaaaagtgcattcgatacgaaaacgaaacacgaaacgaaaaaaaatattttgaaaaccgaaaacgaaacacgaaacgaaaaaattttgacggacgaaaacgaaacacgaaaacgaaaaaataaccattttcgtacgaaacgaaacgaaaaaaccgaaaattttttaaacttatttcaatcataattaagaaacataaaatttaaaattgtatcctctaactgaaggaatgaagatcctagtaggtggaaaagctaatgtggctctaggacaggggtgtgaccaaacaatttttaaaataaagaacatcaatgacaaaataaggtttagggtcaaaaaagacaatcttgcaaaattggttcgaatcagttaatatataattttttcgataaaaaatgtattaaaatgttatgtttttcacatcctatttggattttaacaatttttggggaagaaattagcaactgctgaaaaaaaaagattttcaaacgttttttttgcagtgtattttttttttacaagttgatgaatgggaagtgggtccggcggcgccgataggcgacgccgggaaaatttttgaaaatttgagtgctattttatagcagattttcaattaaaatcggtaaaaacatgattaaaaaatcggtaaaataaagtgcggtcatgcgggatcgaacattaatgcacagcacaaagcaaacctgctgttttcaccactaaactaaaatacttaaataataaaacttattatttctttccaaaaaagtcattcttaagggtgtaaatattttcgtctttttcgtaaaatattgctctgacgaaaacgaaaacgaaacgaaaatcctaaattttaaaaaccgaaaacgaaacacgaaacgaaaaataaaattttgaaaaccgaaaccgaaaacgaaacgaaaaaactttagcggacgaaaacgaaacacgaaaacgaaactcaaaaagtgccgaaaatgtaggacgaaacgaaaacgacacgaaatttcgtccagccctggtgccaagggagatttacctttttaattcggttgtaccaccaaaatcagtccgtcccccgccgccattctgtggtgactgatagaatggaaacgccgcgctgcccgcctctcctcacattttttctcttctcttctcacttttcagtacccaattccatcgattgcatttttgatttaccattttcgttaccatccattttttcctctttcattcttttcaaacaaaaaatgtacccaaaattggtcgatcagattgcgggaggaattgccaaagcagtgcaaaaggccactgacagtcacgcctttcacgagttccccgattgcttatcattggcccacacggaccgactctccatcaaactgaacgctgctcacagtcaaatgtaacagtaatcattttttgagaggaaaaattagacgccgaggaaattttaaaaaaaaatatattttcgaattaaaaatgtgaaaaatgtaggcaaaaaaaaaatatttacataaatgctttagggactatccgtcagaaatttatttaaaaaaaagattattataaaatacataatgattaaaataatttgatatttataaaagtaataataactttttttttaaataaacataatttctataaaatggtaaatttaattaaatttttaaagaaatattgcaaaaaaaaactgcaactttttttaaatcaaacagattttatgtagcaaggaagtttatcattgagtaaaaaataaaatacatttggctgacggattgtcctccatcactga

SEQ ID NO: 16226 - DNA, 2388 bp, Heterodera glycines
ggatgtatgtcagagatggcattccgagacatcaaaaattttcggaagtcggaattcggagggccaaaatgtcgtaagtcggacaaaggaagtcggaaattcttgaaaaaaatataaatactaaattgaaaattcaaaacagaaataaaagtaaaatgatttcaaaaattattttcgctatttacaccactttttcgcggacgatcggcggtgccggtaggcgtcgccggaaaaattttgaaaattttaatgtaagcgttatttttgaaaaaattttaaaaaatttccgatttttatcagattttgtgagtcggaattacgacctgaaaatgtcggaactcggaattccgtgccatctctagtgtatgtattgaaaaagtaaaaaaaataaggcctaagaaactgacgattatatttattggatgcgtaaaaagagtagctaatcttcgatatttcatagagctttaaaaagcaccaagattttgttggattcaaactcaaaaagtcgcatataaccagttacaatttgtaggcgtccaccttttgccggttgcacatgttgcgccacgctttgcatcagtatgatgactagggcagcaacttttagtgaaaaaacttttttttgctcaattgttttgaagaaaggagctcaaaaaacgcatttctgcgttaaaattttttcatttggacgtcacttttcgtcactagaaatcactattttggcgacttcgtcactaaaatagttaaaaatcactattttggcgttttgtcactatttcgacattttttgggaaaatttctcaacaaaaatgcaataaaaacggaaaatacatccctaagaatcgaccccaaaatttcaaaaaaatacacccctaagaaacggtcgaaaatttttgaaaattcacacctaataaatgaaaaattttctcaaaaattcttcccgcaaattttttttttttcatgacaaaattttttatttaaaaaatgtcaatatttgctaagagaattttataaaggaaatgtacctcatttgtaactgcaatcagtgaataaaacattttttgctcaatttttggctgaaaattatgtcactattcgtcactatttcggactttttgtcactgtttcttcactattttgggatttttactcactattttagttaactatttcgggatttttcgtcactaaaagttgcggccctaataattagtgattaaatacaattagtgattaaatggccatcccaacttaaaattgcgccccttctttcccacttccccattttggcattttccattttatgaccaccttagttcggccacttctgtgatactatgcattgagtgaattgtcggcatggtttgttggggttgtggcattcgatcggttcccaaccgttcaccgcccaccgaatgttctgatgggcgatggtgggaaggatgggcatgggaatgtgaggaggtggacagagtgtggccaccaaaatggagcatggccaggaagacagaaaaggcaacagtaacagtcaatggtattgtaacattacatactgtagttgaacaaagactgactaatgagagcaaaattataagtagaaaaaacacaagggaaaagctgaaagagagaaggaaagagtgaaaaaaggataaaggaaaaggtgaaaagggtgccacaccttcgttgttatgtaaatacagacaaaaaagaaattaagtgggggaagaatccataaatatgcctccatccgcttactttgtctgttcgaatatctccccctccccccccccccccccgtttgctctcatcaaccgatgaattcccttgaggggtcaactccaataggggggggggggggaagattcggcattttctattccatggagaagaaaaaaagcaaaagtcctaaaatttgttgtaagagttggcagacggaagaaaaccatcgctcaattacaacgcaacgaaagaagagaagaaaacgaagagaaagaaagtgagagcgaaggaaagagagaaaaggaaaagccgagccgaatcaaaagggaaggcaaaagggagggaaaggcggcggatgagtaatgggcacaaagggatttgggggaagggacagacgaaagggaagggagtggaggaagacgaagccgacggaagaagatttggtccatcaaataaatttatttggcactcaccggtagagtttggtggcaaatcgaaccctggagaacatttcgcggtaataccctcaaatttggaacaacagagaataagagaagcgaagggaagggaagggaaggggaaatgtgagtaacaattcgagttaaagtaaggaaataaaagggcaaagaaacgaaatgcattttggcacctgcggagaggggggggggg

SEQ ID NO: 16227 - DNA, 1416 bp, Heterodera glycines
tagcgcaataaaaggttttctgttatgaatctttctctaatttatttataactgctaaaaaatgcggattcaattttaaatgcgaaaatagtgcacaaaaaggagtctgccttacgggggggcttgatagctttgtacatgataattaaaagcgaaaataattttcgtatattttttcacaatttatgtcaaaagataacaacaaattgataaaatgttgaaacgaaatggtgcgcaaaaagggagggatggttagatgaaaagaggaatttttaggatgggatgctcattatgtgatggagggggtgaagaacacacactccgtcttctacctctttctcttccccattcttccaccttttccgctcctcttcccgtttccctcttccttttgcacttccctattcgctctcctcttcctcttcccatttcctcttcctccttccccttcctcccacccttcttcttgccccattctctcattccattatgcatctttcgtccgtccgtccgccttcctcctcctcctcctccctttcactttcgccttccctttgacttttcaactcaaagcgattttcgcagttggaaatgcacgcctttatgaatgagacgaaaaagcagcataatttatttttattagatgaaattgttttctcttattttgtgaagagagcgagagaaatggagaagaaaggaagcggagaaagagaagtgaataaaatccaagtttagctaaagaaatgaataatggcatgtccaatgggaagaaagacgaaatgagtgggggggggggggagggggaaatgcaattgacagcggtgccaaaagaggaagaaacgaaggaatgccattggcaccagcagcggaaaagggagaatcgaaccgaaaaaggagggaagaaaggggagggaaagggaagaaagggaagaaaggggagggaaagggaagaaaggggagggaaagggaagaaaggggagggaaagggaagaaaggggagggaaagggaagaaaggggagggaaagggaagaaaggggagggaaagggaagaaaggggagggaaagggaagaaagggaagaaagggaagaaaggggagggaaagggaagaaaggggagggaaagggaagaaaggggagggaaagggaagaaagggaagaaaggggagggaaagggaagaaaggggagggaaagggaagaaagggaagaaaggggagggaaagggaagaaagggaagaaaggtgagggaaagggaagaaagcgaagaaaggggagggaaagggaagaaaggggagggaaagggaagaaaggggagggaaagggaagaaaggggaggggaggggaagaaaggggagggaaagggaagaaaggggaggggaggggaagaaaggggagggaaagggaagaaaggggaggg

SEQ ID NO: 16228 - DNA, 1137 bp, Heterodera glycines
ttgaagaggaatgcacgccgaactttgctacgccgaattgcttgtcattcgtgcacttttgacttttttcatcgacgaaactcttggcggcttcatcaaaggcgcctttcgcattcgaatgtgttaccaatcattcaagtcagcccctccggcagtgccattgccgcaatttaatcattgaataataattgtgatgactaattggcctttctcccccatttcctccagagaatgccatcgggtgctccgttcaattcctccgtgccatctttccgcttgtccctcttcaaatccgtcgctgcgacgtcagttcgaggccggcatccgtgccggcttcgggttgttcaacgtgatgctgtccgcaatgcccacccgtgtgtccgcactgctccaacttgtcggcttctccggcgatcgggcaaagtccaccaattcccaagagttccaatttccctttacaggactttgggatgtccgaactcgtttcggtctgtcctttctttcttcctttcgaatgcccctttctcccacagagtgcctcaatggcggacactctccgcgcgcccctcgcggcaatggttttgatcaggcgagtgcccgggttgcccatccttacttattctgttcctgatcagttaccaactcttcctggcccatctgctggacggatgtccgcccgatttggcgttgtgttcccaacttttggcacctttggtccgccaattccccaatgtccgtctccatttccaaattcgtttgtccattgtcctttttctcatttgtcagggtgccgttgtgcttttccttcgtgcccgtttccatttggtcaacggcgaattgaacagagccattcagttgaacaacagatccattcaatcgcagaacgtctacaaacagttccagcacatttgccattgggaattggtgtcagcaaatagaatatcttttttttttttggtccattgctctcggggataggccaatctcgaggttaatcggattagcatttgtaaatctctaattaattcacttttggattggcaatggtcgatcccaagtttacccaatcagtctcgagttgggcaaaacaacttccgattaattcgcttttgtttagtaccgtccatatggtgctaa

SEQ ID NO: 16229 - DNA, 1879 bp, Heterodera glycines
tggcagaaatgctgccggaaatgattttcccttttttctttttagactttttgtctgtcggtcttttgtctgtttcgttttttcttttgtctgctcaaaaaacatccgttgaatatttatgtgctttaatgagttgtgttccttctcttcccgtcttttgctgcacataaataaataccttttcaatgaattcagttggtagaaaatgaagaaaaaactgacgacgaattgactttttttgactctttcctccgtcaatttccttagtaatttttatcacatacctaattctgttaatgcttctgccttttcaatattttatcaatgttatcatttccatcagtagcacaatttgcgtgcgcgacggcggccaatggaccgattgaccccccgggggagggaaatgaaacacaatttgtgatcgattggtttcccattaattttgtcccttttgtccaatttccaaaattaagcttttcacttctacgccaagtttattttgtttaaatttgaaatttaacactatttttcgtgtgcatttactgctgattgaccgaacgaagctttctttgctttgacttctctcaaatttcgtcggcggttcgttcatttccccccgggggaatgggcggaggggcgggggggggcctttgccacactttggccacgggaaaaggcccggccgaccagccgactctttctttcttttatttatttatttcttttatttattttgacattgcattggccgactgactgatcagtgccaccgctgatcataagtaagtcgttaaaagatttgaaaaggacgcgggacgaaaagcaaacaaatggaaaggggggggggaggacagaaattggcaaataatgcccaaaacatttggccaatggatggaagggcgtgggacggaatcaatcctttccgtggccaaaattggcattctttccttagccacctgatcaaactctgatcgtccctcaatttgatcactgatcggtcggccgtcctcagatcaaaggttgcgcatcgtttgatcaaattccccccaaaaatcccaaaacaaatcttattaattgctgctttttttgtgcgtcattaggcaaatgaaatgaatgagttgaatattttctgttgacacgttgactttcagacaaaaaaaaaaagaaaaaattttggcgcaatgcaaagatttttaattggcaattctttttcattttcactaattacttaattttaactttttatttttttgcttctcccttttcctcttctgtctttttttcaataaattgcgataaaaatgtttgtcttttgtcgatgaacgatggccaattaattttggcctcctcaaacccatccgttgacacttttctcgcgttttgatggttttatttgggggaatcattcgaaatcgaacgatgaaaaaaggaaaaacatcgaaaaaatttaaaaaaagtgagaaaattcacattttaaattctaaagaatgttttgtttttagtttcttttgaagtcaagtgtacataaattcttgtgacaaacagcttaaacatcggcactcactcatttgttaattagcaattaaagtgctaattaatggcggggacaacagcaattcatttacaaagaaaaaagaacaaattttgtttgggcaaacaaagaataattgtcaaattcaacaatattaattttcttttaaaaccattttcgtttttttttggtcatttaagccgatataaaagtggggagggatttggggaccattgaaatattttatcggaactttccggattctccgaatcgtcaattgtttggcacatcaatttgttggattacacgccaattcctcccttccctttcccattttgcattgtccgt

SEQ ID NO: 16230 - DNA, 207 bp, Heterodera glycines
ctcatcgccgtccgtttgggccttcaactttttgcaggtgacccggtgacgcttcagacttcgcgtggaacaaagctggaattggtgggccaaaaactacatacactaaggatgtgttcggattttccggtttccgattgcctaaatatttaagacgtcagaatggcaatttattaaattttttgagccatcggaattttgatttca

SEQ ID NO: 16231 - DNA, 4230 bp, Heterodera glycines
ggtttggggaagcgatgggacaaaatcaatccccaagacaaaatgatgggaaaagaatttgggattttttcggttaccggggagatggaaaggaggtcactttttgaggggtcatataaatattaattggcggaagcaatcaaagttgggaaaggatactgaaatggcgggcattggatgggaattgataaagcgatgggacaaatcagtcttaaaataagggagcagcaggaggaagtggtagagagggtcagaacaggaattttttttacggggtctcagttaggcaaaaatggtgagacaatcaatgtttgggaggcgatgcgtgccgaaatgtcggggtgggtcggaacttagagcgaggagtacacgtggtacggaatagggtccaaatgaagtaaagaaaaatcccagtaccgagacgttgccaaaaaacttgatacagagatccccaaaaatcctcgaggctcatcgacaacttcgagagtctggaacagtaatgggcattcttcactgaatattgtttcttatacaaattctttaagggaggacgatcaaaattttcccgcttgctcaatgacctatgcgtttgccacccctcgccgcctacccccccccccccccccctaggggtcattcgacggacggcaaatggtccgcgagaccgtgggtcgtccgtccgtcgtaaaaacagcgacggaccccgctgccggcaaaattgttggttgtgtgcagcaaagcgggcgcaaaaggagtgaccaaccattttattatatgtgtcctccaccacccaagaatcgaatgtttgttcaccaccggcgcccaagcggtggccgccgaactcagtcccgccaacagaggcccagccaagtttaagaagcaatcagtttttttaatttatcaaattttatatgtttttggaaccgctcgaaaaataataattattaatattcaaatgtttaggtattgtccggcgatgaaattccttaaaaaaattggtaatttcctgttttgtggcctcattttcaaattaaaaaaaacgcgacaaaaagccacgagataaaaaaaattttccatttattttattttagtgaattaaattttgttgtttgcgcttttgctgacattttttcaattaaaaatgagaccaaagacaggaatttataaaaaaaattttttgtaattttttcaaaaatagaaggacaattttaattccagtcgttatctcctgatctaatagagcatttaatagtgccaaacttataaaatatccaactcatgaaaaaaaagttacggcttcttaaactaaactgggacgtagttggcggaactcacttggccattccgggcggtcagttatcccttcgcctccgcgttctttgctctccggttgagtggtggtggtcgtgctttgctgtgttctgtgctgaaaatgtgacctctgactgcttggatgcgttttattattatttatttgaccctcaatctcaacaaacatagcccccccccactcctcgtgggattcattttactgatgctcaaatgagtcccggtgaaatttgggaaaaaagaaagtgatggatggcattggcattaaccaagtattttttgagaaattttgggaaaaaaagggatggcgttggcactaaccaaatttttaaagtttatttcaatggaactctcataaaacgatttaaatttagtaaaacagacagagagagccccgaggacttcccttagagggggagggtggctctattacggggggatatcaaaaaacgcaaaataaacgaaattaattcaaatatttaaaaatttttgtaatatggatattttaagttaaccaaatcttggtcaagaaaaaattttttacgggatgaatttttaataaatttttttcaattttattatagtgtattttcagaaattttttcattcttagggctgtgttttttttggtcattttttgcttttccgtaaatatccattttattattcttttttttcttttcaagtgccatcatttttccttatcaaattttgttaaaccccgcctgggaaagagatttgaacaacaaaaaagaagtaactttttgtacaattttttcaattggcaatattttttgaatgaattcaaaggcgaaaaggtaaacagagaaagaaaaaatgaaaggttagagaacaagaggaaaaagggttttgaaaatttgaatttaaatcaaaaatattgtcgaaatttaaatgggacagcatcaggatgaacatagaaaattgtaagaaatttggctaaataaataaaatttgggtaattaattatctatgatatggcccggagccgaaaatggccagaatatgttttcggaagtttttggggacccataacttttgtcaatttcattttgtcaaaaatttttgaggaaatgattccggaactcagggattagttcccgcaaaaaataaatttaattcgttcaattacggaccaagaaagaatcaatttgtctatatttttttggcagttttagactacggtctaatgatcaatattttcggttaaattttgttagtagacttttcgaaaattgccgatttttgaattttgagtcaatttcttaaagtatttagcggaaaattaaaattaaaaattcaataaaagttttcttaaatattctagcaatgttttcaattaaaaacaagcacaaaaatattccatgatgtttttttcgttaaaaagtagtaaaatttgaatgaatcacaaaaatgtttgcgacgatttatcatatgaacatttaaatgaaatttcggaattatttaatttttctttttttataaatggcaaaaaaaaaggaatttttgtgttattttttgtgatgaataaggcaaaaggcatcccatcagccaaaaggtgcccatcttcctgcacaaagcgccattagtcatcgccgacgaacagcgacgacccccgaggggcagggtaaatgatcaatttaatcgtcattaaaaataaaattaaaaaaagacacaaacattggcatggcatcggcaaatcggtgctttcagtcagaaatgttaaattttgaaattattggtccaaaatggactaaattgggggggaggagacgattaaccaatttaatttaggcaaatttgcggatgaagaaaaaggcgacctcatttttggactttctctttttcttttaaaataaattttttttaattttgatattatataattcaaatcatattatgagaaacatatattataatatatcatatttatttgcatgaaaaaataaatcttttctattagtgatcaacagggcttcattttctactctactgctcatcaaaattgcaatgaaattagggaataaaaaaatatttatgatctgtaggggtaaaaatgtttatttaatcgagcaattactttatttttatttcaatatagcttctttcaaattatttattttatatttagtgagaaattttattaaatatatatatttgccatgaataattgctgtcaaattaaataataaatttattttaatgcttttaatataatttgtttttagaaatatttcatcattaaaatgaaattacacataatattttctttacttttatttttgatcgtcttaataaaaattaattatgttgaagcaaaaaaggaaaagttgcaacaaaaatcatttgatgaaatatttggagaaaaatgggaagaaaaagaagaagaaaaacgaaatgaactcaaaaaaagagaaataattgaaaaattttataaaataaaagagaaaataaagcaaaagggaagaaaatactcaagaaaaaaatggaataaaattaatttgaaaatagcgaagaagttgggcacaaattgtaattatatttataaatggattaaagaattagggcttaatcaaaaaatacataaatgtcacaaatcaaaaactgatgaagaaaaacttgaaattgtgcaaaaatttatagcaatgaaaaaagaatacaaacaaataagaaaatattcgccaaaagaatggcgccaaaattatgccgaaatttgtaagaaaattggagtaggccgagacataattaacaaatggaagaaacaatttggcattagcaagaaaagaataacggagagagaaatccaaaaatgtatgacaaggaaattgcaaaaatgatgaacattggtcgaacgaacatttctaaatggaaaacaatttgaaa

SEQ ID NO: 16232 - DNA, 1332 bp, Heterodera glycines
tcatatatttttagactacaattcttaatatattcgtctttttaaaaaacatatcggtactgtcaaatcacaattgtcgaataaacaattttttgatattgtcgaaatcacggcaatcatggagtttactggtcccgttttttttttctttaaaaatcatggaaaattttttctagggctattttactgtgctgagcacgaatccggccttatttttgaccgattctgaaccccgaacccggattcgaacatttttcaaaaaaaaattttttaatttttttttctttcatctatgtttgtcttgagcataaacagcatacgcataatgggaaatttggtcataccatgataacacttgttttaacttagggccgtaggctcactaacaatttaagccatggatatatttgttttttgtgatcaattctctaccatagaccatacgatcggttacatgcgtaaccgaggtcttttgcgtcaaattgctccaatatgtggacgcaatggatgccagaggcgaatgacgcaagtgaaaaatccaagttttccgactgatgggtgccagtggcgctgtccttcacacaaaggacagaaaatgtctattcgagcgggctctttttttgagaaagcgcactttcctctgcgcaaaggaatgtttctggcatattgctgggcactaggtattttaatattgcgttaggaaaaaattgtctgggcaatcatttctaggcttcccgttacacacacagaagcaaatgaccaaattggacgaccatacattgattgattgggggaatttttacagaggaatctgtagccgttggctcctggataatcccattcggttgtcttttcttgtagataaggccttcatagttattttaggttgggaggggttggacatgtgattcaaattgatgaatcggtcctagcccgcaggaagtaccaccgggggcacagagtgcgcgagatttggatttttgggctttacgatgtccacgccggcatcggagtggtccgtataaagcgaaatagtttattgtcaaaaagcactcactgtttggatttcacgtcatttagttcgacaggcaccactccaattgatagcgtgctctgttgtgttcgaagtatctaataaataacgcttcttacgaatttgtagactttcaggcttattaagaattatttggtcaagcaatgaatataaaaacctgaagtcaacggtacagcatgttttttaacaaatttttagtttctcatggttggggtgggtccaggggtagaaaatggcgaaaaaagtcatattcatattcagcgacctctaaacccaaa

SEQ ID NO: 16233 - DNA, 1338 bp, Heterodera glycines
  unsure (1)..(1338): unsure at all n locations
atgcctgcannggtcacctctaaaacccaaaaatagactgtttccgggttttttacatttcgtggtttttactcttatggacttccctggcttggatactttgtggcaaaacttccactgctactcaaattttatagctttgctcaaaatcaacaaagttaaatattttgataccattatagccctattcattttcaattatcctacatttttcaacaatttcgttgagctttaaaaaatcatgaccaaaaatgtttgaaaaataagttttttgagttctggcaaccgacaattggaacttagaagttgtttaaatggtctatttttaaaataataaaaatataaatagagcgagagatttgtatggatttttactataaaaacatttatacttatactatttcaaataaaccctttatttaatcgactgacaattctatcattatttttccgtattttaacaaaattattaggctaaacaaattaatttaaagaattgatatacttccatcaaatgtatttatttttatagcgcagacgcattttagttcatgtttccatacaaatcaaagctttaaacaatcaattaaaatcaagtaacgactcgctgatgattgacaaatgctaaactcccttttcagtgttatttttaattgctattattagttcatatttttaatttaatgaatttttattctgaattcctattgcctttgcgtttttcattagtccatatttaggtcttttgggaatttcaatgccgtgttgggtgaggaacatttcaacagccaaaattcgcttatgaaccatcagtgccaaaaacacaacggcattgagcgccagagtccatattgctgcaagcaaaatattttagttcattaatttcattatttgaaccctgcctataaattaaataaaaaatatgaaaataatttttcactttttcaaattcaggtagtcaaattgttcgaaggtaatggcgcgaaaaaaaaacaaattaggccgcaggattcttctgtcaaatgtaacttcgaagatatgaacacttttccaccgaaaatcacagagggaatgaaattatttaatagcaaaccgttcattaatttatctctgatatgtatttgtcattggtacactattttttaaataaaaaataccataacgaaaaccaaaatttgaaatttatttatgttcaatacaaccttcaacatttgttaagaaaaatattgtcaaactaaacaaaaccacaataaaatctttagaaatataaaatgaaaaaatagcgtgccacaacacgatctttgctgcaaaccctcgagagttttggttcgaagcttt

SEQ ID NO: 16234 - DNA, 2646 bp, Heterodera glycines
tttatttttaagttcatacggcgacgtttgtaggtgcaccccatggggggagggtggggtggtccgcagcccctaattggggggcagtcgtctcccccccccccccccgaaaccttcgaaattcaaaatttatccagtaaaagttggcacttttttacttaacaaaatgcattaaattcaaaagtttttcaagccccattttactttgttttttgaaattctaacccaaaaatggcaaaaattagtcctttttggcgaaaagcgactcaaattcctttttgttgacccgttgagtaaacaagaagctccggttgcactcccgaaattttttctggttacgggcatggtactccgttttcagtgaaatttccctaattgaaatgaattaatttgtgaaatctggacgttaatccataaaatatttttcaataaacattttactgcgtaatgcaatgacggattttagtcgacgacgccatactgtgcaaagttgaaaatggagggaaattgggcagtcgcaaaggggtgaatttgcccggaacaccggtcgatttgccagccgtttccgagaaggacatcaaggacctgcgttttggtgttgaacaggtgcggttatctgtggcattttattttatttaaaggcacttttcgatattttccttgattttttgtttaatattttgttcctccaaattttcagggcgtcgacattattttcgcctcgttcattcgaaacgccaatggcatccaaaccatcagagaagtgttgggcgaggcgggcaaaaacatcaaaatcatcgcaaagatcgagaaccaggaaggcgtggacaatgtggacgaaatgtgagtttaagctgaaagacgaacaagggagagaattcaaaaacttagaaagttcgttgtataagaaaattcttagaaaaaataatttcaaaaattttcagctattgtagaaatttttgaaaaatcctagtaattcgctgaaaatttttgatattggagtgggaaacggagtgcacccattttttctatttttacagcattgcggcatcggacggcgtgatggtcgctcggggcgacttgggcatcgaaatcccagcccagaaggtgtttctggcccagaagatgatgatcgcaaagtgcaacatggccgggaagccggtgataactgcaacgcaaatgctcgaatcgatggtaaaaaattagggttttaaaaaatgaatgaaagtgtgtgtatttaatttccaaatttgtcattaggtgaacaagccgagaccgactcgtgccgaggtcagtgacgtggccaacgcagtgctggacggctcggactgtgtgatgttgtcgggcgagtcggccaagggcgattatccggtggaatctctcaaaaccatgcacgacgttcgtttccctcgttacatttgataattaaagactgaaaatttaatttttcagatttgtctggaggccgaaaccgcctttttccactcgaggtacttcgaggagttgttgcagaacacgctcagccccaccgggccgggcgaaaccatcgcaagcgctgccgccaacgccgcgaggagatgccgggcaagcgcaatcattgtgctgaccaccaccggaaagtgggcattcatttttttattgtttgaactatttgcaaaattaatttattgtcctaattccaattacaaaaaagaggcataacttttgaacaattgcattctgcagattctctggtcaggagcaggtcgtttccctctcccttttcgccgcccctccccccgaaaatcttgaattttttttattacaagacttagcttttcctttggttttgaattataaaatttaaaaaagacaaatatttaaacctcaaaattttgaactttttccagtgaaatatggactataaactaattaataatcaaaataaaatatctgaaaataacaatttttcaaccgcaacacacccaacacgcactctcaggtcggcccaggagtgttcccgcttccgcatgccaatccccgtgttggccatcacccgctatgagcaggtggcgcgtcagctgcagttgtgccgtggtctgttcccgctgtactacccgcacatggaacgcgacacggagtggacggaggacgtgaacaagcgcatcgcgtacggcatcggagtgggcaaggagcgcgggttcatccacaacggcgactttgtggtgattgtcaccggatggcaagcgggtcagtgtggttgggaagtgacgcatttactcattcatcccccgtctttgcctccccaaaatttcaaaaaatagagaatttccgccaggcgaaatgcgtgccataccgtgggcagcattttaaaaaaaaatttggcccgatccgacgactaggccccgacatatgatagcttgtattggcctgtttgcgccatgtgcagccaactctgccccgttaatgctagagagtcagaattttcttcggcgcgcgtcccccgccctgaaaggcttgaaaaaaaaattaccgtctttcgccgggcgctttgcgcctgagatatgctaacctgtcattgctaactttgcgtggcgctccggcgccgaagtttggccccgcttcacgaaataagtgccatcccaaggggagcataatggcaaaaat

SEQ ID NO: 16235 - DNA, 3958 bp, Heterodera glycines
agagagtgagtgaattggccacactttcttccttccctctccctatttgttgtccttttttctcagttccgattggtcggttgaggaacttttggtggcgcagggaatgcgctgttctctgatcagatgcgtggacactgatcagcactcaatttgtcttgccaagtttgcctgcacttcgccaacactgtcggccagtgccaatttgacatttgccggcgttgaagggtatttccgggtcttgggatgttccaaggtcacaacacactccatttcgtactcatttttactttatgggagcaattcccgaatttcactctgtcgctgtggcctgacatattgctgctctgcgttttctccctttttcatttcgtttgtttattttatgggtgccacccactccactctcgttctgatcacttccactggctcttcttccattcaaattgttggccaatgggacgacggtcccgcgctcaactgtctgttgaacggcgtggaaacgacggccgaccaaatcgccgcatggctgcgatgctccgttagatccatcaaagggcccatttcgttgccaattgcctctttggtaatttacttttttcgccttttgatcccccccccccaagggaatgggcctttcgggcgcggaggacgaaggcaccaacaaacggctgatggcttatatgaaggcgcaacacggagacttgacacacaattttctgcttaccagcgattcaattgccgcagctgcaacttcgttcgacaaaggtcgtaaagcatatgcaactttcactgctttttcgttgttgttactgcttttattttttgtcatttggtagccattcaaattacaaaattttttattttccggtggcattgttttgatcgctggcacgggctcggcctgccgtctcctcaaggcttggacaaatctctgaaatgtaacctttcatttgttgataaatttaggaaaatggcgaagtgtttggaggttttctgttgttttacgcttttttgatatttttttaagttggcggttgggggcatttaatcggcgacggaggcggcggtttttggatcacaatgcggtgggataaaacatgtctttttgatgatttatgaatacacataacaatcattttcactgttccagtgctattaaacgaattttcgatgttgaagatggacttttgtggagctccgataccgataatgaaaaaacttcggcttttgtcgactcagtcaaaaagactttgttggaacacttcgccgtggactcgaaattgggcttgctggacattctgtacagcccaaagttcaacaaatctcgcattgccgctttttgcaaggaattagctgaaggtgaatagtgcaaattccgctacatttcccttattttaagaataaattcagttgccactggtggcgatgcttttgctgtcgaactgtttagcgatgctggcaaggctttagcgcaacatttggtggccatttcacggcattgtgacgacaaaatgttaagggaattgcccgttttgctggtcgggtccgtcttcaagagttggcattttatgagacttggttttgagcgatgtataaaagagtcaaatgacgccgtgacggatttgaatagacggatcaatcgagtgatgcttttccaattggagtgttcagcttcggttgggtgagttgttgctttttctttgttatggtcaactataaacgcatcttctttctaagagctgcgattctaagtgttaagcaaacaaacgatgggaaaatggacctttgtgaccttaaaggaatacaatcgaagaaactttttgatgaacttcaattatacgagtaaaaagctccgagtggaacagattcacgatataaagttgtatgttcatttttgcattaatttttttttattgtcagctaataaaatgatccataattcctaacaaataagtaaaaaatatgtagatagacaaataggcttttctttgcacacaaaagagtggacccataatgactagggttgtaaattatatggattaacatattttttctgcgcatatgctatgaagaaaggggcttattgtactttttaggtttatttaagcaaatattaaatatgcacaccttttttgggatttttgggggtttacaacatatattttggcattttttatccatattttggtccatatttggcctttttagtccatatttcgggcttttttagtccatatttaatgtccatatttcgcgttttttagtccatataatttacaaccctaataatgacgtcggcgtacaaacagggggaagaaatcaaaatagggggattttcggaccgggtcagtttagtacgggccgttttagtacgagcgcacatttttccactataacttttttatttgttatccaaatccaactttcttgatatcattcgagagcccttcggatgctctattagcctgcaaaatttcaaaaaatttcgttaggttttaaaaaaagttcgggccaaaaaagttggaaaatctggttgtatgaattcttctggccataacttttttgaactttaacgagattttttgaaattttgcaggctaatagaggacacttagggctatcgaatgataccaagattgttgaatttggtttgcaaagaaaaaagttatagccaaaaacttgtgctcgtactaaaactgcccgtactaaaccgaccccgaccggggatttcgcttcaaaaaaattatggcgaaattaatatttttaaatttgaaaaaatcattattttgaattttcattagtatctgcatgaaaaaagctcgcactagtcagggcttccttttttggttgatttattattgtgaccataatgataaaatttcttttatttctttgagccacttcaaaatcatcgtcttattataaacaatcgtaatttaaatttcctaaaatagtatcgggattcctttcagcatatcttcaaaaaatgatcacaaattttggttcctgttcctctgttaaacacaaagttggacctacaacgaagcgtaaaaatgtgcaagtggtcgtcagaacacgtcctctcagtgaaatggaacggaacgatcggtgtaaaaatattgtttcatgtgattccgtctccaaagtcgtttcgttgaaaacaaacacatgcgacaaatacagcactggtcagcgccaatttggagtgttcgataaggtcttgataaactcgaattgaatatttatcattaacttataaaaaggcagcttttaggtatatggccacgaatcaacgcagatccaagtctatggtgatgtggttgctccattgatgaaagaagttttgaatggctacaactgtacagtgtttgcgtgagttatttaaataatgttactttttgagggcactttttaccaaaaaaaaaattctcagatatggccagaccggaagtggcaaaacctatacaatggaaggccgccacgacgaaagtggagctttttcttgggattcggacccgacctctggcattattccgagagcactgcatcaaatattcacagagctcagcaacgaagtctgtctaatggagaaaagagtgtaatatttgcgttgcaattatttcctttttttgcaggacatcgatttcaccgttagtgtctctaatattgagctttttagtgatcagattaaagaaagataaaatgtttattgaatttagctgatcaaagtaaaaagttatagttcataaaatcaacccagtcgaaaacggaactcgcgaaaacgaccccgacccttatttgttatgttataattttaaatagatagataaaaagattaattgtcatgttgaaataagtataaaaccctataaggttgttgtcttttagctaaaattttaatatagtctcgtgtgtgaggttggagtttaatatgcattttccaatttaagaatac

SEQ ID NO: 16236 - DNA, 1105 bp, Heterodera glycines
cagttctttttggaactcggacgacgtcccgagtcgcgtttacgacggtttatctgtcgcacgaggtcgtagaacacttcgtggacattgattttgtgtttggcggatgtctgaatttatatggtagtttaataataattcattttgagaaatgcactgtttccttttcaaaaatacctccagaaaggagctgttgaattgccgtgccaaattcatcccctgctctttggccaccacacgctcatcctccaagtcgtatttgttgcccaccaaaatcatcggcacctaacaaaaagcattttttcataaaaatatagtaatgctattcacaaaaagaaaattccagaaatcggttaaaaagtcttaattccaaaaaaggtatttacatcgtccgtgtcctttacgcgtagaatctgatcacgcagatccatcaagtcgttgaaggtcgactgtgcagtgatggagtagaccaacacgaagccctggccgtttttcatgtaaaggtcgcgcattgccgtgaactgaatctcacttaagaattttgaaaacggccaaaaaacacctgttcggtgccggcggtgtctaaaatttcgagcatacactgctgaccgtcgaactccaactgaattttagtaatattttctcgatcgcttttgtcatccgtctatcctatcaatgacctgtttccggtaactgtcttcaattgttgggtcgtatttctcaacgaaaattcccttaaaataatttttatatttcaaaaatattttccagaatttgcgaagcccacctgtacaaattgcactgtcagcgcagactttcccacgcctccgctgcccaaaacgacaattttgtaatcacgcatgataaaataacaatgtaaggcccaaaaggtttatttcttaaaggaatttgaaatttaaggcaaaaaatgaaatcaagcaaaataagaatgcttttagaaaccaaaaaggaaaatcactgttagcagatttaaatttaaaaaaccctatttcaacaacacggggaatgaaatcaattaaatccatcgcaaaataaacaacaaaaagggaaagagatcgcactggcgaaaataaccgaaaatgaa

SEQ ID NO: 16237 - DNA, 1758 bp, Heterodera glycines
  unsure (1)..(1758): unsure at all n locations
ttgtgatttctttcccttgccactttcgaactncgccaatcgctttcncaagaggtcggcctgttcacgtcctaaacaattcgttccncaaacgaaagtcaccgctcaaagataccgagagcggtaagctccttcgtctttgaatccaattcgtattgtccgtgtctgatcaggaaaatgttccgtgttgcggtcggaacaaacttaacaaatgtttgtataaaaaatacgagtcaaaataaaagaaattactgaccttggcaagaatttcctttttcttttcttcgtccgccgcttcgtatccctttccaataaccatagaaaaagggtctcttctaaaatatacaaatattgaccacattcaatcggctcaaacttgtcccaattatagtcccatcgcgttatttcaccggtgccaagcgattgaacatctttaggctgagaattgtgagttccactttttacgactgcttgctttgcgactttctgctgaacttcgcttgtgtttttttctgtcgatggagaattttggtttgccatcgtcacaccagcgtatgcgccaagggcaccggccaaaggagccgaagaataacaaaagacacggcgatacatttacacgaatgaattaattaattactaaattaagcaaggcgaatattgaaacataacaataaacacagcaggaaaattgaagattaattagttaggagagaattatatagacggttttccttcccttaaacttaatctcaattcattaattaggtatacatacataatgccactggaaatcatttctacaatatttcaaaaattgtatattcaattaacgccttttgtggcttttgcctaattaatgcgtcttaatttctgtccagatacatacacaatggccagtgatgataattcggacatgttcactttcatgccactcggttctggccaagaagtgggccgttcctgtcattttatgcaattcaaaagcaaaaagattatggttggattttcatttctcggatttttttctgattcgacatttgcttttttcagttcgattgtggaattcatccggtaattattgcgatagcatcaattagtttgttacccatccgcagggaatgcaaggcgttgacgcgttgccttttgtggatttcattgatgtggaggaattggacctgctgctgatcacccatttccatcttgaccattgcggagcactgccgtggcttctggagaaaacggcattccgcgtcagtgacacgaaacgaacgcattaattcctatggatttattaaaaatttttttacctatttttgaatttaaaaaacatttttgacattgtcagggtcgctgttttatgacgcatgctacgaaggccatctaccggacgttgattggcgattgcatcaaagtaaaaatggaaaacaaatttataaagggtttgaagggtgatgcttcaggatagaaagaaataagcagggttttaaaacagactgaaactgccccttttaaccggtaaataatgtaacatcaaatggcttgagatagcaaaatacggcagtggcggggccaatgaatcgcggatgctttacacggaggaggaccttgagaggagcatggacaaaattgaggtggacaaagcctttcaatttttatgttaccctttacttataaaggtactcgattttcatgaacaaaaggaagtgaatggcatcaaattttggtgttacgttgcccgccatgtgctcggtgcctgca

SEQ ID NO: 16238 - DNA, 668 bp, Heterodera glycines
  unsure (1)..(668): unsure at all n locations
aattttgaaagtaccggggctgggacttggagaatagaccgggacgggatcccgggactcccgtttgtccgggacccccggtcccgacgttttgtcccaaaaaagggaaccgggatcccggcaaaatcgcggccccatccgggatatattacagtttcaatctttgaatatttaattgtggaaataaaaatatttaaacagttattttatggaatttccgtcggggatgggtttggtccgtttccatttggcattttctctctttttttgcttcctctgtcatttcatcatattttatcttcgtgtgctaatttcaaattgaaatgcctttttcctatttttatgctttgtttgccaatttctttccctctgtccgtctgtcgctgcagtccctcacttttctttgtccgcttcgccccttcagttcctccactatttcatgcacttctctgtcattcgtttccggcaaataaacccaaaggaatgccaaacaaagcaattgaggtgctaaaagtggaaattggcatcaaattccaattccatttcatagggggaatttacaaaaatatgaccagtgaacagcgggaaaaggcgaaaactccgatggccgaataagcgggcaaagtcaaaatggtanaagcgaactaaaaaagggatataattataat

SEQ ID NO: 16239 - DNA, 2723 bp, Heterodera glycines
gtagcgaaaattgggcattgacagtgctgagacggtcaaaaagtgcgtagaaaacgatgcaaaaagaattgcccaaaccggcgtacaaaagcatcttccgacgggaaactctgcaaatgggagaattaaatcaaaaaataattctttaaaatgggtaatttgtattccaatttgacctcgacgacattagcattcccggcacattggccaccaaaccgagcacagagcaaattgaagaaaacagctgaacaattaattcaatccaatttgaaatttatttaagtgagttattatttttgtttattttgttcgcctgcgcttcattgagtgggaaatgatcagcaaaaagtgttgtgaggacgggccaaatgccaatggtcaattggagggaacaaatgccgagcaaagtggccaaccgaaaagaaaatgaggcaattaagcccaaaaaagaagaacggctttcaatgcctcaaatgccgctgtgtgaacagttctctcaacatttgaagcattggtcgctctttttcttcgttctgctgcttttccttcacaatctccgccagtgtcattttctgatcgacggaatcgcctgaaggaaattccaatggttttaatgagtggcaaaggcatttttaattaaaatgcgctaattagagaattttaatgatcagtgccaaagccattttttagttaaaatttcattaattgcactttcaatttccaatttttgttttgcttgccctggtaaaattgcaatgctttcagcgccctttctgtgttttcgcggtttaacagcagaaattttggcgtttcttccaacgcaatgctggtcaaaatgccgaaaaagcttggcaccatgccaaatccttaaattgggaaaattctattattttcctttcgttaattttaccgattaaaatttccaaattttgtcccaaaagcacatccatgccgagaagcatgccaatgtttgccaccacattataacagacgccactgacaaaaatgaccaatccgcggagttttgacgatgggaattcctttggagggaaaagaaaaaatgacacaaaaaataaataaatttagaaattatttttaaattattactgtaacaaaaagtgcaaatgcgcaaaagttcaaagatgaaagaatggcaccgaaaatgcgggaaatgagaaaaagttcgggcagcaaaaagacaatggccaaagtggagaaaaagctggcaccgaaaatgccacagttggagagcaacaaaatcactaaaggcacacaattaattcaattaatttttataaattcatttttttaaaatatatttttaaatattaattaatgaattaattattatttaaaatttcttaatttattttgcaattgtttttgttcatttcattttgagctcacttttcctgccaaattgttcgcaaagccatgaagtaaaaacggttccgagaatatttccgatataaagcgaattcaaattgaaactccaaagccacaataatttcccctgaaaattgaaatataaaaaatgtataaattatttgtaaattgaatataaaaaatgtataaagtcaatttgttttacttcggaaagttcaacgccacgcgcagcgtacgaaacgttcagaaaattttgcaaacttttggcagccgaaatggaatagtaagaagaataggcttgctgaaattaattttttaattttatttaaatttaatttttaatttacataaaaattgttgagtatcccaattataaaagcaaatagcaaagtctgcagagatcttccggccggagcaaaaaatggcattttataacaataataagaaaaatatgtctaaaacattgaattaaatttaaaaaattcaatgggtaattattggctccgaattattaaaataataatcgagtgatcagtattattagtccactgattaaaggtcctttgggcggtctccttcagcatatggcggagtgatcagcccattccattcccccgggctgtcccattgcactaacaaattaagtttttgaattcaataattactctaattatttgtgtttatttgttatttcttattaaatttttgagcattcctaagttggatttttaaaattcattaaactttttggggttaataaatgaaattggctaagattattttgtccgctttggatttgaatttgattctgttattttattttgtccaacagttccatcaaaagagaaaaataaaaataacatattaatttttaatgtgtgaactattttatttatttttttacatttgtttcggcagtgatttttattttttatatttctaaagttggccaaaagacccaatgtcagcaaataaaaaagagttgggcaacaattgacaatggccgggggcggggacttgcacaatgtctggggcaggggctgaagccgtatttgcattagttcgcttcctttgtcagtcggcgaatgaatggcgcgcgtttcccgcattattagcggggagggaaaagccatcggcgatcggtcggtcgtcacgctttacccccccccccccctcagttttcatatcatttgctcctatcattttgctactgctccatttatcattccttttttttgatcgatcactgcccaaatttttgctttcttatcaatccaattttatttggttgaattttttatggatttaaaatatttttaaacaactgaattgaataa

SEQ ID NO: 16240 - DNA, 2280 bp, Heterodera glycines
tcagatgtccaaggagttgtgctatcgctgtggtaaacccgtctatccgacggataaagtgggcccattgaaggacggggccttcttccaccagggatgcttcaagtggtagggagcaaagtgagccaattagcaacatcaaaacgttcagttatttgtgtggcacgcgtctcgccttgaaaacgtactgcaacaacagaaagtggggatagattaaaagattaattaatcttctgatcaataataggcaattaattaacaacacatgtccaattaacttgcaaattgggctttccgcagggcaaacgacgaccgcgaagtgtactgtcgcaaccacgtgccaaacgccacaccgcacgatcccacgctgccgttgccgccttccccgtcaaacggagtcgaacccaacgcgtgtcaccaacaacagcagatgcggcgccatcggcacaacgcggacgcaggactccatgacatgaaaattgcggtaaattttgaaaattggaagacgaatcaatgttttaatctaattaattaattatatttttaattaaatttaatataaactgaatttaaatatatgccatttaaatcatatgaaaatttgaatggttaagcacgcaatgaaagtgacgcaagcagttaaaccgtatccgaagatcaaacacggaggagccaaatacattgtggactacgacacacagacgcggctggaactgctgcatcggcaggacgaggacaaactgtaccaagaatttgatgaacaccgccaaaaggtggtggaatacggaaaacagagggggagaaaaaagaggacaaattggaaatttggaaaattttaaggaaatccaacagtttgaagaggagacgcgcgaagagtgggaaaaggctttggccgaattcgcacgtcgctacgaacaaaggcacgccacggcccgggagaaggaacagctgctgcacgacttgacactgcgcaaagagcggaaactcgaagtcaaacggaagaaccacagactttgatttgttttttaatatttttgatttaaagacaatcacttcgaaacggaaagagcgcgagagaatgcgaacggcggaattggtggaccaacaagccaaagagatggtgagagggactttggcatgccatcccaccctcaaatcggccgaatggcccacccatcgacgggggatactgtagccaacgaaaagaaaaatgccaaaactaaacaaattaatggagaagtcgtcttaaaatgctttccttttcaaatggaactgttccgacaagcgcgatcacagcaccaaaatcaacagcagcaaaaagagcaaagggaatgcgacgtggaggagacgaccagcagctgttctggtgcgtaagccatcgaattgcccttcgaatgtccaattcaggcggaatgccctcctacccgtccacccctccaccgccaatgccgccctcgtgcagcaaaaggtgggcacttcgaagcattcccactaaatgccgacttttgcacataggcacatttacacggacacggtcgtatttcaactaatcgaccaagtggcggtcagtgtggccaaccaggacgtgcacagtttcactgagctgatcagaactctgatcgccggtgcccgttgcgacgttgacaaagcacgcgcaatttaccgatggatcaccgtcaagaatttgaatgtgatgaactttgacaacgatttggacaacgagtgagttgatttcgtctgtctgacccaatcaaaattttagtgcttgaattttaaatttaatcgttacagtaccccaatgggactattgagaggcatcaaatacggtaccgaaagttaccacgtgttgttcaaacggctgtgcagttacgccggcctccactgtgtggtgattaaggggttcagcaaatccgccggatatcagcccggacttggcttcgacgacagccgcttcagaaacacatggaacgcggtgagctaattgggacaattaagaacagagttggccatccgccagcaatttgctgatcatttaaggtttttttggacggttcttggcgatttgtgcaatgcaattggggcgcaagacatttggtgaacgccaaagaaaatgccagaggcaaaagatcaatgacggtacaaaacggacacgaaaaagacggcaacggagcagtgggcagtaatttgcgatatgaatacgacgaccattacttcatgaccgacccggaagagatgatctacgaattcttcccggatgagtcccaatggcactgtaagcaa

SEQ ID NO: 16241 - DNA, 1888 bp, Heterodera glycines
cagtgacccgcggttgtcagcggttgtccgcgcggacaaaacgggcgcagtgtcaattgccatcgctttgggtgccgaggcaatggactcgctgatttttcattacaatttgcgttcctttgacaccgaagacgccgaattggacggaggactcagtctgaagaggtgggcaagatgagaagcccttgtggtcatcgtcgtaatttacccaagtgccatgttgaggttcgtgatgcaatcgtcgctggacgactccgtcattttccgcgtccacgtgcccaccacgcggcctcttctgctggacatttttgccaattgcgtgtcgtcggagcattatctgaccggacagccgattaagttcaaaagtgtttgcaagttcaaggtgctgctggtgttgggcaatgcccgtccgttctgtcggctgtacgcgttgcgctgttcagattgagtgcgactctcttcggcatattatggtgcctttgcccgagtgcgccagcggcgagtggggcccctcaaaggctttccgactgtttgggctcgtcccgcgcacgcacgaagagccgatcatcaactgtgaccaatattgcgaaatccgtttcaagttttcggcattttttgcgcaaaaaaacggcgattttcagagtgacaaagccactgactgaaatggtggcaaatcttcatcggaatgggatggaaagtcggcacttgcaaaagtgcgtgcactgttcgctggacgatgaagaagtggtgatcgaattggcatttccggacgaaggccaatacggactggacatttacacgaggtgaactcaatcgaactcaaacggataatcaccacccaatcgccacagggacgcacaccaaaggaatggaacaaacggtcgacaaatgttgacacattgctgtaaatatctgatcaacgcacgcgtcgactaacctcagaaaggacagagagagaggaaagagagacaaagaggcagagagagcgagaggcaacggatggagatagagacaacggatgcagagatagagagtgaatctggataagttcgaatgtataatttacaaacacacaaatgcttttttattctctttgacctcgccaaaatacagtacatagtcaacaacggacagacccaacttatgaaaaacgaaaataattcaaaaaatcgatgtttacgtgaaagtgctaactcaattcgtcaattcttaagaatccaaatcgttgttttaaatagtttatttccaaattacgtattatgtaatgtcatgttatggcaatgccatcggttcggcacttttaaacaaatccggcattgtcccgccttgggtcctccggcgaacattcagcagattccgtgggtcatcagatggataccattccatattgctatccttcatattagcatctttggcctttgttacgcccgatgtgtcctcgggtgccaccaattcatggtccatccttaaataaaatccaaatgaatggtttaaaagatggccatggtcttcaagggtttgtctctgtccgatgtcccaccattcgtccccctgaatgtccgctgcgtccaagtcgattttcccctgctcctctgaagttgccaaaatgatctgttcacggctcttctgatcgctcatgtccacttttttgtcgaataaaatgtctttaacggttgtcctttccaacgtcgtttggaagcgccccaaaagtgcaattgtctgaatgttcgtccttttaaattgctttttacttgtacattattaaatgacctgttcttcgcgctttgggtccaccgttttgactattccttttgtgtccgatttgaatttcagtttcaatttattgtacattttcattccctcggtcgatgagctttctgttggatta

SEQ ID NO: 16242 - DNA, 3113 bp, Heterodera glycines
ttgcttgttggacgtcatttcggaccctgaccgtcgtatggattgctagtttagcgtcttttcggacaatggttgtttggtggccggtgctttgctagtttaacgtcattgcggacaattgatgctttgctagtttaacgtcattgcggactttgggtggtttgtttctctagtttaacgtcattgaggacatgtgttgtttgcttttctagtttaatgtctttgcggacatttgttgtttggttggttctttagtttaatgtcattgcggacaattgttgtgtgggttggccgatgctttgctagtttaacgtcattccggactcgtggcagccgggtgattagcgtttcggacagttgttgatggcttaggctagtttaacgtcattgcggacgattgttggtgattaacttagtttaacgtcttctcggacgagtgctgttggcatggtgtcttactgattgttgccgagctcatgtttaggcaattctgttgactgcccttatcaattactgttgttgagtccgagcttctggccaatgtagcgacgcaatgatggttggcgcctgatccacttgcggttggcgacaaggctttcatttttctgttgagttcatttgtttggcttgtttgtgcgggattcgctgcttttccttttgtttgtttgctggaagaaaatgctggtcgcttggcaactgatgaactcttccttgttggcgttagccgttgcactgccataggaattggtgccgttgaatgctcatttggtgatttggcttgtctatccctgactggattttgtatgatctcaatgccggatgcgtcgctgtctgatgaaagatcaatcacgattgattttgagctgatgggagccgattctctcttccgtcttgatcgcaatgttgcaatgttggacaagagtttgttgcgttgatgccgtctcagttcgtccttttctttttgttgaatgtttttctgctgagccgctttactgctttgtggcgattcatcgttgttgaccattaggacgaaagagatgttggacggttgcttgagctcgattcgccctgttccactgatgatattgccgattttcgattggcaaatcgtaaatccgcttggcagttgttcaattggttgaacattcagctggtgccaaacgtccattccgatgagaatgtccggttgccgtgactcattcggcagggaaagcttcttttgttgaagttcgtcattatccaatgcgtttagttgtagtaccggcaaatcattcagcaggaacttcaaagcgttcaggttgaaaatgaacctgtcctggtcggggcataaaatgccgattgcgacgcggtcgcttatgtatcgcttcggttctcgttcaccgaagctggacaagtagcattcttccgtgctgaggacgttcagatccaattgttcagctgcactgctcgagatgaatgatcggtggcttcccgggtcaatgaagatggttcccatcatgctgagggatggccgtgacggattgaagatcgttgcctttgtcgtcattagcaacgctctggtttccttcctttggatggcattacacatttgttgttgttcgatcactgttgatcgcttgccatcgttggcatttggcttctcttcactgcaagaggtgctaggcgtgttgatgccattcttggctttgtactgatctcggcagagtgccgtgggatgccgacgtttgcagtgatagcacttagatggtcgagcgcaatttgatgcgcggtggtttggcttcatgcacttgaagcacagcttcttttctctgacgatgctgatccgttggttgagtgtgtcgacgttttggcattcgtcatgccaatgattgctgttgcagaaaatacaggggtatggcggaccctttttgaggctttgtacttggtttcgcatttgttggcagtgtttctttgcttgttgtgtgtgctgttggcttacatacccttgatgtttgtgaccctcgtccagtgatgaggcgataaatgtcatatcacgcagtgccattggttggttaggccttcgtgacctttggtttggtgttctcagtgcttgtacaggtgctgctgagacgacttctgcttttggttggacgtagtgatggccatattctcccatcacttcttggatttggacttctttccggactgcttcggttagcacatctcggaatttggttgtcgtccagtttgccggatcctctcctttctttgtgaggatgcttcgtaggaatggtggagtcagcttcttctccagcatgaggaacacctgcggtccctcgatgtcctctccggcattgttcagctcccttgtaagccgctcaagttgaagcagaaagtctttggtctcacggaggcttcggcacggcttgagattggccagttcgaagtgaagacttctgatgtgttcctccggagctccgtacgtgtcctttaacagctgaaggaccgtctcgtagtttgcgtcttccagccggaagcccgctatgagttctcgcgcttctccacccagcagattgcggagtaagttcagcttctgcgctttactgattgattgactgccgattgccgatttgaaggattcgtagaattcgggccattttcgcttttggccgaaaaatttatccagttgaattggttggaattggtagagcggtgctgtgaatgttggcattgtcattggtgctgccattgctggtggcatgggcggttgttgctgcggattggccaattgatccgcctttgcttccctgtcggctctgcctctgtgcagtttggctgcggcactgagtgttgcttcgagatctcgcaaatcccgaagtttggttgatgctgcgtcgtatcgttcggcgattttctcatttttgtcgaatttgatgtattctttttcgccgttgtctttgttgtctccggtcaggcgggcgagaagttcaatccaagcgttggataagtctcgtagactgtccatctgcatttctgttgtacggatttccttgacgacgcgatcaaattgagcctccaagttgatggcatttaccgcagtttgacaggtccggatcggggtgtagaaggagtga

SEQ ID NO: 16243 - DNA, 830 bp, Heterodera glycines
aatattagagtgaagcgggaccgggccgggaattcccggtcatccgaggtcccggttcccggtcccggattttgaaaaactcaggtcccggtcccggtagggcaaccgggaaaacaagcactggtaataatgggggtctgggtgaaaaattagtgatgaaaattggagtcaaaggaaaaaaattaaaaaataataattaatattctttcaaagaaacaataccagttgtgcaaatggcctagtggctagtcgccttgtctttccctttttctttcccctggttcaattcctctacagcacacatatatttttttttttttttttaattgatacatattttatcatttttttaagaaaaatccgtacaaattgagcatagtaatcccaaaaagctgccttttttgttgaaaatctgtaacaaattacactcaaattttcaaaatttcccccggcggcgcctatcggcaccaccggacccccttctttcctcattaaaagttttttggaaaagcgcgccgaaaaaaagatgtgaaacgtatatcttaatttctataatattcgatcatttggtccaaaaatgattaattgtttgaaatgactgatgaaaatttaatttgaaaattttcattaatttaatttagctttaacttttggagtttattcaataaaaacaaagtaaaaataaaaaacaaagaagaaattcgatagaaataaaatgttctaataaaataaagcatgcaaatttaatagaagaaatttctaatttaattttgtattattttcaattgaataaattaaaatatatttttttttatttttaaaaatttttt

SEQ ID NO: 16244 - DNA, 1383 bp, Heterodera glycines
attttgtattattttcaattgaataaattaaaatatatttttttttatttttaaaaatttttttgattttttaaaatttcccggttggtcccggttccggtcccggcttctcagttcccggcaagtcccggtcccggttttgcccaaaaattcccggtcccgcttcactctacctaaaatgcataattggttattgagattactaaattttaaaatagttaatcaacaaatcagcgtcattgtttcataaggaaattaaaaaaattttacagggaagtgttaattcgagctttagtccaacccaactttaataaaaagccgaaaattaattaaaaatgatgaaaaaactacaaatttgggaaaaaattgttacaacaaaattccgatccttcccatcactcgagccatttgctgcctttctctgatcagtcactggtggcacattgcctcagcgtacgctaacgcacaaaatgcttggccatccgagcagcttcaatttatcaaattaaaataataaagcgaaacttctaatatgttatttatttatttttttatcaaaaataccgtaaccctttgtggggtacaaaaataaaggccttggacaattttaaaaaagaacaccaaagggccattggacaaacagtgtcgaattctatttgaaattgaatttttgactttttgttctaatatgtcgcgggcatttgatgagataccataagacattcatgtcattttattcgactgacctgggagggcactaggcgccacaattccaagtgcaatctgtccgccttttgtattggcaagtctcaccgctgttcgaacagcgggatgaacagcaacggcatcagtttggcatggcatttggccgatcattaaaattgacaagcatagcacgggtgcgatgaaaaaaaatgccaatttgaatgccatttgaatagaaaaagagagttggaaatgcttctgaaaaggaggggtttaaatgagcgcttaataagaatttaatttattcaattattaaaagtttaggcctcaaaatttggcccagaagctcattcagcagctgtatataaagattttcataatggaatttgggataaaataatcactcaaaaaattacgtttggaaaatcaaaaagcacttgaagatccacacaatctttgtgaatgaggcattttcaattgacatcaattgactttcattctgattgcttttcataagaaatgattttcatgtcataagctaaaaattgattgaataagagcaaatgatgccataataaagccgtgaggtcccactacccagtgaaaaaatttgaaaagaattagcttttatatttaaataaaattaagatgtgttaaagttgcacagaactgattaaa

SEQ ID NO: 16245 - DNA, 1647 bp, Heterodera glycines
acatgaattttttcactcggaaaattctgaaccaatttgttactttttacaaaatgtgttgaagacgtttgatgagcccattttggcattacaagttaacaattatttttttaattaaggtcacaatgtttttacagaaatcaaatttgatgctgccagatttaatcagtattatggaacaatttcgtgccaaaattaaaggtcgtttgcacggcactggaaattcgggaaggccattttttggaggacattttgcgttgcgccgtgcatcaacggaacttgaaaaagatttttgcgtaaaattttttggtatttttgttttattaatgcatttttttaaagaatttttacaaaattgtgctcaaatacattgatcgctggttccaactccaattactaccaaaaaatatttcatggacaaatttacaaaatcatcctttgaattatgcagaagttatgcaacttgctgagcaaatttgtcccgaaatagcgcaattggatgaactgtttgatgaagtgtctgcggtgaaccaaacattggccgacattcccgaagaattttggctcaaatcagccgaagataaatggaaaggaatttttgtggcggatggtgctatagagggctacaaaaatttataccgagtcgtcagtgcagctttttcggtcattaaaaataaaaaaaagaaatgaatttttattttaaagattccgacatccaatgcattcgtggaacgagttttttcactggcaagcagtcaatggaccaaagaaagaaattcattggaagttgaatcggtgaaagcgctcttactggtgaaggtgaactttgatctctcgtgcgcggaaatgaggaaaatgatcagcggaaacaaaaaaatattggaaaaaatccattccggtgaaaaatacaaaccacttgaataaattttaaccatttttcattgcatataataaaaattttaaatgtccttggatttcatgaattttccccactatgtccttgaaaatcggcatacccgtccttggaaacggaggatggacgatgggagccctgcactaaactgaagattatgtatttcaaaaaacaaacaatgagaacctcatcaatgctcaaaaacattcaacgcagaagatgctcaacaaattgttctccgccttcaattcatttttgtctcaaattttgctcaatgctttgaaaatgccgcggcacaaaaaaagcggtggcacgttttcaaaaaactaaaaagcgtttacaataagatttcaaatgaatccatattcactcacccatcatttgggttgtgcccccttttctcaacaaattttgaaaacgccgcggcacaaattgcgacagcattcgaatcgcccaacactctgtgccgtggcgatattcagagtggcaatcaccgaccgccgacggttacttcgcatgcaccaaaggcactggcgtgatggcgacggaacacagcgaaaaacgatttttgaaagtttatttttggcaatttcttccaccgattggacgatttgtgcaatttttgtcatttttgaaggacgtgttgaaaacgtaaatcgaaaatccaaatttttaaaattttctcataattatgatatcagcgcaagaaattaatatcagtttggcggcataaa

SEQ ID NO: 16246 - DNA, 1147 bp, Heterodera glycines
  unsure (1)..(1147): unsure at all n locations
ttttgtgacaaacaaagccaatgcaaccgagccaatgattagctatgaagaattttttctaacccgataattggtgtgtgggggactaagcagatcctgaagaagctccaccaatgaaaacaacgaaatgaagctgaccttttcgtggaatcagacgtaaaagaaactataaatctctagaaatgacctaaaatggtctacaaaaaagccaatatgaaaattgtaaatatgtcttcaaaacctatcattttttgattttacatatttaataatgttctcctaaattttcaggttatttttctgcagcatttttttctcatattaccaagttccataattaatcttatagggagttcatgtaagggccaatataaacattgaaaggcctttttgtgacaaacaaagccaatgcaacagagccaatgattagctatgaagaattatttctaacccgataattggtgtggtggggactaagcagatcctgaagaagctccaccaatgaaaacaacgaaatgaagctgaccttttcgtggaatcagacgtaaaaggaactataaatctctagaaatgacctaaaatggtctacaaaaaagccaatatgaaaattgtaaatatgtcttcaaaacctatcattttttgattttacatatttaataatgttctcctaaattttcaggttatttttctgcagcatttttttctcatattaccaagttccataattaatcttatagggagttcatgtaagggccaatataaacattgaaaggcctttttgtgacaaacaaagccaatgcaacagagccaatgattagctatgaagaattatttctaacccgataattggtgtggtggggactaagcagatcctgaagaagctccaccaatgaaaacaacgaaatgaagctgaccttttcgtggaatcagacgtaaaaggaactataaatctctagaaatgacctaaaatggtctacaaaaaagccaatatgaaaattgtaaatatgtcttcaaaacctatcatttttgattttacatatttaataatgttctcctanattttcagggtatttttctgcagcatttttttctcatattaccnnagtccccatatctatagggagttcatgtaaggggccatataaac

SEQ ID NO: 16247 - DNA, 944 bp, Heterodera glycines
  unsure (1)..(944): unsure at all n locations
aaaaaaatattttctcattaatgaaattgagaaatatttcaattaaatttattctttattttatcattaatgttaaattgacagaattatttcaatttatttaattattcttaaaataatttaataatttaaaaaaatatattttaactattaaaaaaaactttttattaaatttctttactttcaataataaaattgctgacaaaattcaaaaaaataagactttaaaatacaattaattttattaacataatttctaataaaaatatctacaaaaaaaataaataaagttacgaaacagtttcttttattatggcaattttttatttttaataatcagaataaaataaaaaataaaaataactaaaatttcgatgtttcccacctgaaccaccggtttatttgctgggcccattgcgcgctcaaagccgcttgcttgtgccgccatgcgttgttccccggcggcaacaattcgttgtacagacacgtactcaatttgcgggcctgatttggtcgggaaacagctgaaaaatttgttaaaattttgcgtattcgaagtaattttataaaaattaatgcgtatccgatgaaattttttgtttgcaaaatttagcgaaatcggctaacaataattgaattaaaaaatgcttaaattttcttttcggggaattttaaatgtttaattaaaaaaaaagtttatttagaatttcaataaaatcttttttttaattattatttttttgaaattttaaattggcactttaaaacctatttaaaattatcagcaatttagatctttaacattttagatatttaattaaaaaattttaaagaatttttttttttttggtgaattttacgtttttgcggtagtggtaatgcacgagatgaaactggtgaccagnccccaacggctctcaaagcattgctttaacacctctggc

SEQ ID NO: 16248 - DNA, 2181 bp, Heterodera glycines
  unsure (1)..(2181): unsure at all n locations
aggtccacctctgggcttnaggggcaantctgtgggaaaaataatgacatatccagtaattggaccatttaaattaatgatgtccgataagtgtaatgtgtaactattgcaattgaccgaaaaaattgggcaatgcttgggccggaaaatgatcagagcaagaaaaaaaaactggtcgatcaacaacagaccgatctgttttttaggacaattgggacttatatacggcgggaatgaaattccatgattagctgagctgtgagtagttgtttttaagaatgcggttttttaaattccagcatgtacttgaaagcttatctgaaagagtcattggaattttaactatgattcacagtgttttttaaaataaaaattcaaatttggctttttttagaggggcgaagctctgctgaaaccccaatctccagtgttcataattatcaggattatcctaacggttaatgtcacagaaatataaattttttaatcttcttaaccctttattagtatgcaaaaaaggataaatgctttaatacacaacaaagaaaaatttttgttagataaaaatccctcaaaaaagaacaaactttttttgatgtacctaattttaaaataaaatatttattattttaattttcaattttttattgcccacttttcccgagtttttctgttcccagcatgtctcgaaacaggcttgaaaatccgtcaaaatgtccttcagacatggctcctgttcatcgcaagaacattgccgcacaaatttgcccgtttttgccgagatgatcatttcctccatcgtcttttcaaaagtcaattccttaattattttttatttaattattaaaatagaaaaagtgaaattctgtgtaaatttattaataataaccaattaataatcaaataaaaaacaataataattaaaaattgaaaaaattattaattaaattaaaaattcgaatcaattattgaccaaaggtaattaattaattatccaattaatttagcttttttaggcggccataagtggagagagtcaatgacgtaaacttttttttttggaaagttaaggagacattgtataaaatgtaaaatcttaaccaatttctgcaattttttcatataatcgcagtcatgtattattttttagttaattttataaaattatttttaaaaattatttatttcgatttttaatttaaactcaacctgctttttttgtggttgtgttgcattgttttcagctccaaatgacgtctcaaaaattgctactgtagttacaataaataataaaacatttttgtagcacatttaaaaaaaaatattttctaaataatttttttcttattcatttatttttctgtgtataaattatttttttcatatttaaaaatttaacgaggtcatgccaaccggacaatttttttattttcatgaatttatttctcaaaaaatattgtattttaggctttttttgaatatttttggcttaaaaaatgacttttaaataatgagtatgactcatgtcagggttttcgcaaaattatctttttgctcatttgacaaaacttttgctggttatatcaagaaatttttaatttaagcgcctaattagggtcaatgacgacgaaacagaaaaaatggcaaaaataattactggagctcgcattttgaggcatatgccttatttttctgcgcattagtttcgatatattaagcataaaaaacacattttccacttggttttaggcttctacgttgacttttattatgcctttttttgcctttttcgggattttcgtgccttaaatgccttttttggcattttgccgttttggtgcctttttggcgctttttaccgaaaaatccattaaaatgcaataaaattgggaaaatacacacctaagaaatgaccagaaaaaaatttcagaaaatacacccctaagaatttaaaaattttctcaaaaaataatttaattttttttcttgataaaaaattctcggtttaaaaattttccttattcgaaaaacattataaaatatttaataataatcatttaaatgaccaaaattaagtttttggttaagttttacgtgttttgctccctaaaaatccttaataaaaaatttttaaatgccttttttcatgcctttttcgggattttcggtccttttcatgcc

SEQ ID NO: 16249 - DNA, 2316 bp, Heterodera glycines
gtggactatgacggacaaacgctgtgctgacgggtgacttttgcgtgcgaatggtgcaattagtggacgcgaccgttgctcccccctcccctttttctctccccaattcactaccaaccgctctctaacaaatttgttatggcaatttgcatactttcgaggatactctctccctgtgcttttaatagccgaaaccgcgcggcctttccattttctatgttttcatcgccattcttcgctgttttgttttattatgtatgtgttttgcttcacttatccgggccatcaaatcgtatgcgatacattcattcatttcattttgctatgttctcttaaaaaagcacaacggacagataataattgttaaaacagcgtcaattccgtcgtcgtcactttttattattatttttttgcaattaaaaaatgtccgttgtgccgattgttcaatttttattcttcttcgacggtgtttagttttatatatttctttctgttgttcgtccgaccgacatttttggcatattgtttagtgtttgcaaatacattcattcttttttaattgtgctttttatttggacacttttcgcctaaggcatttccattttttgtcgtgttttttttactgtgctttctctcccttctcccagagtttctccattagttgggccaccttcgtcccttctctcattcgattagttactgtccttaccgacatcatttactgtatcatctacgattagtgactgattgtttttattttataatttctctctctttctgcatatttctctgcctcgtagtctctctctctctctgattgtcatctctgttagaggatatttacctttcgatttgttgtcagaatatctctctttctctctctctgctcattggtctttggtcgtcaccatcgcttaacgttgcaactcggttctttaccggaaacactgtctttgtttggtaaaatacggttacaaggttttaatattgtaaaggatctgataaaagtgattttctttgagagttggttctaattatcggtcgtcgacggaaatgcacttcgatgatccgttagtgggccgactggtccatggattcaattgggagttggcttggccttgtccggtcggatccatgttcttccgtccggtctctgctggccggtcaaaaacccgttttttagcttgttaggccgcttcgcggcctcagtcgggcgcttcgcgccggtttttcaatttttgttggccttggacgggcgcttcgcgcccgttttttaaattcgttgaactcatacggcgcttcgcgcccgttttttagcttgttaggccgctttggtcccgaatcccaaaatcggttttaattgcggatttttgtagtatttttaaatcctccatttattaattgaaaataacgttgaaaattaacaattgaatatttaataaatttaagatgaaatttacaaattcaaaaaataaataattaaattctttaatgtaaaaatttttttaaataatctacaacaaatcttcagattagttaatacattgaaaataacgtaaaaaatcatagaaaaataatttacaccggccggattcgaacctaccgcccccccccacagaagatgactcagaatccccaatcacacagggattcagagggcttaacgatgtcaaaagtaaaatctgatcacgtattcgtgatcagcgtcataaaatagccctaatgacatgtttttggaagatttttggtgaaaaaaatttttcaatcaaaaatcctgtcacccccctttggtcccgaaccccaaaatcacttttatttttatatcttttttttaaaatgtgataaaaatgtaaaataaaatttatattatagagaaaaaaattgcggatttttgtagtattttacttttccccaatagcttttcagaaggcagctacgaatttttttctgaaaaatcgaaaatttccagaaattctggaataacttttttcttttttgtgataaaaaactcaaataaatcccataaaattctccttattttgctctatttttaaggctttattcctggaaaattgatcaacccttcgatttggtatgaatttccaaatattaggtcaaaatcccgagggccaaaaaattgccaaaaaataaagaatttttaaaaaattccaaaaattctgaaacggaaaacaaagggcatattcgtgctcagcaccttaatttaccccagaaaaatattttttacccccatttttcaacccaaaaaaaattttcgaaaatttctagggggcctagctcgaaaatttttgaaaattt

SEQ ID NO: 16250 - DNA, 2364 bp, Heterodera glycines
  unsure (1)..(2364): unsure at all n locations
atttttcaataatnagggctgccaattttatgtaacccttattattcgaaattttaatgatatgaaaaaatggtaatgcaattaaaaatacgaatattttgaaattaatttgataattaattttgttctcagtttcacggcgattttcacaacatcagcgcctttgttttgaacagaactcagggcattttctgtgccgcgcaattgcgctctttggacgtgcctttggtggcggaaattcccgagcaaagaatgctccaattccgcgaccatatcacaatcaatgggaccataaccaaaaatcgtcctcaaattatcattctgttgctcaacgaggcattggaatcgtacaactccggtacggtagtaaaattcgtagagaacggggggggtggtgtactgatgatacgaatagcggcactttcacgaaagaaagtgtctgccgatggcactttcattcgccgttctttttgctttcccccccccccccccctcgagagcggtatttatttgtaactttttaaaatagctatttttctataattttagtagtttactatttatgtgccatctcattttagtggcgcccagcgttatttaccatttgctgaatggcacttcaaatatgggtgagagatacatttttaatttgcttttaactttactcgaccatcaattttagtgggcaccatcgtcgtccgtgccattttcaccaccgatttggacggcaacgtcgctattcatttttcttatgtaaatttgaagggtgccggatcgttacttcaaaaaacatcaaaataagaatttttgaccaaaaattattcaaaactttgcccaaaatgaatcatcaaatataaaaaatttggttgcttttgtgcaaatttagatgaaaaattattttattttgatggtttttgagtaaccttatagcaccatttgaagaacaattcatttcaaccttataaattagtcaattaacaaatttttaaagaatgaagaagtcgaagagcatcatttgaaatcggcgctgaccgaaggacaaaatttccatctgaaaatcataatgcgaagacggcccatgttccatttggagggcttcggcaaattcatgttcggcatcgaaacaatgccaatgtgggcaatccaatacattcgggtggatgaaaatttgaaattttcgaaaaaaattgaaaataatttaagatcgaaggcgatttgaaactgcacgaacagccacgcattgaattcttcgaaaagaaaggacatcacaaatgaacagagagagaatggaatgattgggcatagacggcacttttatatatgcgcaccatttttgattaaactttttcattcgattttttgaaattttcaaggaaatttttagaaataattggcaaaactgcaagatatttgtataaaacagggctcggatcttaccaactcactttccaagtgcataacgggggaaatgtgtgaaatccaagtacatataaaattttatcaacatgcaattaaaaaacaagtccagacatttgcgcctatgtccaaaatcgggttaaaacttacattttttcaatcttatatgtctttaaacagcgttaaatttaagaaaacttattttgttggtttattagggtcaaaaattattttgcttaaaagatttattattttttcaaaatttgctaatgatcaaattattgcacacaatcactttcgatcgcttatttaaagctgtttacatctgggattgaaaaaatgtaagtttaaaccgcttttggacatggcgcaaatgttgggtaaccttaacaacggtgatttttttttacacaaatggtttatattgttccgcggaaagaattttttgcaaaattttttttatttccttcagatagagaaggagaagctcccccgagaggaaggaagattaatggatcaattgaggcgacaattgatcggatatgatcgagcaaattgaaaccgaccaaaatttttacctcaaaagtttccccagctcgtccattttttattttcatatgtaaaaataccggtttccaggtacaatttggaaataagtacagttaacatttcccaaccatgtcgaatccgagataattttctctgctaattatttgaaaaaatgtcaaatatttgtaaaaaaatatgtaagtgtcaaaattaattttaagggctaaaatttaaaaaaagggtttttagggtcaaacatctaaaatagaattccaggggccgaatagagacttgaaaaagaaacattttcgctgctacaataatggttttcctggttttctctttggctaaagaacagggaaaataaataaaagcttaaaaaggatcccctcccaaaca

SEQ ID NO: 16251 - DNA, 2895 bp, Heterodera glycines
ttaacgaaatttctaaacttttcattttatataactactgttttatgattttaattgttgtaaattttttattagttgtttcgccattttattatattgttcaatttttttgaaattaaaacaattttttctcttatcttttgcatcatttagctgtatgctttgatacaataattttgcaaaggaaaggcatttttgattttttaatttaccgagtttcttaaaagataagccccagagcttctatttttcaacccctcttgaaaggggacttctattttagggggaaggggggggggtaataatttagagaggcttttattttttaactcccatttttaaaccgaaacaaaaacggcgacttttctaaaaaatttcgcaaaatacggaaatatttttttgtgacttttaataaaaatgtatttttttcaatttatgtagtgatatatttctgttttttttctcctgttatgtataacgtaattttacacataagctaatcattgttcaatgcatatttttcacaaaaaatgttatgacatcaaaaagatggtaaaaaaagatatttgattatttttatgtttctttaaatgactaaatgaatttttatatgtaaagtcaaagaaattttttgcttaattatttagatttatttggattttcattcctccgaggtttcttctccaaataattttttccaatcttaatccttaattgttcctttgcttattactattttcttacaaatttcggcataattttggtccattcttctgttgaatatatatttttttgtttaaattcatttgtcatttcaatgaattttgcacaccttctaatttttcttcatcagtttttgatttttgatgaagtcctaattctttaatccatttataaatagtcggtcaaattttttactattttcgaagaatttttctccattcttttgctgattactttttctttttgttttatttttctttattttatagacttttatgacaatttctatttctttcttttcttataaattttgtgcttttttctaagattagttggaattttattttcttcataaattctcaaaaatataattttaacataaataggatttttttatatgacaaaaatcgcaattctactggttcccagcaaataataaaaacctatttaaccgaaaataataatacttaagattttattaaatttaattgtacttggaaaattattggcatgaataaataaattaatatgatatttttaaaatacttttatcattaattcaaattttcttataatcgtcaccggaaatgattaaaatcattataaaattatagcatatattaaaataaaaaaataaaaatgcgatctattatttttagcaaaatacttgcaataataaatttaaattttagctcgcctaataagtaaattaaaaaaagaaatatttaaaatattaatatgtattgaaaaaaattcttaaacatatgacgacacgaatagactttattaaactataaacaaataataaaatatctttattttggcattgagataaaaaattattaattttacttttttagtagaagaattggcgaagaagctgagcttagcactcaaattctatgtatgaaatgaagcccagtttgtagaagcaggtagcggctaagtcccaagttaaaaaaacgtaatgtttatgaagcttgaagcgtaaagtttaccaaaaaatataatttttcgtaaaataaaataaattgtaatataaaaaaattgaattggttcattttctaaacacttacttacctgaacacaattaaaatagaaaaattgatgtaaaataaaaattaaggttaaaataatacattgaaaaaataattaaaaaataaatcggaattttaaaaaatctaaaattaatgatttaattcattatcaatgaaataattatctgataagaataaagggtcaaaaggttgaaaatatattttcatttaaatatataattaaaactgatgactacgagaaaaactcaaaagttaaaaaaaaacagacaaagcgaatcgcagccgctgcaggatgtgccggttttgaagcacgaaaggaagcatgaatgacgattttgagttttggcataaatgaaacaatcttttttgaggaatcacgcgaattaataaataaattcaaatatcaaaaaatgtgacagagaaaaacataaaaattataaatgcaaataacactcattttaatttaagaagaaacaattaatttaaataaaattctgtcgtactaaaactgttaacacttttaaacttatttatgagaaaaaaccaatacaaatgtaaattatattaaataagaatcgcaaaaataatatgtacaaaatatgtaataaattttttttttgttattttttgaaaaaatcatagaaatgtcgaattaaaagaaatattaatatttaaagttttaaatctagtttttgtaaaatcgttaaaacatagaaaatgcgtcagtgatacaataagtttaaacacacagaaacaaaactgaaaggaaagtcattaaactttagaagttttattcgaatttggtcccgaagttcgaattgactgaagtggatgccggattcgtgatcagcgacgtcaaaaacctaggagacttgtttttatgacatttaaattcccactgacgcatttcaagaaacccttaaaaagccgtatcaaaggattgtatcgccgtttttttagcgcagaattgacatttggttcctttctaagttttaaataaaaatttccaattaaaaatataatttactattttatttgtttttaaatcctaaaaaaaaccgaacctggactagagtaaaaataaaggttaatctaaaacctaatgggaaatata

SEQ ID NO: 16252 - DNA, 1816 bp, Heterodera glycines
actactagaatatttatagaaaaaactaaaaaaaaaatttattacaccaatgaaataatggaaatttttccaaagcgatgacaagaaaatgcacaaaacataatttcaaagatcatgtttattctaaataaaaagaataatattaatttcattaagatgtttaagtgcaaatattatttgataggaagaaagaagtttgtatgatttacctaaagacttaatcaaaatattttatgaacatgaataaatgaaatataaaatgatataatgaaaaacaaattaatatatgtaaatgaataatcaaaagcgcctttttacataaattcctcatgtagccggggagaatgaaatattatatgcatgttcgagtttagaaaaaattataggtataaaaattattttttataacgcaaaagaaatcacaggacattcattgacggttcaaaaacaataaagaagataataaaaatttattaatattgaaagaaattaaaaaagaaatttaaattattatgtattttttgaaaatgttgccatcgacacaaacgagcttatgatgatttagcttaattaaaggcaaaattttattacattaattttctgtaaatttggaacaaataaaaagttacgcccctttgttttccccaattataaaacaacaaaacatattctcgaaattattaacctgttcactctcagctacgcaacaatctttcaaattcagaatgccgaacatgttaaaaaccaaaaaatgtaagttggaactgtgtgaagtaagcttttaattggaatcactggaattgtaaaatgtttaattaaaaatgatttaaattaaaataatatttgtattaaaaatgtaacataaacaataaaaaaaattacttacaatattaaaaattaataatttaacgatgaaaaatatattaaatatctcttttctaattaaaaaacaatctaccggtctaaattaattttgtaaaatgactatcccgaacacttcttatgaaatcatcagttgagccaaaacgattacaccaaccaagatgaacttcttgaaaacatcgataattggcttgatacaattcaagaaataaatttgaccccgcttacccaaattatccgtcccaacaagaaaatgaaattttttttattatcattaatggagaatttcaaatatcttacatatttaaatattatattattaatatttcgaattttatagaattaaaccaatagaaaatttttagtgtaacaacaatggaaacataatttctaatagaaaaaaatgaagtgcaaaatttttaaaaatatttgaaaaaatttactatgtctatcgaaaaattataatccttgtcaagttacggtaattttatataaaatctatttaaatacaatatcaacaacaatctaagtgaaataaatgcaacaaagagtttgacgtaaaaaaagtcatacgttttgcaaaatcattaaaataaaacgattggttttgacgtaaaaaaaaaaattatttttgcaaaatcaaataatcataacgcttgagtttgaagtaaaaaattcattcgttttgcaagagcacaaaaaattcaacaaaatgattcgacagtaagaaataaaagtctagtagaaggttttttaattcaaattcaaattaataaatatattttgacaaaataaaattaacaataaatggtaaaaattaaataggctgtcaacgccaagacaatcaattaataatttaatcaattaccctaaatatatggaaaaattacaaacgtaaaaaaaaattaaaaattcgtaagagaaaaaccaattc

SEQ ID NO: 16253 - DNA, 942 bp, Heterodera glycines
cggtgctgggacattagtcaaaaaccatcaaatggaaaatttttgacagaaaattattcataatttcgcataagatggatcaaattttataatcttgatatttttcggtagccctaagtgttttctactatcttgcaaaatttttaaaaaattcttaaagtttaaaaaaagttatgacctgagaagctcaaaaaaccatgtgtttttgaacattttcagtcataactttcttgaagcttaatgaaactttttgaaattttgtaggctaatagaaaacacttaggcctatctaatcatatcaagaattaaaaatttagttgcttttgagcaaagttatatcaaaaaatattttcatttgatggttttttgactaacgcccattatgatggtttttgactaacgtcatagcaccctccaatcgcgcaaataaaatccggcgttttacaatttgccgaaaaatacaccttttaagctggtgttttacaattgtaataatatctcatggaaaatttaatgtaattttaagtcaatgtttttcaattgtaactgtgttttaaatttccggaaaacgcgcaaataaaatccggcgttttacaatttgctggaaaaaaactaaaaaattgcataaaaactatcaaaaatggatttaaccttaaaattgccaaattttctatttttgtccgttttataaactccttccgggaattttgtaatccattggcgaattaaggccgacgggttttgaaactttggagattttggaagcgaacaaataccccaattgccaaaataaaaaaatcttaatattgataaaaaccccaaaaacgacaaaaacaattttttaaaattgttttgaggtgtatttttttaaaaaaattagggggtatagttttcggtttttttgctgatcctgtagggttgcgcataaaaatttttaaatct

SEQ ID NO: 16254 - DNA, 2129 bp, Heterodera glycines
tcggtataaggcgaagaaatgtccgagtgcaagcgcaagtccaaccgtcactgagcacaactttcatcatccacaacagcagaacgggaaaaagtgtgcagccgatttgacgacgatgatgagcaaacttttgcagcaacagcagccgcaatcattcgaatcattagcattgtcgagtaattaaggaatgggcggacgaggagccggagggaaagagattgggtaactaatcaaaatcacatttggggcgggggggggggggggggggtgccacggagtccaaaaggttccttcatattttaactaattctgaatttctgattgtgaattactattaaaaaaatttcgtgaaactgaattcgggattgacagtgcttccttcccctgatagggatgagagtcggtgccaaaaaaagtaagggataaaaaatcttccaaaaaagcatataaggcggatgcaaaaaatgatgagattgggattttgaatatattatttagggaaattgattacatattacttacacatttatttcggaataaaattaagtaaatattatttttatcttggtttaaaaataattggctttttctttttgacagaaaaaaaatgtttcgaaaatttgaacccagtttttgaggaatttatttttctgtccggcacttttgtcaataattcagcgtttttgtctatattttgaatttttgtccatattattccggccggtctctaataataaaacaaaatggaaactgcccattcttcaccctctgataggtgatgatccgcaacagctgcaccagcaaattgccatgggcacaatggcacaataattgcagccaactctggcacgaatggcgcccactgcagtggcactttactcgctgattggcacaactttgattggccaaccggcaacaatgggcgctggtgtcgggaacaattcgtccacaatggcagccacaacgatgttgccttcccttttcgaccaaaccaccaaaattgccaaaaactgcatctttgacaccaactcatccgccgtggacccaactccttttgtcgacaacacttttgccatttttggcttacgtgtggatacaccagagggatttgtttgagtttttagataatttagacaaaaattattttgaacctcctcagccaaaaatggaaatttgttattaaatttcaatcaaatttgccaaattttctcctatggcgcctattaccaattttaatgattcgcttattaaaatgttggaattatattaatttaaatttttagacaacaaatgacgacgaaggtgacgatgacggcactgatttgaccataacccgaccaaatgcattaatacttggaaaatgtgaatttttggaactttagccagtgaataaactttttgaccatgttatgagcaatttattattttctgcagtgtttttttttttgttttttattcaatattttcttaagtatttattttattttttaatatttataatttaaaaattttgatttgaatgcgcccaaaaaattggcaaaaacttcgtacaacaaaatgaagaaagttgagaaatgaattggtgagaaagcaatgaaataggaaaatgaaaaaaggatgacaaaaagcgattattaaatcatttaatttgatcaattcgtttgttgtgtcgttgtcacttcttcccactcgcagctgtccaccgtcgccgctgcggtgccgtgggcgcctgccgcttctttcctcaagagctgctccctttggtagtgcacctgcggacccaccccttattaattgtgcccaatttccgcgaagtcgatttgtgcatgtaaccctccctattgtacctatatatgtcgctgagctaatacgcggaatgatggagtacagatgaaacggagggtagttggtcatcttgggacattatgagagaagctacatttcttctcgtccttcatcataatataaaattaatatttttttattagaattctttcacataattgctttttgaactttattagtgaaaaattcagttttatagaaaaaacaaaatgcggaaggggggtggatggactgctcgctcttcgcgtcgcttccccccgttgctgtcgccctgtcacctctcc

SEQ ID NO: 16255 - DNA, 2016 bp, Heterodera glycines
  unsure (1)..(2016): unsure at all n locations
accaaatccaacaatcttgatantcattcgaaagtttaacatgtttagaagctaattctaagctattccttcgcgattagtcaattaccaaaaaagttataacatgaaattgcaaaaaagccaaaaatttggaagttttttattaataaatttttacaggctagaaaatcttttgctttttgcaaggctaaaatagagcacgtgaagagctttcgaatgatatcaagatcgttagatttggttaacaacaaaaaaagttatcgtccgaaaaaacagaagcctgatttaataaattaacgcaatatttatattaataaaatttgaattaatatcagttcacttattttcttcaattatttgcagaagatatgtatagacagactcaactgattttttaattttttcagaatttagattgattattcccatgttcaccgtaattgttccatattatccccccccccccccccgtatttaaggggtgctaggtcatttcttaaaaactgccactatgggcgtttcttaaatactgccaagttgtagtaaaataaaaaatgtaagacatataaattcgtatcttggcccaatttcatccaaattaataattattggtatcattcaatagcattaagtgttgtctatcagaatagaaattttgaaaatttttttacaaaattttaaaaaagttatggtcataaattttcaataaattttcagtcaaattattttaccagaacttttttaaaactcgatggaattttttaaaattttattcataaatagagaattcttaggactatcgaatatataaatttattttctcttaattgcattttaatgccttgaaaattttaattttttctggacaaaaaattctgacttaaggttttgtggagttgaataaccatatctttttatatacttaagtaaaaaatttaataaaataatattctgatagagaacacctatagctattgaatgataccaagaattattaatttggttgtatttgagctaagttatgaatttatatgtcttacattttttattttcctacaacttggcagtatttaagaaacgcccacttggcagtttttaagaaaaacgcccatggtggcagtttttaagaaacgacccagcacgtatttaaggcatgttcttgacgtcgtcgtccccgccgggcacgggcatcggcattctgttcctgacggcacttctctgccactgctgctgctgcccgtccatgtttgtttggtcgctgtgctaacagtgccgttcggccacctgttggtccgatggcttggcaaaatgcttctgcgcccaaaactatcgtcgcttttgttgctcacaatcagcagcggcagtggcggtggcacaaaacatttgacaaaaaatacgacgccggcgacggccgcgacgaggacaaataagccgaaattgctgggcatcactaagtcaggagcagaggacgataattggggcaaagtgacgcaatcggaccccaaagacaaccgattaaaggtctcaacaattagtgccattctttgctttatattaccggatttgcgggacgaaaaaaatattttcgaaagggtttttttcaaaatttcagaccagcgagaaaaagctggaattgttttctggtttgtgctaaaaaatggcacatattttttgcaccattttggaatttaaaatctttcaaaaccagttttctcgacggaggcgctcaagaataaaattaaaaatttaatttttcaaaaacaatttagttggaagttggcagaagcaatgaaaatttgacgaacagacaaatgcgtcaacagcagctctggctttgaattagcgcgaagaaatattcgtttttggcgaaatatattttattttttattttgatttttgacatttttcaccaagatgcttcataatttttgcttcaacattttcgatacagtgcaattgctgaaaaacaatttacaagttaaatttatggtgctaccatcgctacgaccctcataa

SEQ ID NO: 16256 - DNA, 2990 bp, Heterodera glycines
  unsure (1)..(2990): unsure at all n locations
attagtcaaaatgggggtgccgagtttcattataggtattagtggtacaaatgccactaattagtgacaaattggccaccctaggcccattctgtattggctggcactcgacaaaactcagagcgtttaacaaacggaaaccagggaatttccctaagtcaggaaccgggaacggaatcgctcccgcccctcattagaaatacctaactaaccgccttttgtgcagtccggtaaacattgaagcaacaaacagagtgtgccgtgccgtcccaccctgcggggaatgggggggagaggcgaatgggaggacaaaaggttctttctttgtccgttttgtgacgattctgcggatattagctgacagtgtcctcccgttaattccttaatctgttcaaatcgcccaccataaaactggcgttcagcagctcgcgcacgcatcacgggagacgagtgggggtggggagggggccagggagggacggcggacaaggccgacggggccgttgggtccgccctgcactcctccgccggctgtgtcgcgcattaattggttttctgctgctatcagcggggaatttgagcaccgttcccggcgccatgaccccaacatttttttttgccgggtaaagcgcgagaccggtgcgggatttcgcgggatcccagtctataatccctcatttttgaaaaatgagggggttatgggattttgcggaattaatgtcgcgggatttggtaccaaaattttgaatttcaatcccgcagcgggagccgcaaatttgaaatttccggtctatcagaattttggttgtttgccttatttgcttaaatgctaatatgtgtttcgcaaatggcacttccatcaaatgttttcccaattcaaattgagctgtagtttgaaattaggaaacagaaatgattttttaatggagaaatcccaattaattaactaatggctgcaattacaaataattaaatttcagcttttttacaatgaaatgcagaagtaaatttttcatgtattatttttgaatcttttttcattttatgacaaataaaggaaaagtttttgactttttaatagctatcaaaaagcattttaattcaaaaagtcaaaaatagtgatttgtagtgacgaacattttgtttctattttttattttatttttcactttttgttttggtgacacttttaatttgcgcagcggaaatggcaaaatcaatgcctgaaaaatagcatcaatttcataaacaaactctgactaaatattgtaataataattaatcaatttttcacgttcgcttccgctgaatttttttattttcccaattataagtgtatataaaaagcagaaaatataccaaatacaaagaaaaggcattctcattcaattcattatctctgaaaaattgaattggcaaatttctaagatttgccaaatttaagtttttgatattggtttcgattagtaatgtacaaaatttcggactcagtctcgaaaattgtgcgaaatttctgctttttgaactttgaatttcgtattggtctcgctcattgagagactcccgttcaaattctcggggtttttggccttttcttcaattctcgactctctcatcatttggctttgagtctcgggataatttcgcttaaatgtacatcattaaaaaaatattcacttataattatcaccatcttttttcaaaaaatcaaaaacaaaaccaacataattttctctcaaattgtccgtccgtttcgtctcccttcaaaacgtcgcccgaggggcgacggcggaggacgtcactcatttaaccataaccataaccaataataataatataattatgaaattgaaactgtcccaaggttattcaaaggcatgcgaatgaataatgaaacgattggtgatgaccatcgatagggcgaagagggtgaggggggggggggcaattcagcaaacgtttaaaattaaaaaatgcatcaaaacggaaatatgcgtaaaatttaggcgttcaaaaaatgaccaaattttgcgcaaatctcgtattttcttgagtaaaatagtgacattctgccataaatttacaaatatgagtttatttaagaaatcagaacaccgggcctaaaaataagattttaacaatttttttgcggcgcatttttccaaaaaagttctggtgaacgggcgaagggagggggtccgaaggcgccgcctgaaaaaatttgtaatttttaatacgatttgctcagacttttgtcaaaaaatgactaattttgcgcaaatctcgtattttcttgagtaaaatagcgacattctgccataaagtttcaaaattatgagtttatttaagaaatcaggagaattttggtcgctacctccaaatcaggacatttctgacaaatcaggacagattaatcggttttggcatgatttaactccactaacatttttgcgggattgttgactgggatcccggaaaatcccgcgcgggatcccgtcccgcaccgggctctactccccgatctcatattccgattaccgacaactcagcttttttttgtcttgggaaaaatgcagaaaaactcaataattttccattttttcccaaagtgttgtgccccaatcatgggccggccctgttcttagcccaccggttctccggctttaccatcgctgtgttttactgtccaatgtcatatgttttgcttctctctcgcctcccctctacagtattccaatcatccccattctcatgagcataagccaatgatgttcgtgcttcttccatcccattaaggtcacacggcccaaaagtccccccgcccatcccccgggggcgatgttcgcgcagattatcccccatcccttgacggggttgacccccgcttcctttatccgatcatccccccccctcctcccccattccttttgtcttcgctatgtttaccgcgattttgtgtgtgcgcccactcganggaggctctaaatgtg

SEQ ID NO: 16257 - DNA, 3284 bp, Heterodera glycines
tcgctacaacaaaataatgccgacacgtgatagtcgagttcttacgcgacagctgcgcaaaaaatatgtgcccgtgtgccacaaagggataataaatgagcagtatgaagtcttcccgtttggatatgaataaaaaatgattgtgattaaataaaatacatttaaattggctcgtccgttcttcatttactgtctgactttcagcgaaataccttgaccatgaatcggaaagttttatctgtttatgttgaaatcagagaaggaatgtccgacaaaagtggcagcaacgggaagaacgacgacggcggcaacggtaacaagaaaaagatgggaaagcaggcggacactcgaaaaagaagctacccgctccctcttctttcttgtcgcgcacggcaaacatggttcgactatcatgtgactacccattccattctttttgctacagggtagaagcagtcgatcgcattgaaaagaaatattcaaaaatggaagaggagataggcggtaaggaaagcgacgaagacaccattgactttttcgccgatagcatcgaagaaattatggaaaagtgtgtttaaaaagatagatgtgttaaaccattggttcaacctttattagaattcaccgttcggaagagaaggtgaaaaattggatgaacatgcacggtcgtggtgaagccgggaccagcagcgctgaatgtttgcctgctcaggctttggagaatgacaacgcggattccagcaacagtgagaaggatgctgatgagccaacctcaacggtctacctggaccgcaaaaaatgatagaaaagggaaattcgtatagaccctctctatagttagccccgaataagcgcaatttgttcgagtaaaatttattcagcaacaatcgtatgtatgaaataattatatggtctgtcaaaaaaaaaatagacatttatcctctttcgctttggatttcggcacttgcgacacgtaataattcaatgggaaaaatatcgcggtggtgaccaccaccaaactgaacaacacaaggaaggcttgggtactttaacatgacacgatggcgagtgtaaaggtgttgctgaaccgtgattcctaggaatccacggtatgcaaacacctgatttgcaccgttgggacacaaggcatcagggataattttaatatttctcctaaggtggacagtctcaatgtccaattggctcagataggcaaggttctcagttcgtcgtttctgtagttgcttggtcagtcgatagggaccacagttattgaatcggcacagcactctcaccaagttgcagtctcgttttcgcgttcgtcgtcgctccaatagttgaccaaatccaactcgtccacgatcaggtccatgttgttgttgttgttgttgttgctgctgctgcgcgctagttcgcaaaggcgtgaaagacacagcggcgagtcgcccggacaaatcttcaggtccttcagctccacatacagaggttcgctccttaaaaatgcaaatggaaatattaatgtttttatttttagaaaacttaccatactattccctcgaacttcctcttcggataacatgttgagtacagctcaacgtcagcaatcaattcaagcgagccgtcaatatgcacaggttggttcggatgatcggcgtttgcaacgtgtacacagtccacagcacaaagcgggttgggatagagacaattcccaccttcaggcccacttttaatttcttctttcaagcaggtgtacagatcgtctacactgctcagcccgtaactgtcgatcagataacggattgccctttgcatgcaataagcaggtaaatatattgtgacaattatgtaaaatgacaatagcttttcttaaaatttaggaaacaaatggccaactgaatccaaacaacaaaaaatcgttctttaaatactccgactacgggctccaccactttgatcactcgatgttgcagtttcatacggtatgttcagcaattgttgatgttgggacgaataagcgtcgtcaatgaacgggctgctgtaataatcggcgctatcggacacgttaagcggactcttttggtttactcgccgtagctgtttaagtatgtatgtgcacagtacaattaggaacagattgaacaggtacgatatcggcatccaggcgtccgacatgcgtagatgggcaaaaacaccgcggctaacattttggtctttgggtttataaattagataattaaagcggacatcatttgaattggttacaaaagttagcgcacgattcccttttgcatactcgccaatgtgaaatttatagatgcgctggtctctgatcacaaacacatggttgtccaccaaagtaaagtcgcttttatctggtggaagaaaagcgacaaagttgctcttcaagatcgtatgtgcggaagattggttttttcgaagccaccaatgctccaggtattcaagctctatttcgctgatccgcctctgatacttatcgatcagaaacaatcgacccgataggtgatcaaacacaacccgtccatgtttggacagtcgttgcacaatcttatgctggtgaccacggaagatagtagtctcaccagattcgctgtcttcaaaaaaggtaaaactatgcccattgtattcaaaacaggccaatggtgacattttcaccaatgatttcatttcgaaaaacacactgatagctgtgcaaagtgtacacattttgaagcgaaacggcccattcgctgtcacgctcacatttctctattcggcacgctgtattccgactataaccaaagtgttctgctgctgtagcatcttttgaaaaggtacgatatttgccgctgtcaaaatagttttgattgtcaaccgtaaaatctacatttatcagctccgattgcaatcgtgacggcacacagctgaggactatacctgcgtaaaaaacattcatgaaatgaaccagcatctttcttactgcttaggaaacgtgagcttttatagaccgttgatcaagtttctgacaaaccatttcacgaggtaatctgccatgcctcgagtcttgcgcaaagtctcaatcacacggcagaaaggaatgccagaacatcggcttgccaaaaaatatatacaaaaatggccacacgtatcggatgtgggaaattgaatttgatctttagcgaccagtacctctttaaatgtgttgaggtaggctgctaaatcggggtttgggggctcaccaacacgggaggaatattcaacgcttctatggcttaaagcatagcaag

SEQ ID NO: 16258 - DNA, 1853 bp, Heterodera glycines
attagcgaagtcaactgtttaatttaatttaatgcaaattaaatcaatcgtataatatttatattctcgttgagtatttgaaaattttttttcaaaggtttatttatcaattatgattgattgctatgattgcctttacacaaatgtactgaaataataagaattacttcgaatgaattacaagcgaaacaaataaaaatgttgcatattaacaaaattattaaaattttctaagttgcccacatcaagagctgtcgaatgatacctaagtttatccgggtttgatcctttcaaaaggtaaggagagcctcattttgttcatttttccgaatttagaactggtccaaaaaccggttaaaattaagcgagtaaaaaattttgatggcttcatctttttcagcgtgtaagaaaacctacaaaagtggtgggtgttgagcaattttgagtttggggctatgattaatattttcctcaatcaatatttaaattaaataaactcaaaaaatattggaaaattataaagaaaaattatgaataatataatgagtagggttataagttgtatgcactgaaaaatgccaaacatgcgcataaaatatgcactaaaaatcctccaaatattgcctaaaaaccccaaatatgaagtaaaatatgccttaaaaattacccaaaatggcttttaaccctcaaaaaatgccaaaaattgtgtttaaattaagaattaaatttaaaaaccaccaaaacaatggctaagtagacaattgcaaaaaattttgattttcaaaatttataaatttttattatatgctaaaacaaaattacaattttatataaataaatttttttccaaaagttcttacataaatttaaaattttttcgctttaaagagtgtgtttcgatccttagggcgtgtatttttcgttttttcgcatttttcttgtaaaatttgccaaaaaatgaccaaatgctctaaaaacgcaaaaatggccaaatattcatttattctcaacccccccccccaaaaaatatgctttatatgcacattaaaaacattcaccgaatcaaaaaattttaatgcagaaatgctatttttgagcccctttctttatagcatatgcgcagaaaaaatatgcaaaatcatacaatttataatcctttcatgagattattagttttttaaattttatttttaattcttgtttatttatttatatttttgggtgtttgaatgcttagtaaataggtattaatttagtcgttattagtacctaggaaaacctataagtgtttttgtgtgattttaagtctgggacctattctaaatttttccctaatgctcttttttacctaaaattatttgatgaaaaacattacgttttggtaaatgttatttattgacaatttatgaaatatttttttgcttcaaaaaattcccttcaaaatgctgtggaaactctccagctctcctatctttcactctctctctccccccttcacgcctcactctctctctctctctcactactttctctctcacctctctctatctcctatctttcactctctctctccccccttcacgcctcactctctctctctctctcactactttctctctcacctctctctatctcctctttctctctctctctctctcttatctctgtcttataatctcactatttctttaattttctctcttttctcacttgtctaattaactctctctctcatatcaattttccacctctctactcattttcaaagcgaccccgcgggcgaacgtccaccattcattttacaacaagaacatttaatagttaacaggaaacaaaatttctgtccttccttt

SEQ ID NO: 16259 - DNA, 1379 bp, Heterodera glycines
gggaaattggagccttgcaaactcaaaataaaatttaaaaaaatactactacaaaattaccgtttataaatcatattcaaatataattagttaaaagattaaattacaaaccaatataaaatatttagcttgcttaataaaatttattttgctttgcttgattgctgtggctttgtgtgtatacggcttctagggccgaaacacaaataataattaatttaaataaattaacccaaagagacaccgtactgatgaggcccggtctctttcggttaaatttgcacgtttcgcgaagtgcccatttttgcactgtcgcgaaacgccccatttttacaccatatttgcactgtcgcgaagtgcccaatttttgcatttttcgcgaagtgcccaatttttgcactgtcgcgaagtgccctttttgcacttgtcgcgaaatgaacggcagcaccccctccttttatcgatttgaaaaaatgaccaaattaaaaaataaaagatttttcttttaagacactaaacaaaaatgtttacaatttttaatgtttaaataaagaaaatcttaaagataaggacactttgtttctaagtctcaccctccaaatatggacaaatcttaaaaatttgtacatttagcatcgctgttaaaaacataaaacaagggtttttctaaaatcgtcaattatttatacattttcgagaaaattggtattttctcgccacctgtcatttgtcccaagactttttcacctgactgtaattggaatacattaaaatatcatttatacccaatgcaaagaaaagaaaattatgttaagatggattgcttgaacattaccaatattagcacaattataaaggtaaactaatctatatgcagcaagaaaaataaataagatttaaaattgactagaacaatatatgcttatgaatagggctgtgaattttagtgacaaaaaatcccgaaatagttaactaaaatagtgagtaaaaatgttaaaatagtgacaaaatagtggcaaaaagtccgaaatagtgacgaatagtgacaaattttcagccaaaaattgagcaaaaataatttttattcactgattgcagttgcaaatgagtaggactgggatttttaagaccaaaaaacccaaattagttacctaaaaaatttttaaaattaaaaatttttgccaagaaagtaaatttttgagaaaattttttttcttttcataggagtatattttgaaaaattttagctcgattcttaggggtgtatttttgaaaaaatttttaggtcgattcttaggggtgtaaggtttgaaaaaatttttaggtcgattcttaggggccctggggagttttattgcatttttgttaaggaattttcc

SEQ ID NO: 16260 - DNA, 3341 bp, Heterodera glycines
tgtaaattaagtgaactaatgatcaaacaaacgagccttttggtcatcgattaattgaatatcagaacctcctccggtgccgtgttcagattgacggcgccttccatccgttccaccaccaatttcagtgtgtacgtagtcgccatccttatgctgtccatcagatttacttttcccggaggcaattttcttcttccggtgccccgcttctgctgcacatattccatgggaaattcctggttgacggtaaataacgtgttggcgaattgcattaaaaatttctgggccattgcatttgtgtccaatggttcagatgggtttgacctgaaagaaaaagacaaattggactaattaattcgcctcccctgggctttacggcttcttttggaaatcgacaattagtgaaattgaagtgataatccgttgatcagaagtgaacgaaaacggctgaatctaaaattagcaaatgccattcattggtttgccttgagaaatgtttccgctttgacctgaacttctcggccaacttccactttcgtccattttctctggggcatggaaaagccgatctccccttttccgacctgcgcatggttagccactgagaagtgataatggtgggccggtccaccggtgagaacttttacgtatcttgccaaaggttagacttattaaatgggtcattaagctaattgaagaactttgtcaaatttgcatcgatgtcgctatcattcacctaaactttgttcgtcaatgactcagcaggtgatggaagccttgtcacttttaagcgaagaatcgatctgcttaaagatgtcagcaataaacaaaaattgtgcaaggaccaactcagaatagtgaaaatatggaatgataatcatattatttattattttaaaaatatgtgccaaaatgaaattgaaattatttacaaaattttaaattatggcaattaagagacaacattaattgtgcagaaaatacagccccaatgtatagcaaattccctgggtttggaaaaatatcggctcttgtctcgtgacatgggaccgagactctcgaaccaataaataaaattttggaattattatgagttcataattgcctatattctaattaattaattaaatttttacattattaacttcaattattctttcacatttgcactgtacggagttcccccccccccccccccaattcgacctttcctcttcggtttcctttgaatttggatttgcgaggtgaactcccaggaagcagcagcaaagtattaaaataatattcattcttttcatttcttggcttaaaaatcgaaatatgtaaaagataaaaataaaagaaaggtatataaatatttcgaggagcataaatgggcacaaaagcccaaaacggcaccaaatattttactatttttaaacgggaaaattttttaaattgaaaacaataattaaaatactatcgaaaaaaaaaatttcaactcaatttttgaaaaaaataaattttcggcaatgagtttgtgaaaattaccaaattttttacaactttatgccgtaaatttgtaaaaaattaccaattttaagatgggttttttttgtaaatttttaggtctatttttagggtttccttttttattgtattttgtaaagaattttctgaaagtcgtaaaaataggcaccaaaaaaggcgaaatatgcaaaaaaggcatctgcctaaaaatgggtccctctttagaaataataaatgctatgaattgggatgaatgaaaatttatgtgtaatatctcaattatattgttatcttattgtcaatcaattcaaatctgcatgacggacctaaaattcaataataataaaaataataatatatttaaatatttgtaggataataaatcataataattaagattggtggcaagtagagctgagcgggatcgggaattttgggcaaaaccgggacttaggtactcatttgtacgtttttttcagtaccatcccggtctcgctcagctctagtggcaagtggtagctcaagtggtcctctttatatttaagaaaaattcacaaaatgatctacaaaaaattgatattcaagaacttaaatcctacctatttttttgcaaattaaaaagataatataaaattttggactatcgaaatatataaaaaaactttaaattatgttgctcttcaaaaaattcaaaaatattaagtattacgttttaatgtggaccgaataatgttttatttttccataaaaattgcttacatatcaaacaacaattacatttaaatttattaatattagtgctgcttttttaggttcgccccattggtatttttagattcgaccttgcatcaatagaagcaacaccgacattttatattttcgattccaatttctttcagctgtatgcattttatagggaatataaatgtaaaaaacatctaaacatttaattttatgtagaaacatattcaaatttaattaatattacaacggatgcgattttgttgtttatttgtttttaaaaacaccaaattcactcactataaattagccggatatgccttgataaaaaatataaaattttctctaattacaattttaattttaaataattgctaaaggggaagatgcatttcgtgtcgtttgtagcgcttcttacagtatttctggccgttccatgcgtctcgatgaattgctgtggacaaatcgacaacaaatatgtcattttaccacgaaataattattcggtgttttttgtttccggagattttggtgaatttaaatattataattagggtttccatttttagtcaaaaaaaatcgcgaaataggcacctaaaaggcagaaaaaaccgcaaaataggcattacattaattaggcacaaaaaaaggcaaataacattttttttaggtagcaaaacatataaaaattaatcaaaaaacttaattttgcttatatttcaattattttaacgttttttcaaataaagacaattttaaaccaaaatgtttgccaagaaaatataattaatttttgggaatcagtttttgtgaaaacttttttcaattcttaagggtgtatttttcattgacttttccgaaaattctgaaaaaggcgccaaaagtggcgaaatagtcataaaaataggcaaataggcattaagcataaaaattccaaaataggcaaagttaggcattataaaagtcatcgtagacacccaaaccaagcgaaaacgcgtttttcgtgcttatctatgcgtatcaaaagtgcgcagaattttaggcattttcctaaaaatggaagccctaattttaatccctttttaatattt

SEQ ID NO: 16261 - DNA, 2206 bp, Heterodera glycines
  unsure (1)..(2206): unsure at all n locations
aattcatgtcgcatgcaggctgtgtcaaatgtttgggcagatccttcggaagcatgactcccacacaaattcgcttacgcatgctgaacggattaggagagcagaggacgaagtcaatcagatgctcgcataattttccattgagaattgacttaaaatttattttgattaagcatataatatttttttaagtattcttacattattcaacggagaagcgaccgaaaagttgtccgtgaccaaaccgttgttgaattgcgaaaagcacaaaaattgaagaaattcagcaaagttttgatcagttgacagttgatctttgatgcgaaacacaaccgagaacaattggtccttgtcgaaagtcactttccgcagctcacaagccgaattgaatttctcacttaacattgccttaataaaaatattttaatttaatttatttaaatgatgatcgctaaccagcctattcttgaatacggtgtactcatttttccttgactgacgcaaagtttcaaatctccaattgattgggctgatcatcgagagccatcgcttcttttctattttagtaatttaaaaaatgtcagtctaaattttgtacctgcgctgccaacaaacaggcgcatcattgggatgcacatgatcagctcccagatcagctctgctgggagtggtttggaatatttagccttttttgaaattgacatggagcaacaatttgatacacgcttcatattcaaccagcaagaaatgacaaatgatttgtgattttgatcggtatgcgaaaagggtcgagaatggcgccaattgtgcaagcgcgcagggacctcaaaccgacaaaaggatgggcgtggcatagcatcgaagatcaaactatggcgaaaattcaccctgatcatacacccggccaaattggcaaatcattttaaaaaattttcgtttttgttcttttttttttgctcactcctctccttcctttccttctattcccggggtaatttttcttagttctgggattttgggggccgtataattaaataaataataaattaatatatttttttttttgctgttaaccagggcggttgctttaaagctccgtttatcctggcagcaatttgccttttaggacctgaggtcgttctaattacacacacaaatttcccgagccgtttaggtgccctgtcgtcttgtgcttcatgggtggcggtgtgctgctcctcaggccatagttggttttataatacatgtcaaaattggggggccgtataattaaataaataataaattaatatatttttttttgctgttaaccagggcggttgctttatagctccgtttatcctggcagcaatatgccttttagggcgtgaggtcgttctaatttctttcaccaatttcccgagccgtttaggtgccctgtcgtcttgtgcttcatgggtggcggtatgctgctcctcaggccatagttggttttatggccaaatgatttactttgaactctttccaatgcttattccctatcatccccttcacccctcccttccatttatttaccgccatataaattcattcatttcatgcaattcaccattttgaaaattaaaaaattcatctattctcaccttcctagatagaaaattatggaaaaccaacccccaaaacggccattcccattctctatccaatctattctcgacatgccaccacaaccaaaaaaaatgcggcacggcttcatgattaatcaactgctgggcattgtccaacagggaaaaggagctgagacaacatcgaccaaaaaactaccggctgaatacgtggaaaagatggactgcatcatggagcacgttgccaaatttcatttcaccaaagtgaagtcgagatttgtcataaaagatgtgcctgcagaccccgaaggactgctagcggccattttccaacactgtattgatgaagcaaagaaggacagtcgcgaaaagggaagcgaaccgacacaccttggctgtgtcatcagcagcccactgctggatggtggcgacataccaattccgctacgtcaaattaccgacaacacaatcaacaccatcctanatcagttcatcaacgtggcacaaagcaaaaagcaacaaaacatgactttgtggggcgagccgttcatcatcgccataacatcggttgatcgcagtggacttccgatgaagcggcacat

SEQ ID NO: 16262 - DNA, 3556 bp, Heterodera glycines
  unsure (1)..(3556): unsure at all n locations
cccccccccccccnctcagaatgttatcattgccaaagccatggccaaatggcccatccgccgcagagaaagaaaaataatgcccttttgactatgtgtgctattaggctaaggcacagagaaaaatcatacggacactcaaagcgaagaaaacaaacagaaaaagagggaaagagggggggggggagagagagatttattcaaaagagtggatacgtacgtatgtaaccgatcgaatgtgttaaacgcttgccgagcgcacccacccgctgctgcttccctccccatcccatgtcgctataatggtcattagacattgtaaatatgggattggctatccagcaaacaatattactttaaaaaagaactatttcccaaccccccgccctttttatgatttggatttgttatttatttattaaattatttatgttaaaacagtttttggaagagtgcatttaagaccaatgctccctaaaaacgacttgtggactgatcaccgataagctcatctctgacaacgttcttccataataattttcttttggtattccgacaattcaaattcccctttaattagcaaatcatcgaatgccaaatcatcttcatcgaagtgaacttcgttttgtctaaatgttcaaggttataaaatggtgtcagagagaacataaatgaactaacggatttaaaaaatcaccataatactaaacttggtattttcttaaaaaccattagccttgtaggggtcccttaagtgaaatttttttggtacttgtggttttgggcctacagcgcaaaactcgactcctatttgtgcgaattccttttgcatgaggactgtaaaagacgcaaagttgatacctttgaacaaattttgcttcagattgttgcatttatgctgccaaaatagtaacgcgcgctaaaatgccttcagcgcgccctaacttttttaaaattttgtggtgtaggcccaaaacccacaagtaccattttttagcaaatttacaaaaattattttggtgagcatttcgcatttattatatttttttctaattggagggggatacggtcctaggggggccaagaccccattctaaatttttgaggcaaaaaataattgctgaaaattttcgtttaccccgctttcgtcccactaaggtctccttacaattcgtcactttccaattcgtcaaatgctgcgctttcttccgttaattgaaattgtaagtccgacagattgtgagctgccaaattcatttccaatgctcttttctcaaattcggccaattcgatttgtttcgtcacttccatctgttggtaccctttgaaagacaacgaaacgaaagcggtgcatttcatgaaagaattgaactgaagacacattctgagaagccctgacagaatcaattgtcgggtaagcttttgatagtcggcaacactttttgacgaattttgtgcctataaatggaattttcgatccaaattattttttaaataaatacttgcgaaaaaaataaaatagaaaataaaaaagacgtaatgtctagccgttataaatgaaattacctgtgacgaacacagcaaaggcaattcggacagtttgacccttccaattgcgctgactgttgacagaattcgaaacaccgatgggtcgtccccatcggtcggcctttgcttcgtctcatttttcataaaattgaaagggcaaatgaatgcactttcggaatcgcagtgttcttcgcaatatcccacgacagatttgagctcattttctttgctttttctaaaagacgcagtgcatttcatggctaaatcaattgtcagccagttaaatgacgaaaaccaaaaagaataccttcgatttcccgcaaaactcgaaattggtcctcaaagcgatagagcaacacgcaattggcgggttgcccatccctcccggccctccccgtttcctggcaatattctgtcaatgatcgcggcattgagcggtgaatgacgaaacgaacgtcccttttgtcaatgcccattccaaacgctaaaaacatttacaaaattagaatattgagggaatttccccccgtcccccgaaaatttctctggaaaaatgtagaatttaccggaagtggcacagagcacacgaaggcgcccatccatccacttgtcttggtaaagtcttttgagtctctcggataaaccggaaaaatacggtttcgcaatgtttccgagcagagcagcggtcgctttacattcatttcttaaacacatgtgatttttatgaacaaaaaggaaaagcccactccgtaagacaatagacaatgcccgaaccattcccaatgtccgacaaaaggccatggactgtttgcttgaagttcgacttggacttgggaataacacggtaattgaggtttggcctgtagagatcagatttgaacctaaaggttgttaagaaaaaataagttaatatttactcataatcaaattaagttggcgagaatttataggaatttttagacattttacaaatgtaatgcaatttgctaaccaaccaaagagcactttcacagtccatgcccaaatattggaatgcttttcggcaatcgccttcagaggtggacgcagttaaagccattatcggcactttcttctcggcattttccctgaatttcttcatgaggtcgcccagctgaaggaagtcgggacggaaagaattgccccattgggtgacacaatgcgcttcatcgaccacaaaacgagccaataaattcatgcgatgcaaatacctcagatatttaaggaattgtcgattttttaccgcctaaaattggttacttgatgagttaaatcaaataatgcacatttaattaccctttcgggggtaacataaagcaatttgaaggtgggaattcgattaatgtatacatctcttgccattcgttcggcatcaaaaacagcgcacggaattgttgtctttccattgaaaaagataagtattaaatttcgatcaataaaaatgtcaatattacagtgccattcctcaatttcatcgtttggtcccgaataagtgaaattaatggcgaaatcaccacagttacacctctgtcctcaagagctggtatttgaaagcataggcttttacctccaccttaaaatgaattaactgataagttgacggaatcaggctcggtttatgagattgtaattaacatgggatttgtttgtattgtatttattacctacccgttggcattcgcacaaacgcatcaaaaccgagcatagcagcggcaattgcctgctcctgtttgtgtttaaagttattgatgccgaatttgttgcggagtatgtgaaaaattttcagacgcaaatcttgaacagcattcattgagtaaaactttatctttttatctaaaaggaataattaatggtatggcacatgaccaatagaaacttttagcctggtttttttgttattctttttcctaatttaatggttgacaggctactttaatttaattatttttttcttatttaactccnggggttttattgggattaaattatt

SEQ ID NO: 16263 - DNA, 3111 bp, Heterodera glycines
tttttgaatttctatttaatcaattatatcgaaaaatttacacagaattcgttcgaccaatgccatcgccaccacgatgctatttctctttttggcagcggttattttgagttgcgcgtggccctttccgttgagagtcgcatggaattggccattgattttcgcactgtcagtccgcgcgccgttttaatgttcggaaaagggcttaatgactaccaaatgttgcggattgagcacggaatggtcatttgaagcattaaaaaggcaaattggcgttgttttcaggtccaatactcgtgggattgtggcaccggcgacggaattgttaaaattgaagttgcgcgggtcgacgacggacaatggcaccaaattcaaattttgcgtattggacgattgactcgactgacgctcgacgacaaattcaggcattttgccaaaattagattcaaatcgaattaatttgccgatcagagcggaagggacgagtccggctggcagtgatgtgctcaaccttttctcccatggcaatttgcttctgttcggcgctcgagtcgaaccttcgctagtttatcagcgccaattcatcgaagccttcaatgacacggcaatcaacaaaatgccattgacagtagaggaagaggacgccaaattggcactgacagcggacgatttgcgagtgcaaatgaccgatggaatggttggatgtatcggccgaattagcatggacggaacggagttgccgaagacgggccaaggcttcagaatgttcaacgcagccattggatgtgaagagaggacattgggaccatgcttaaggtggacaaatggccgaaagggaaaaaagacggacaaattccaaaattatgatgaaaaataaacacaattagttaattagctaattaattagtgctccctgccaaaacggtggtcaatgcgttccctctgtttcgtcccccgccatcggtgacttttccccctccaaaaatggttcctcgccgttgttcacttgccattgtcctcaacgcttcaccggttcccgttgtgaaattgatttgaatgcatgtgcgtcaaagccgtgtcccggtggaattccatgtcacaatttgtacggcgatttccattgttcgtgccctcccggactcaccggaaaagttggacattttgaataaccaaattagcagagtataattattaaagacatgccaacttcgtggcgattgggacccttgtgtgacggcgtcgtgcggaccaaacggcaaatgcgtgcggcagccgcaaaggaattctttcgtttgccaatggtacgcctccctttcctcattttgaccattttcaatttcagtgccaatggatttagcgggggtttgtgcacggacattgtgccaacggaattggcatcggaagagagggaagcgggggagggcgacgtatcccccggagggtcggacttcccttgggcggcgatcaccgcgccccaattggcccttttggtggccatttgcctgctgactttgttttgcacggcatttatggtgaattattcgaaaataaaaatctgtaagaaacaaccaatttgaggtgattttctgtcaatcgaaacgccaaaattcaaacgaaatgaatgaacggcgtaatcgaagaaagaaaaaggggcgggggacggaggagaagccgaggaacggcatgacgagcgcagcgcaacaccacccaactgcgcggggcacggcggtgagcagagactgccacaagggcggcaaggacccggcgagcaaccctctggtgccgagggagacggcaggcacggattggcattgaccatcaaagcttgaaactccacaaaattatcgaaatgctttttagcacccggacaaggcacttccgaccgcccccctcctcctttgcctccgcgacaccaccgccgaagtgccaatggccacaacagcgcccttcctactgtaacgtattaattaattagttgcttttttaatttatttggcaggtcgaagttcgaccgatgccaattggcgagcgaaaaaacaccgcagaggaagacaaaatgaaaggggtcgaattggcaaaggtatttgtacacagcacaagccaaataatgatgccaatttgaccacagactccgccattgccgccgcctcgcgattcgtccgaaagacaaaacggggaacaaaatcagcaaaacggacagaaacaaaatgaaagttatcgacgaaaggtaaatgaatgggagagagggggagggagggggagagagacaacgggagagaggggagagagagagagaaaaggaagaggggagagagagagagaaaaggaagaggggagagagagaaagagaagatttataaagccatttcaattttcagattgatcgcgcatgttcagcagccgcagatacacaaaagcaaaaagcgacttcatcaaagaaagggacagcgaataaaacgacgcgggacgacgggagaagcgacggaaagggaaaggacgagggaaagtcgacggactatttgaccatgaagccggtgcacagggcgaagccgttcagactgatcccaaaagcgagcagaggaggaggaggaggtgatggacacgacgcccccggggcaaagcaccgccccttttttaaaattcaaaaattgttttatttttacagaaaatccgccacctccgccaatgcaccgaacgccgttgctgaacatgcgagggagaagaagcaatggaacaaatatggagcattatgacagcccatcagacgcattggattatgcggacggatatgaggaaaacaatgacggggagcaagacaatggaagaggagaagagagaagaggaggaggggaggaggaggagaaagagaaaacatccaaaagataaagggaaaaagagagagagaaaggaatatagaagagagagagagagagagaagaatgataaagaagagagaaagaggaagaggagacagaatgtccaattataagggatgaagaagaaaaaagaggaaatggcccttcttcttcacttgcaatgcccaacaaactcagggataaccccaaattcgggaactttatataattttcgattgtcctttctttcatttaa

SEQ ID NO: 16264 - DNA, 1376 bp, Heterodera glycines
  unsure (1)..(1376): unsure at all n locations
gtaacttaacgcatttttttaattttgcagtataatagaaaacacttagagctatcaaatgatataagcttttattggttgctcaaagttattttaaaaaatattttcatttgatggttttttgagtaacaaaaataattttaaataattttaagaattatttttttggtaataaaaaaatttattgaagtacataaattattttattattattacttctttaaaagtttcattttgattttcgtggattctttgagacagcgaatggtaattgaaactgaagattttttaaaataatcctgcttttctttgtctcttttctaggcgaaaaaatgagcattcctccaatttattaattagctaagcagcaaacgactaataaggattacattttttattcataatttcctaattaaatttaaaaaatcgaaactctatacacattcattaacattgttatcgtcattgcatcaaatcatcaacgtcaaaaacaattaattgattttctcgcttttagttttttaatttttgaataataatataagcattaatttaatacaacataaataaagcaattcaatacaatccaattcatatatttattttatttagagaatccttttttaaatctatgggcttttttaattttctccttgtcattattgttctttcaaatgtttgtatttgtaaaggcaaaaataatgtggaattcatgttattgccctcattggtcggcgacttcaaataccgggtttgtattcagcaaatttgattaattttaattaggaatggagtttaattatgtttgtcctttttcgccatttttgccattattaaataattttttctggatttttcatcactcaaatttaaaatcctaaaaagtaaaaataaatgttaaaattaacgacataaatctacttaaatttacttttattctattcgcattttttttaggtttcagtacaatttgacaatgaaaaatttgtggtgaactatggaaacaaacagccgaaaacgaaatctgaattagtccaactttatttcggaacggaagcgcttaaagctgaaatttacacttttcatatagaaatggttgatacaaaacatattgttgggttttccatctgggtaagagccaaagtttaagtgaaaagaggaaagaggaaaaatcaaatgaattttttaatattttacgaattaaatcgaatttacagccaaataattattcaaaacaattaattgctgacgaaatcaccaagaaaccattncgttatttttgggaattatttncaagtggaaattgagcccaaactgaaggccannttcgggatgtntctaccgngtgaacactttttgtgccggcagtgaccaat

SEQ ID NO: 16265 - DNA, 2262 bp, Heterodera glycines
  unsure (1)..(2262): unsure at all n locations
caaaaactggttgttacgttagaaaaattaacaatagacaataagtaccatattttaaatacccaccaatatntggcaatttgggctggaaataaaaataaaatgccgagggtttccgctggtcctttcctttccctttgtatgtgataccgtaccaaatttatgcttacttaacctaccgtatatacataatactgtacagtttggtgggcctggccttctccaagaagggattagtgtcaccaatggcggaacacatcgaatttattttccaaattatttttatttgaatatttcaccaaaaatatcggcaaaaactgacaaattttattgggtggaagtaaattgtcatgacgccagcagagaagcagagaaatacagcacatacacgcagaaaagtgcgttaattgtcttaaattgtgcacaaaattgtgcggaatatgaaattttggtgcggaaattggacaaaaaatgtctgacaaatgccatgaaaaaggtaaaaggtttattaaaccattttgtaatcactcatcaatttagtaaagtgattaggaagttttttgtttaatttgagaaatttggtcattgactttcatttaatttagaaattaaatctgtacaatgaaaaagcgaaaaaaggacaaatcgcagtcaaaattttaaacggcgaagaatatgagttcgtttttcagcaggcttctccgtttttgaagcgagtttctgacaatagtaataatcagaggaacacgaataaacagcaggtgaatgatgaaaataattaacaaaataaaataaaaaataataataattcagaaattggacattaaaatttatgagaaaccgataaataatacggaggaaataaatgaacaacagcaggaggtggggagaacaaagcgattattgacgatttgccaatttacagaaaattgagccaattttgaccattcttccaaatgaatctggggaaaaagacgagaaagtttgaaataattaaatctataattaatttattgaaatttatatttaattaattgtaaatccacatttgaagcgatttgaggagatttccgcaaaagtccacgctgttctaaatgatttttcagaaataaaaaaggaaaatgcaacagtaaaacatttttgatttttaatttattacctatatatgttttagaaatttgtgcaagtgtttacttttatgaaaaatgaaatgtcaaatatgagaaaacaggacgaaaaagtaaaaggggaaggaaaactaagcaaagaaaagaccaggacggattagcaattagcagctgattagtgataactgataagggggaccaattgggcaatccgtcgtggaatttttgatgaaaattttattttattatttttttgtctgccgtttctaaaggtgaaaaaattaaattttaaaattacagaaatttgaagaaattattaagaaaatgaaagaacttcaaaagcaaatagaagaatcgacgacaaataaaaatgaagcggaagtaataattccatttgttttgattgttttttgcgataattattttaaaagaaaaagaaaaaaacattttcagaattcttcgctttcgcaaattaccgctgcgaatgttagcaatgaaacggtggcaattgtcaaattggaatatgagaaagtaaaaagaaaaattgtaattatgaaaatgaataattattttatagaaattcgaactaatgtccgtggaaatgggccaacttaaggaacaaatcacttcgatgaaacaccaaattggccaaaacgagtcaaattttgtaaggacaattgaggaaatcaaaagatttatggaggaacaattcaaagacgaatgaaacaaatggaatgaattgaatgatggattgagtgattagtgaatgattagtgaatggtcggtcatttggggagggattgtttggcctttttggaattttttattgtttttttattaatgcatacgttgttatttttaaaagaacaggataaaattgatacgcgtacaaaaaacaaacaattattatttaggaattttcaaatttgaccccaaaataatcaacaaaaaaactggcaatttttgatgaattatttaataaattttggcggtggttaataaataataaaccgtattaggccaaatttattaatactatctaatgttttacaatctttccgtttttctcanatttgcctttttttcatttcttcggcttcattaatattgtaaaatcttttttttaatgaattga

SEQ ID NO: 16266 - DNA, 1086 bp, Heterodera glycines
  unsure (1)..(1086): unsure at all n locations
caaatttgcttttttttcatttcttcggcttcatttaatatgtaaaaattcttttttntaatgaatgacaaaattaaaaaattttaattatcgtttaaattaaaaattaaaaatacataaagtgaacgaaaaatattaaagagttgattctctgggacggttggtccctaactgctgtaattcttttggtttgatcacagcgactgtcatccaactggtctgatcagcctccgccgcccgatcagttgggtcataaaagtgtttcgtcgccctcgatcacagcgctgcacaaaatgccgtgcaactgcaactgatcactgcttccgatcgccgatccgttgctgctgcacctttgccgatatgggccataaccgttctgttgttgctgctgcggtgccttttgcttttgctgctctttctgtttctgttcgtgctgtaccaccaccgttttccgtgccgccgttcggttggcatttgccgaattgtgtctctccaccacaacacttaaactcgtgcgccttacatttggtggtggcggtgccgccgcgttcagcagaacctttaatatcaaaaaaggcaatttgtttattttgtttatttattattattattattattgtcctttttttattttttgcccaattaaaatttaattgacctccttttctgctgctgcttctttgttggttttgttcttgttgttgttggtgcaattgttgttgttcacttccgccggaaatgcccttagcacaagcggataaggggcaacgattggaaattttgtgccgtccgcgggagtgccgggactcccctgctgcacacagctggacagttcaatctgacaatgagcatttggcaattcttcaaaaaatccattggaataaataaacatcggaattcaaaattctcagagtaaaacaatgcgattattacaggaaataagagaaaattaagtgtttctgatcactcggatcactttagctgcgcccttttggtaatgttgcccatgtcatataccaaaatcagctctcgcgccaccccagaagaagcaaagccgccgggaaaaattatattatcctattttta

SEQ ID NO: 16267 - DNA, 2231 bp, Heterodera glycines
attttaatgcttttgtaatcgaatgacaaattgcccagtacgaacaattcccaccaaaaatgcaaaattagaataaaaattaaaaatattaattaaaatgttcaaatttatttatttcgtcgatctttcttttcacattcgctttctcttatttccgtccccatggaaagcgtgggagtgtgtggcgtgtgtttgtgtgcgattggagaaggaaggcaccgagggaactgatcaactgatcagcattgatgttcactgatccacacaaagagaggcaaaagggcctttggaggggggggggagctaattggacaaaaagcttcaaaggtaaatgggacgggaggcaaaagcatcatggataaatgcagccgaggtgatgctggggtaatcggcaggccgagaggccgaaccaccactctcggggcagatcagtggggcaaggcgagaggcagagagtatatggaaggtggagagcggaaaagtggaaagagaaagcgggtccgatctgaacattcgagaataggaacaaggagcagagaaaacatagtgaaaaggaacaaaagaaagttgcgagagagagacagagaaaggcagagaacggaggagaatacagcgagatgaggaaggatcaacaaacggagcagatcactttggatgaatgaatgtgttgagtcttctgtccggatttgcttatcccgcagatattcctcccccgttcatctcatctcttcctctctcgaacatttgtcttccatgaccgaagaaaaagagagcataaaagtaagaagagagcgggaaggaaagaaaagacaaaaggaagagaaacgagaggaaaaacaaaaaacagctaaagaaaagagaggaaaacggagaaaaacagctaaattcgtccacccaacaacacattctccaatttgcccatttcccacacattttgaggagttcggctcgacaaaagccaatgtttggggatggccaccacaaattggccatttgaaagctaaagaaacagaggaataagaagcatatggaaatgttgagagcacaaagtgaatctaaaattgaagacaaacggcgaaatgcaacaaaaaaaatgagagggaaatttaaatgcatggcattttgggaagttgattaaaaatgactgcaattaaataaacccaaagcaaagtaaatagcctgcaaatgaaaaggaaagtattgtattctgctggataagaaaagggaggtcggatcatttgagggtcaaaagtgggatggtcgaggattttggcgtttatcctatattttcaaattgcttttagtcgggaaggggggataaagttctccaaaccaggaattggttctgccttccatctaatcctaaacttctgccgtttatatggccatagccccaggggaggggggagggggggggaacgttcaagcagcgaaacgggcgaccaaaacgccgctgtttttgccacctgaggcggaaataggaaaacttttgacgccatgggcaattggtgccctaaacaatgggaaaagcggaaaaagtgaaaagcattgaacaaaaaggcatcaatcttcagctgaaagaacaaaaagaaagaacctttcagcaggtcgaagtcttctcaaagaaccaatcaaataaaattcattcacttttttcgtttatttatttatttatcctaccgaatctttcatccgttaacatttgttcatttgttttctttgccgccctttgcccatgaaatccgaccttttgtcttgctattgtttagtcatccattcttttattgatgccacatatctgagacccctttcattgagaatgggattaggccttataaagtgagagaaatttggcaaattgattgactaaaggcattgttgatcgatcagagataatttggctgatcaaattcccaaaaattcctcaattcattgcattatctcattttgttgatcattttttggttgtttttctatgcaaaagccgcgatcactgaggagaatttttggaggagagaaagggtttaaaaagaaggcaatgagaaaaaatagaagcgaaaaattgactggataaagagaaacgaaccaattgggtttggttttgtttgatgagtgggaaggagaaaaactcatcaaaagagggaggaaaagcatcggacaaaaagcataaacaaaattagggaagcaaagccgaaaatgctcttcaaaagtcaactaatgaatgaaaggaa

SEQ ID NO: 16268 - DNA, 2511 bp, Heterodera glycines
attgatccctacttgctccctctctattactcttctactcttatgacacttcctcacttccctcattcacattcaattaaaatcaaaaacatttgttttttaatcctcatctaatccaattgattgacataattaaaatgttgtttttttggtacaatgtcatccacttactcgttgcacccgtcaaagaatatgccattcaattttcgttggtttaaatattttccaaaagttcatcattcgaaaaagatttaatttaaaacatatttaatttttttttaatttttagggagtcgtaataaatcctaaaaaccctaattatttatttataacaaaaatgcaaaaacataaacaaactaaacatccattagcatgttccgatggaaaaagttattttaaaaaatcattaaaaataaaataaataaatgctttcagttaaccgtatgtcatctctagccccgtttaacgagctgaacataataacgggcgatcgtcgtgtaattttgaatttattttaattaataaattcagcaaaatttattaaaggtgcgccaattgattgctaagattgagagagaacgggcaaagaatgaagcggtgagtacgtaatgaaaaaatgcctaataatcattaattttatctcaatttattaatatgccattccccatttcttagaattgtttaaaaaatgcgatcatgttctgcttcataatttgcgcgtttggcattggcttgactttgtttgaaatcgggagtcgagcgtttggcaccgcagcgtcggcattgagcttcgggctttccattggattgtgcattagcgattcgcttttcccacaatccgtgccatccattacggtaaagctttttaagaagggcgttggatttccgatgaaattttagaattttggggttgttctgcaattaatttctcctttgtcccgtcgttagatggaaaatgttatgaatttattccattaaatttttctttagaccataccgaaaaacttttgataggatttttggatccaatgacaatgattgttaaagaaaatagtgaaatccaaacatgcaatgagggacaatttaaaacccttttactgaacaataagctcataaaaataaaccaattaactggcaaatatacttttattggagaaccaactatttataaaatcgatcaaaaaatatggggtgaggaaaatttacctatttttcctttacaaattttcaaacaattaattttaacaaatttaacgaacaaacaaattgacatgctggaaatgcttcatgcattccgtactagccgaattattgacaatagaccaaatgaagaccgaaaaatttggaattcaaaccaatttcaagcatttacctttcaaaatttaattactgaaattgattggtggaaatatgtaattcgatcagtcgttttagtcattataattaattgggtctacaaaatttataaatggaaacaaaaaatcatgatcagaaaagaaattgaaaagaggaatagtcaaaactttcagcaacaaactggtgccattcaaattccactggccgctctgaaacaacgtttcgttgggggagtgtcggcgcccacgaccgacgcagccgagatgccagagaatgccgaaagaattaaatgccaaaaacagaagagacggaggaaataatttttgaacaaatttgcatttaattatttattaatttaaatttcattctccattttattattatcatccatatctttcatcctttgcctttgcgatcactttattcatttatggaaaagtcgttggagacaagaagaaaaagagcgatagggaatttcacagagtttaacaaaaagcggaaaatgtccgtgagcgaaaaaagggggaaagatgaaaaataaaaatccgttattcattcgcttaactttctaatccgttcaacatcttctctctccgattaaaaattatttattaatttcgaattttcgcaccgtaataaatatttgtcaccgggacattgtttgaaggttacggtaggggaaaatttggtactaaaaatcgtttcaccgggaaacgggaattggtccaccggggacttttgaaaacaaaatctgtcaaggggttggcccaccggaaattaaaagtgattggcaaactctaatttgttccaccaaacaaaggctgattgattgattcattgtttgattcttctactgtcattggacgaactgacaaaagagaacagcggacgaagagcggacttcgacacgtggcgaccctttggccattgcgaaccgaattgtttaaaggtggacaaattaatttttgttaaatttctaaaaagctagttggctagcaaaagattaaaatgagttcgccaatattggatataattcacgggctagtcaatcggttagaggttgaattaaacagagatattccgataaatcccggtcaaaatgcaaccccaaagaaggtacaaagacatatgtacagagcaaaaaatgcgtgtgaa

SEQ ID NO: 16269 - DNA, 2644 bp, Heterodera glycines
gtaactttcaaggaaaaaatttcaaaaattgttcactgatgttgcggagcatttcaaatgaatcacccacctattttgatttatgcatacaatttattacagaatctctgaattttataaaaattctggcgtatatcactggagctcattcgtgtcggaaaaacatttataaaaagcgcattgataaattgcaatccaaataaaccatccctttgtcggccattcatttcgaacttggcgcttttccacatcgttggcgtaacgaagcggccaatttgctagagttttcgagactttgctcaaaaattaattcgcggttcattgagtcaaggatgctaagagataattaggagttaattaaataagaattaaggttataacggacaataaatgagttaaataaagcatagtaaaatgcaaaataaattttaattgatgcttaacattcaacttagtcggtttgttcaaaaaccgggggtagcattttcactatgaattccattttaccgattggccgaatggcaatcctataattgatttatctgatcagagagagcgcagccattgcaacaaaattaaatatattaatttgaccgtccgtgtacactttcttgccttagggacttttatcaatttagaaaagttcggtttggggaaaatatgcatcattttccccactttaaaattgctgacaaaattctctaccgaaaaaattttttgctccaatacttttgcacctgactgtaagaaagttccaaaaataaaaattttcaacgattttaggttaaatggcaactgtgcacaggcaactcttacaataaaaaataaaaataagcctaacattaagcctcggcctagcctaagccaatgtacgagttgcctttgtacgatacatggcttatttttgtagacaaattttctaagtaatggaaaggacataacagaaagtgattattatttattagagtagagcgggaccgggaattttgggcttaaccgggaccgggaccttttcgggtttaaaaaacgggaatttttggctgggaaaaccgggaaaaaacccgggactggtcccggtcaaaaccgggacctcggtactcagttgtccgtgttttggtcccggtcccgctctactctattatttatgcatgctattgtgagatgaattcaaattattacgcatttaatttttcgaatacaaaaattctgaaaattttggcgtaatttcacggcaaagttttgtcccggtgtaatttcggccgctgaaattttgtcctgttccgattaaaaagattttccagcggctttttttgcaccgcctaattttttttgaaagcgtcaagatcctattctggctaattaaaagagcaaaaccccactcaatttctgttggcacttcgttttctccagttggacttccccaaatgcaaagagttgctgccccggcacgagtattaggccacggatttgtgctggcgcgacatcggcccaaaggcaccggccgagacgggcggaagtgagcagaatatgctgagtactcagaaaagtccttccgccttcgctgatgctgcccccgaacagactgcaggaactgattaagcaatgtcaattaaatgccgcaaaataagcacctgtttttgacactcattttgtcaagaaccaaaacttcttgcatttattaatgccaatcaatttccattgcccgaccattcaagtgtattaaatcactccgtcatcacatttctccgttacattcagtaaattttctaatctgactgggctgaatttaaatcaattcaacttggccgttgcccggccaaattcaactgctggtcaagcgttgtccaaatggttgcacacccaacgaagtgatggacagccgaagcaattggttaagcgtttttaaattttttcactgacagcgacccaagtaaaagtaaacacaccgtttcaaaaaacgagatacctatcagggatgtgcctaggtttcgcttttcgcatttcgcctttcgcattattcgcattttttggcgtttcgcatttcgctttttggcgcgaaacgcgacttttacacccctaagaattggattaaattcccataaaatttttcaaaattttacctataaattggctaattttcagggaaaacctgtttataaatgatcaaaatttccaattttcccccggcggcgcctatcggcaccgccgcgccccaaaactcttatttctcattaaaaaaatgataaaaatcacaaaatttgatcattttttattgaaaatctgtcaacaaattttaatcaaattttcaaaaattttcccggcggcacctgccggtgccgcctgccccctcttcccaaaaattttctttggaaatagcgcgcctcaaaaaagcgttttattgatttttaaatttggaataaaattttaaaaaatgatttttgctttatgattttaactattaaaaagttgtagaaaaaatttcgcttttttttcattttgcatttttcagtttcgcaaatttcgcttttcgcatttcgctttttatttttcaatttggcccatccctgatacctatgtaccaataaatagagagtaagtgcatagaaaaaaacatctctttttggcgtactatttctttatctct

SEQ ID NO: 16270 - DNA, 1950 bp, Heterodera glycines
cttaacttatcggaccaatcctttgcccgtggcacctgtcgcctcagcgttttaactttacatttaaatgttatcccgttttaaattcgatactaaaaattattgaataatttttcaaatatgccatgttaaggacattctgtggtttctctcttccagttacggtaaccgtatcccagcactgtttggccaacaattgctgcccttttaccgtatgatgcccggctgggccatcgttctgtgtttttattttgcaacaacagtcgcttaccaagcctcaaatattgccacttttctcattcagatgaatcgtttgactgcaattgcatttcccctcaaacagaaaagggtttttaattattaaaatattaattaatattttaatttcatccattagatttgggaaaagcaatcatttttgatgatattggcactgattgtgttcgttgtgccattgctaagctgtttgccaattatgaaaatgaacgtcactccaatgcccttcgaaacggaaagcgacggatttttcatccaagaacatgtttcggtatgaaggaaaagcatcggaaagtggaataatcgagcagagaaatatttagataaaaattttgcatatttccattaaaaaaactattcaagctaaaatatgaaagtcaaaaataagactaatctttggcctagacttcggcttacacataagctgagcttgttagttttagctagccttagtctttgcttagaccgtcctagctaagtcaactgaaggcccaagtaaaggcctctggactttggctaaagcataagctaggcttatgccgttagctcagaccgttttaggtccgttgtttagatctatggccactgatacattaatactaactgatgcgatttgtcaacattttccgctttttaggagtattccttccttggctatctcaacggtatgaaatcgcttacttctgttattttcttgctcttgtcgcttttggtcaatttgtcaacgctaattgcctatagaagaagcaaaaaagtgcaccaacaaaattctcaaaacggaagtgacgtcattgagaagaaattgctaatttacgcccttctcacttttgctggccacgcttttgtctcagtttttttggttaaacatattaaattcaaaatatttttaattttatatttttagattattatgggcaccggagttttctatgactatccatcgattgtctacacccaatatccgtggatcaacgacttgtgcactttggtgttgtccagttggatgttgttgttcaccagcagcattttccgccaccaatttgtcaaggacttttgtccaaaatgcatttggccaatgccaacaaacacttttcagacgccagtgacacatttaacacaacaaaatcaaaatgattgccgtttatttgaaaagccatgagcccaaccaatcgaagctgatggacgtacatcaaatagaaattgaggggaaaacatttccaaaacaaggacaaaacattaggaagcagttcagcaaattcggaattataaaacgaatgatggaataaatgttttgttaacttttgcattttacgagattcctttcttaacttagtgggttttttgaaaattctttcttaatttagtttaatgcagattagattcccaattagtaaagtgggttcctcccagtattgttgaaggttctaattcccgatcctgacgttttgtaccaaagaatttctgaatttacatgaaaaatgccaaaatatttacaaagcattgacaaaacccccaaaatattgaaataaattaacttaaaaagtttacacgtcttcaaagttttgaccttataatttttcaaataatggcaataatttattaggacaaactttgggaagcagttcagcaaattggaattataaaaccaatgatggaattaaatcttttgtgaac

SEQ ID NO: 16271 - DNA, 1513 bp, Heterodera glycines
tgtgacaccgatcgaaagtttccatttgtcaaaaaaatgcgatactgagaaaatacggcacaaaacttagattttttaaataatggaaattgatttttcgaaatttcatcctgaaaatgagaatccgtaccaacaaaattttcttgaaatgaaaaacgttctctcggtgtcgcatttttcagggagccattcccgatcttggctttttgtaccttccggtcaaaaagtggaaagctgtctatttttttaaatttatcgcattcaccttcggtattctattgaagtaaatgtaaatataaaactttattatttgaaatttcaaatgcatctttttctttcattcattcatttcccggcactattttcgccttcgcatgccaatccagcctgaaagtgaattgaagttactttggcgttttgcccacaaatccgtttccaaactgttcgggttgaatccgaagtctttcagcggcatgtacgcgtcacttcccgttgtaaatagcggcttcgaaaaggcggccaaccagttgttgttgtcttggcacgagaccttggacatgttcaatttcaatgtaccgaaacatgctttgttatggccaagagtcccgggccctctgatcatttaacaaacgaattctccgattcgaagaattacggtctcgagtttatgcgccattagctgtcccgagtccgaaaaatcgagaaattttcagtctcgaaccttaattattagggccgtggttttttgttacgaaaaatctcgaaataattaactaaaagagtgaggaaaaatgccaaaacagtgacaaaaagtccgaaacagtgacgaatagtgacataatttcaacctttaggagtgtaaaaatgtattcaaaaagtaactaaatcaagcaaaatcagtattgagataaaataatttttaaaatcaaaaattcttgtccgcaaaaatttttcatttcttaggggtctatttttgaaaattttatggtcattcttaggggtatgtttttctgaaataaatgtgttttttgagcgcttttcttcaaaataattaagcaaaaaaaaaaaaaaaaaagttgaatcactaaaaatcaaggccctactaattatgtacagccgtgctggacgaagtccgaattgggcaaataattatatttaatgatattttatgaaatgttaaattaactgttgtaacaagaaaacaaaatacaaaggttgaaaacaaagtgcccgattcgcaattaatagttgaaaagtgtcaatcgagagatcctacagaatcaatctatataattggaactgaagacaattttaaaatatattcacaagataatgaaaaaaataatgatatttatctcatatgtaaccaatgccggtaccttcaccgtaaagagaaaaatagagctttgaaaaaattgtgattgaaagtccagaaactatattgcttgaaaatgtggcaggttcaacaaatacagcagcagctaagggtttgaatgcattaaaatttttattt

SEQ ID NO: 16272 - DNA, 2230 bp, Heterodera glycines
  unsure (1)..(2230): unsure at all n locations
caataacaagaaaaancaacctgcagtccacagcagccaatagccgacataatggacgcgttgtgaatcttgaaaataaataatttgaaaatttatcacaggatatcggggaaacaaataaaatttatctctatggcaacatttgttttagggatacagtttattgcaatgaatgtgaccaatttcaaatttgcaaaattgactgaccactttcaacgggacgcccatggcgcgtgcacggagtaccaactcggcgtgggtggtcgccccgaacgggtcgccgacgacgagcagtgcaatgtcgacggagcgtgactggtcaagcagcgattctgttgggaattatgtgatatttgggcagtttaaaagacaaaatcctgccggatttcggatttcccccaaaaacttgccattagtagaaatagtcattgttataattgggacggctgaccaatgcgttgttccaccaattctctgtccgcctcaagcacagtgcgaccgtacaactgctccaggttggccacgctcagcccatgggacagcatgctggtgtaggactccaggaaaaccttggcgcaactgcggaccgaaagatgaaccaaggaaatttattggaattcacaaaaaaaaatgacagtgacagacaagaaccccgtattgaaatagtttgttagatagaatatattacccgtttgatcaattttcgtatgaaaaatatcaaaaatcgaattgaaaagcgttccttacaatgttcagtccattcacggtgatatcgcccgcgtcgccaagtccaagtccgatcaggtaaaaaaccatttggcaatgttaatttgcagaaatgaaaataattgggaaatcctaaaaaaaagttaattacaatgttttaggcttatattaattcaagttaatcaattaataacggtagaataaattgtgcaaaggtcagcatttgatcagttttcaaaaatgaattaaaaatgtattgcaaaaatggaaaaaaattaaaataaataaaaatttgggattgacaatgataaaatcgctattcgcttttttgatcttgccgatcaacttccaccattctctcttcttcgggtgaataattgcgcacaaattggatgatcagaaatgtgttgatgccaagaaaagtgagcgaagcaaaccaaacccaattgagggtggcccaaccacggaattcatacagataggcgggcaacagccaaaacgcctggccaaacagccacagagcgaacagtttgagccacatttgccaagaaaactgagaaaatgatgccattttagaaacacgttttaagaatttgtttaggaaatgggagagtttgatccaataatcggggggggggggggggctcaattaggagaaatgtggcaataaaaacaaaattagcaatttaatttctacggggcctgcctttagacgagtgaagagaagcggcacaaagcacaaataccacacaaagtattgcgaggtggacactttgttgaaggagacgaaagcgaacgttgtgaggaaccaacagaagggcaaatcgtcagaatacctgaagaaatttcaaggaaaataaaacaaattggaagaaatcagactcaaaattttacaaataaatgtttcttaattaggctaaaaaaaagttcaaccaaaaaccagtgtatctaaaatcattttattggaatagcgaagcaaatgaatttctgagatttgttcgattttaaataggtttttaatgtcccaattttacaaaagttaaaacaaacaagagtggaaataagcaaatattttataatttattcggcttacattcaaaacaataagatttttatcatattattaaggcctgttaatccaaattgcgacacaaaaggattttcaattctaaattactcaccacaaagcaaaaacgcaaatgcaaacaatttgaggcacaaaggcaatcagtccgatcagttgggtgagcgacgggctgtccctcaccaaataaagcggtaaaaaatagggcgaaaaattgtgacggatgtccacacgcgacaaatggtaaaggaaagcggcattcaaaaaagggtggccataaagggcaaaacagaaagccacagacagagcaaacgatgccaaacttatctggaaaaatgccaaatttgaggcatttttagtctaggaattatttgtgcaattanaaaagaataaatgtgtgtaccaaaatgaacgcaaaac

SEQ ID NO: 16273 - DNA, 1230 bp, Heterodera glycines
tcaggtccattgataaatatcttaattaaaaactcttcctttgaaattcagaaaattcaagcggatcaagtttttttacgtctcctgttaaaaaagtgcctcgagatgattttgcatctttttcggacatgaaaaaggcccttcaattttaccgttcggctgataaggggcatcgttcattatcatgtatgaagtcgcattttcgatttatcaaaacagaatcagagctgaaaatgctccgaaggtaaattacaaaatttaattgaaaaaaaattaaaagttaagatttgaaacgaatttgaaaagtaaatagcaataattatggcgaacaaaaaatatattcacgattttttttctcaaaaaaattttgcaaaacaatacggttcccccctttggtttttgataaaactcaaaatttgtcaatttttaactagcgctaaattttcttttaaaatgtttttttcagtttattaaatagtatgcaatacgttctatgttaaaaaaacaaattctgcataaaaaaacaaaaaaaaaaaattgaccaaaaaaaacgtgcaaaaaacaaattcaaaaaggccctctttgcaaatagcgcccaaaattttcccctttacttcatattaaaaagtgaattttttgtttagtttcttggtctccgccaaaacttgttgacatcgttgaatgcgaaccttggccggttgaccacgcttaccgagttggagctgtacgataaccaactgactgaaattgccggcctcgaccagttggtcaaccttgtgatgttggacatgagttacaacagaataaccaaaattcaaggtgactttgcattttaaataaatttttaggcaaataaattgtcttttgctcaacattgacgcatttttttattttcgatttctctccgtcatttgaacaaatgttaaatttttttaaaatggaaattaaatgcattttaagggctttccacaatgacgaagttacgccgtctgttcctcgttcacaacaaaattaaacggatcgaaggcctggaaggtttggacgcgttggaactgctcgaattgggggacaaccgaattaaggcgagtttttaatccatcaggaaatcaaagtttatctcaatcagtcgccatttatattccctccccttccattcaaaaaaaggtcatcgaaaatttgtgccatttggtcaatttgaatgaactgtttgtggggcacaacgaccattca

SEQ ID NO: 16274 - DNA, 2548 bp, Heterodera glycines
aaaaaattaaaaaaatttaattttatgtccaaaattaaccttttagtctgctttagcctgagttaattccattgcattgcttaaaaaaaacaaatttacatgacaattggcaggggtccttaattgcattttgctcgctctaaaatgtgttgaagactctcacatacctgcgctcacgcttacgatcgcgatcatcctcacgtcccgaccgacgacgacgctcctcccggtccttgtcatccgcgcgtcgtttctccgaccgacgctgatcgattgctttctttaagtttaacatgtaaattattgagtgcttaggacacgagccttcatttcagcaaaacggtctctgatctcaaccattcccaggtgcattttgcccccgtaatggtcctgcagtcgcgactcgtggtccatgatgttcagttgggccccgcatgcctcgcacacgcgcaaacgctgcatcattgccgggttcatgttgcgcatttcgctctccaactcgcgcttcttacgctttaactcgtccacctccttggaaagttcgatagactcggctatgcgcccttcgttgccgagtgcctccacttggaccagcgccgttccgattttctcgttcatctcgaagactttctgggtctgaaaatgagtaatgcttccactgaatcacagaattctatgcttccaaatgtgaagaggcttcaccaccacaaacacgtacccgttgttgctcactaatgtccatgttctgctccgcgtctcgcttcactttttcctgaagacgacgaatgtcagcgtccacaatgcgaatggcatcatccaactcctcaaaagcctaaaaagcggctttgttcacttaaaaactaaaaaaagattcgctggaaaatcgacatacgaaaacattggaattgcccactgagataccctcattcacatcagcacagaattagcaattcaattaaaattgctacaaaaacatttagttgtctgacacttgtctaaagtttgacttaccatttcgctcaaacatacatatttcgagtgggtgggtgacaattttttgagtccgataacttaagaaaatttctgtggcagtttctctttccaattaaaaccaaatgtctttagtatgcggtacctaagaggtcactaaccaaggcctctcaaggtaagtctaacacagtccaatttgccaggtcttttaccggaagattttggactttacagcagtgacagtcgcgaatttggcgaaaatatcagttaattgtaaggaaacaccggaacagacctggctatatttcagagttcgtgtcatttgagaaggttgtctttctttttcaatatgtcaatcaaaaaccaacctcgatgtcatagaaaaggtccttcttctcctgtgcacggttgaactcgcccttgtgagccggttcatgcaactttcgacaggacatcatcgattccagcctcgtatcggacaacaaatcgcgaggacaacacccaagcaaataggcacgacacaccgaatgatggtcaaagggaggcagtcggcgaccctcctcctccgcacgttgctggcccatcagctgaaaaagtgtacattgttaatgccgaagacccagtccacaacctgtgcaatcatttcacgcattacatcagtcatttttacgaattctctcccttagatagtaattgtaatgcaaaattggaaaagtccgactatctgtatagacaaaagtataatgatgaaagttatttcctagtgcccaggaaaaccacaaacttctccgaatacagggcgaaaataagaaattttcccgaagtgtaagaaattcccaaaaatgagttcgtttcccatgtacatgtgtctttcaattttcgtttgaaaagtgcgtgtgaaatggaaacgacaatcactttttacccttttcagaataaaaacagttttattaactgtgatttcagcgcggtttttatttgtcaaagagaaccgggtgttagcttttgacaaggaccacagcactgtcccgttcaaacttttattatctgtgttggagtacaaaacggcgatgatgtgcaaggattttgacagtcgatcatattttaaaaagcatttcccgaaaaccttccctttccccggttctttttccttttcttttctattaaatttttttttggcgtattatgtattaaatcgttaaatttaaatttaaataataaaggggtaaacccaactcatcctaacccaactcatccataccagggatggagttccgaggcactaaaaattttcggaagtcggaagtcggaattccgaggccccaaaaattttcggaagtcggaattccgaccccaaaaatgtcggaactcggaagtcggaatttttcaaaaaaaaaatataataaatttttaaaaaatatttaataggctaaatttttaaatttttaaccatgtaaaaggtaatttcaaactgtttttagtttatttctatattttttaaaaagatcaaaatatatgaagtaattttacattattttggattttttttttgggaaag

SEQ ID NO: 16275 - DNA, 1595 bp, Heterodera glycines
atatttaatggattattacgaaccgctcaaatatgatatgtacactggcaaaatcagtcccaaatcatttgaaaattttattaaaaatgccaatttatttttaaaaaatagaaaaatttacaaaaaaaaaatgaattttatgttttccaccataaaaaaatcattaacaaacatatcatggcagcaaacttttgtttgaagaaaaataaataaaaaagtggcggagcaaaagccattagggagggggggggggggcaaagttgacattgcatggatgcttaaccgggcccaagttggcggcgccgccggcacacggccccgtgccgttgtcggcggtcgaagccgtgccgtgtgctgtgtgccgtggccaagtgtaattgttgctgggaagccccaaaaatgggcggacgtcacgcaaatttggacacattgagaaaaattgaatgcgtgtgtgcgtttgaaatggtaattaaatacggcaccaatttgaaggggccaaaaacaaaaaaatggcaaaatttatggaaaaaaaatttgctttttttattattagaaaaattaaaaattattttttaattaccaattttaattggaaaatgaattgttgttaaggtagaataaaaaattaattgatttaaattacttttatttgaatgatttaaaaaaagattaattaaaatataattagtgaaaaaataaacaaatttatttatattgtcatgtgaaaattaaatatttttacttctcaatattataattagaaaagtaatttagctgaatggaatattaaattttaatttatgtatttgtcaaagacttttaattcatttttattaaaccgatttaaactcttttaattaataaattaaaaaattttcaaaaaaaattcacagaaaaacattccacggcatggcacaaaatctgcgccatttttggtccccccgtgccaaaatcgatgaattttctgggaaaggatacgcttggagagaggtaataacgaagaattgaataacgccgtgtgctatgaatgagtgcgcaaaaatggccccctcctgccccagggcacgtcgagacccaaatccaattagcggctttttgcctcgggaaaaaggggttattagacaaaagccggcacacacaaattttttggcgggacgtctgacgcgtgccgttaatgaatggactattcaataagttctgtggcataatgtttcaaagggtatggaatgccaatccaaagccgatgatgatgatgggatgccgaaaaacagaaagatagtgaaaatgccaaaatggtgggaatttaaaaatttatagagtgccaatgaaattcttcaaaaaaaaaatcatgggaaattggcagcaaaatgccacagaatgacggatttaaacatttacacaatgccaatggaatgcaaaaataataaatgccaaaaagggtttgaaatgtgccacaatttctgctttccgatgatttttgaaacgaattttttggcaaaaaattgccaattttggcgcaattttttcaaaaattccgacccaatttttaactctccagcaaaccacaaaaaatttatatgctgcggctactcttg

SEQ ID NO: 16276 - DNA, 950 bp, Heterodera glycines
agcgcaatttaaacaatggacggaacggcaaacggcacacaatgccaacaaacgtaaaaaaataaataaattcgccgagcaaatcgagaccatgtgcaaataacacactataatcatcataatggagaacagagttcgtcgtctgtcccggcatttttggcacctaataaattttatgtgccccgcggggcggcacaatgtgagcaatgccatgccattcgttggaaaaacggtgtgtaaatggacaacgactcatgccatgctatgccaagcatgtgccgtccgtcgtagagttgcaagcttgcggcggaatgggaacggcattttggaggtgtgccaaaaattgaaattgcgggggcgttttaaaaatttccgaaaaaattaccaggcctaaaaaataaattgctagggtcacaatgtaaaaaaaggctgttaaattaaattaaattattatttttttatataaagaagcctctcgaaaaatataattgatagatgaaaaaaagattaaataaaaaattaaatgaaaatttacaaaaaatggcatttccaaaagttttttgcgcccaaatgatcgaaatgccaagagctcagaaaaagacataaaaaattattaaaaatgctgggcgttttccaaaaacctccaaaaaacaaaacaaaaaatattataagtttgtttaaatttaaccaaatggttaattctatacctaatattttatatatatttgcctgcaaaatttcaaaaaatttcgttttaattttcataaatgttattgcacacaaaaaaaaacggttttttgaaaagatttttggtcatatttttttagaaatttaacgatttttttttgaaattttgcaggctcaaagaaaacacttaattcaatggtgactgaacatttgcgcaccggcacatttgcgcccctaccatttgcgccccgcaccatttgact

SEQ ID NO: 16277 - DNA, 2567 bp, Heterodera glycines
gaccgacgtggtggaacagctgaacaacgcgaacattgcaaaggcaacgggctgtgtgaacaacatggtgttcatcttttttctatttgtcttcatgacccaagtaaagtttaattggaaaatattttgatttaattaataaataattaatttaatgaaatactcaaaatgtttttttaatcaaggtctgtattttttgggcgatgtatttgaacatcccagcgcgggggattcctcttccttctcgtcgtcgtcgtcgtcccgtggttcttcatgaggaaattgggcgtcctcttgaggtgattagctcgccgcggatggtgagtgatttttcccaattgatatttaacccggtaaacaaccatttttcagcgctcaccgggaggcgaatcgaatacgcgccgcgtcgctcgggtaaaggaaggaaggggaaggaatgggaaagaaagagtgcgggatcattttctctactcaggtctcgacttcgccaactcgctccgaagacagcgttgtgacggtcaaaacggtgagttatattttattattgctgagacaaagatttttttttgatatttagcgccaataagcaaacaaacgctgcgttgcatgaggaagatgaaataattttatttaaatttttgaagaaaaaaatcagtaataattttatattaaacagacgatcaaatataatattttatatttcttttaaaaatttttatgattttttttatcattatattatcaataaaatattgggaaaaatatctgtaaattgtaataaatttaggtatgttttttatttggcattggttgaaatagaacagttaaatgatcgtaaattaaaataattgtgttaccaaacatccatcctttgcgttggtcatgtcgtcattctttcaattgttcatctttaaaaaaatatatataattatatgaaataaaagaattcataaaaatcatacctaaataatccaggccaaaattagcaaaatgatgaggataaagcaccaaaccccatatgctgaacgcttgcgttcaaaaagaatgatctgaaatattaaaaaaaagctaaagattgatataaaatattaaaataatatgtacctggccaacgtgaaaatgtcgtacagtaggtttggtgcgtttaaacaaaggaagattcatgggacgtgccatttcgctaaattaaaaaggggcacaaaaaaaaggaaaagggcacaaaaaaagggaaaaggaatatgagaatgacgctagacgttggcgagatatcatcccaagtgttttccgttctcgactgatgacccccttttcgttggtttggtccatcactcgagaacgacaaacatgagggaccatcttctactatgaataaagtaattattgaataaaataaaaacgggcgggtgacagggggggggtgaaggtatataaaagtcgagaaatcggatcattctaattcttgacaatcttaaaaatgagcattaattatagcgccaaaaagcttctcatggacaacattttgcccgccgtagaaatcagccaaacgtccaatggcattacgctgatcagcgagcgaattgcagtgcctcgaacaattccgtatgacatcgttggcaagtgtcgagaatgcaaagccaccgaatgcgagaccgagtggtgcatttcaaaagaaggcgtaacaatttggtgcacccgcttcaaaattaatcctcgtttcgttccgtttgattatgtttatgagttgccaggctatacctttttcaaggttttaaaatattatatgatttttctttaaaaataatattcagattcgtaacaaaggccgagtttttaatgtcgaccacggtttccgctccaatgtttgcacgcggaccgagactcccgtctacaatttaccgcccccaccgcctccgcctcaactaaagccaaagggaaatgagcgaggaacggacgagcaaactacacaaaaattttttgagtctatcacggcagctactacaggattggatgttcctcaaaagaagcatggagaagcaaatgaattttttgatgctcttacggcagcaacaatgggaatggaagtcgacgaaaacaaagagaaaaaagcgcttccacaaccgcagagtaatgcctccgatttcttttctccgatttcggcagctactatgggaattagtggcgaccacctgaagcccaaaccgaaactaagacaacacttgccaagcgcttcggatttcttttctccgatttctgcagctactatgggaattagtggggaccacctcaagcccaaaccaaaaccaagacagcaccagccaaaagcctcggatttcttttcaccgatttctgcagcgacgatgggaatgagtggcgaacagaagaaagacgaaccaaactcaaaccaacaaaagaaagacattccagaatttgcttcggccatttctgccgccaccatggggatgagcaattacgaactacagcagcaacttccggttgaaaaagataagcagcaaacggacgaagaaattcttgatgaatttcttgagagtgtctccgctgccacaaca

SEQ ID NO: 16278 - DNA, 1397 bp, Heterodera glycines
tgcttcttctccgtcgcattctcctgttgttgctgccgtttttgtttacggtcacgtattgccgcttccagttgtgtttttgcgcttgactcggcttcgttgatcagcaggtggtaggtgagctggatttggcgcagctcagtggccaatttctcactgccttcgcccaatgcgcgatgcaaactggtgagcagttcgctggggtttcgcactgtgctggccgggacggggatgcgcacctgttccccggtctgccattcgacccggacaaattgctcctcagttgtgcccagagagggccaagagtgtgggtacagcagcactgccaaccccacgctccactgcgagccgaactgtagcttgcgtggcaaacgtacgcggaatgagttggtccggttgccctcaacctgtgtgtttgacggtaagacaatgtagaaggaggatgatgaggacatttgtgctctccctttctaccttttttttttgttgttgctttgcgctcggtttccctccccctttttatatgattgatgtggcagggatccagctgttgtgcgctgcggagtagcccttccatttgataaggcaatgttccacgccgttgcgtccttgccgtcgccttttcagcacccgttcaatgtcataaacgggaccaacgacggcggctgcggcagcagcagcagatgcctctgccccttgttgtgttgggcgctgtggtggggctgggggcgggagcacaaggcacaagtcttgtgcgtagaaccagccggtgagcagctccccggtgtcgtcgcgcaatttatacgtggtaggcgtacgtgagtctcgcacctctgccacagtgaacacctcatcggtgaagcgtggcaagtagccctttttgaacacatgcttgtgcttctcaattcgcacacggtctccagcgttgaagcgtggaggccgcggatttcgcccacgcacatgcttgctactctccagttgctggcgtcgaatttgctccgcgttggcaaaattgacgtcccggggccgtagcccagacagggcacgatgcggagacgcattcagcgccgacaccaagtgctgtatcacaccggtccagcactgggtgccacggtgggtgaagtatcgatacagccgctcctaagaatagaaaaattaaataacaattgttttttcttgtctataccaccaccttgatgctgcggattgcccgttccgcaatcccggcgtgccactggggtgaggtgtgcatgcaatggtgttgcacctctttttcgttgaaaaagcgctgcacgggggcggcagtgaactctttgccctggtccgtcatcagcttccatggcacgtagccgacacgtttgaatatgtgctcaaagcacggatcatgtccactgact

SEQ ID NO: 16279 - DNA, 1972 bp, Heterodera glycines
  unsure (1)..(1972): unsure at all n locations
gtttgggctcagcaaaatgatacgtgagtaacgtatccaaatcactgttctgatcgggacggtacgcgccttgcatcagccggtacacctgctgtccatctccgatgcccagcgtgcccgcgttgcgtaacgcatagtcaatggcttgtcgtttcctctgctcagtgtcgcgtaaggctgctgctactgctgctgctggtgctgcagttgctgtcgatgttgatggatgcagttgcacgtccgcttcttcccgctgtcctttccttgcggggccaactgccgccatattttggggtcggtcgtcgttggggctgtcttcacgctcagtcgtctcagctcctcctcttcctccattatcagtgcgtgtcaacaaggaggcggcagacgacgatgacgggaagcggctagcttcggcgccatccgtagagactgatgtcgtacggggtgaccttttggctggtcgttgtctgcgacgtggaggctgcctcattggtgacgaatcagagtgcgacgactgctgttgttgttggtgcggcgccggctgttttggttgaggttgttgttgttgttgaattgttcgcgccgcctcggaaagtgcatcgcgcagcagccccttcgaggcttcgtcggtgggcagttgggtgagacgaacaggcgctggacgctcctgctcatcctccagcaattttttgaacctcttgaactcctgttggtagtggatcaaccgtttgtcatcgttcagaaggtgttgttgtttcgatgccggagatacgccatccgtgctctgggtgacgccgccgctgtgtgcagcgcgcgccatgcgctttgccgtgtgctcaattggcgtggtatgctgcggtaagccgcccctcgcagaggatgcgtcggcaacaggagccgagctcctggccaacaaggagcggtacagttcctccggtactaacagcatgcgggttgtgtgcttcatgtttggatgatgctgtctttgcggctcatgagcttatccgccagcagtggaagcacaacgctggccaccaagccagccaaggccgggacgccgcgcccggtctgctgtctcagcaacagtcgacgtgccccgtggccgcttctcgcacggcccaacgcacgcacgtgttgggcctgagcgcgcaagtgctgaagatgagtgctccggagcgggacgcgtgcacggagaatgttcaacgcactttccaccagacacaacagctgctcactgctcgcccccctcaccagctgacggtaggcacgtgcgcgtgccgagcgacagttgctcagttgcttgaaaaagctagtgttccgttgaatgtattgacttggtttcggccttttcttcgcttgcttttgttgttgttgttgttgtctcttttcttgttgtattgtttctggtctgtcgctgctgctgttaccgttgttgtttccgcttttatgcttcttctgcattgaacattgctgcccggtctcgtggtgcgtacacaacggtcagctcgcccggatatatatgagttttgaggcgcatctgtggtcgggtggtcgggtgcatgtccaccaacaggtaaccaaacgggtccgctgtcgcgtcatcgtacgcctcgaggaagtggcgcagcgcacccgggaacagctggacgcccaacgagcgtacctgaagtgcgcccgacgggttgcgcatcagcaccaggtagtgtgcattgttacgtgcaatgcgcagctcgcggatgaacaaatgctgcgtgatcaataccacactgacgccccagttgtgtgagccacgtgtgaacaacgtgtccaggaagggagcggcatgccaaccatcagatcgtccaacaccagcagcagtcggccattgcactcgcttgccgcccgcttcactccctcctcgtcaggcagcgcgtgacagacacgaacccatcgattacaccactgctgctngtgctgctgctgctgatttttt

SEQ ID NO: 16280 - DNA, 2116 bp, Heterodera glycines
caaatgaataaaaaggatgattgaatggaaaatgaacttaatcaaaaaaaaaagaaagaaaaaataaatgtttcagaaataaatacaataataaattgaaaatatatttttaatttgaatgattacaataaaaaatatactaaaacgcgcttactgtaagtaaaaatatcttcattaataaactattaccaaccaaatcgaacaattttcttatcattaattttggataattggttttgtaagttaaatattaacacaagaattgacataatctttaagaaatatattagaaataaattacgtaaaatattattttcagctaaagtaccataattcttaataattagtaagtttattttcaaagaaacagcttatctacttagctgtcttgatttgggcaatgtcaattttgaacttaacattaggcgccagatttactattagtgatgaataattgaccggataaaaattcaaatttcattcattgccaaattaatttttcgataaatggcatttttataagtcgatagcagtttgaatgtattaaaatttgtggccatcaggcctgacatctctgcattcatgaggtttggcatggaaaatatataacgtctgactctcactctctcctgattaaataattatcaagaacagcatttcatacatttatgttttacggaaaacattgagcatcatcctaacaattcccatttaatcacatgtgagacactttttcttatgaaaagcaggatcatctagagctaaaaattgtcaatgtgacttttctataaatgtcattttataagtcggtatcagttgaaatgtattaaaatttgtgtccataaaccctgacaagctaataagaacgagccgtcataatgcatatcatctagacttgtagcagtgattcgaggcataaaaccgcttgggttggttgttaattcattaaaaggcggctgagctgcattcccgaaaagtatttctgatgcccatttaaaattcagtacaatcgtaaaaatcagggcattttttatatttctaatgccatttaaaattcagtacaaatcgtaaaaatcattactttttttatgtttcaaattgttgcgactgaacaacatccgcaactgtccgtggaaggaacagaaaggggggaaagggatgaatgatgacgaatttcaaaaaggagggcgcgcaaccaaagggcgggaagtagaacgggtgacaaacaagtctgaggcggacaaaattttattttttttactaaatatagaaaaattacaaaaaataaatctctttcagtatataaacaaatttaaaaaatttctttataaataatattcatgtattttttattacaaataaaaataactcaaagaaaataaataaaaaattacctatccttcaatagcataagccacaaaaaaaaaaacaaacaaaaatttattcataatttatttaaatttaatccaccccacagtaaataaacttgactatttacccaaaattttcaactttttacaatttattatgaacattttgcgaaacagaacaactatagcactgaatttttcaaaaaaatttgcaaattcaaaaaattaacaaaaaattacaagaaacgggtttttaacgcaattggcaatagccaagtataactactgtaaagtggattaaatttaaataaattatattaaattttggtttattttgggagactttccacgaattgtaattatcagggattttatatttctaatgcccatttgaaatttaataaatataatcattttttggtgtaaaacttggtatttctttatgaaacgaaaattttaaagcgaagacggagcaagtattcttcccgaattctctctatttctgttggtacgttaaaaatttgttttcccttttgtttatttttctcgtctttaatttcaaaattaaatcatccctcctcatttatcaaaacaatcccaattatactattgatattcctcaatttgttttaccctttttccaacaacatttcgaaatttcattaaagttttgacgacataaactgacttcaattgaaaaatttccataataatgcataaatattggcttttatgttgaaaatgtt

SEQ ID NO: 16281 - DNA, 1970 bp, Heterodera glycines
  unsure (1)..(1970): unsure at all n locations
atgtgaaaaatgtttgccaattcagcgctcttaccttaatatatgattatcagattttaaatcattaatttaaataaggattggataaaccgtcaacaaaaattcctaagaaatattcatataaaatctgcgaaatttttggcattctgtccgttcatattttaaattcatcttctattttggcacatttccaaaatgaatctttttatacaaaaaatatatttagaattcttggcattaacattcgagttattcgatgcatttacctcatggaataataagttattatcatttatttttacatttaattcgcgtaaaaattaataaaattatagaaaattaatttaattagtatcaatgattaatctcaacctaattaaagtgaaaaaaaataaaaattataaaggctaaagaagaataagtgcaaacgaaataaaagttcaaaattcaaaagttaaagtgttttaaaatctttttagaatgtcaaaccaaatgaagatatgaagagatctgaacgagaatactggagtaatgatttaattgagataagtaattccaaagtctcaaacataattcgatagagataaatacaaacaaataatcaattaaaaaaatatatatattttaaatatgtcaaatatatttgatttcatattaaatttacttcgataatttaatagattcttcgttaatttaaaatcaagtgtatacataggcaattggaatgaacaaaattttaagaaatgtttcttaaaaattttctttcatttagataatcacagaaatttcaacaccaaaattttatatttaattctaaaacatgtgccattgaaaaagcaacctgaataaaaattttaaaatcctaaattaaatagtaagaaattaaaaataatatctcaaaaaaggtaaaatgttaaattatgtgatataacagtaacttatttataagtttttttaaagtaacagtgctaaataaaaaaataaaataaaatcattctccttttatcgaaataaaattgttataaaactttaatagtaacaataatagattattaaattatttgtttaataccttaaacgaattaaatttatttagcaaaacgcaaaacaatatacaagacaaaatccgacatctaaaatcataaaaaaataatctaaaattttttccgaatataccaaggttaaaataaaatagaaaatatatttaaacggtataaagaaaaatataatagaaatgacattaaagcggcaataacggcaatcgacaatacaataaacgtaatcgacgatgcagagcgaggaaatacatttttcaacaataaataaatcctaataatgtggagtaaaatgtaaaagttaaaaaaaaagaaaaaattgttattctttttaaataaaaaaagtaaataaaaagaaaaaattgttattctttttcaaaatttaatgctatgaaaaaaattaattaaatctttatccttaaaaatatattaaaatgtgaaagtgatttattaaaaatatggtttaattattaactgatttattaacttaatctcagaattgattttttgaagacaaaatttaaaggaattagaaaataacacaaaaaactaaaaaagtctaagtgtatttataatttaatcaacttaaattgatgcattgaagacaaaatttaaaggaataagaaaataacacaaaaaaaattacccttttgtgtagagcctatacgatatttaaaagtaatttttttaaagataaatacatttttatatatttaaaaaatttgaaaaaaaatctattagtttttaaatattaatacagctcaatgggaatgaagggagtcccatcatttacaagtgaaattatgcaatctattaactattaatgttaaggtataaataaagtanattataaaaaatatatttttaacaatttatttctctatttttacgatatatcaattagtaaaaacatta

SEQ ID NO: 16282 - DNA, 3826 bp, Heterodera glycines
tttgtgcaggtcggcataacagtggagaacatcgatttttgaggcgtaagagcagaaaatggaaacactgagcaggttgacgctgataggactgcccaaagtgagcagtttgttcagttgggcactcaattttcgctgcttttccgctttttcctgaaccactcgatccaataaatgacggcgaagctcattcagccggtcaatgatcacatcacatttgtgatcgattcttaagcaaaaaatgaagaaggaattaaaccaaatattcactcctctctcaaattctcgctgttcttcgaaagttcgtccgtcaatcgtttcctcaactcaatttgctcacgaagttcctcctgaaaaatgcgcaaattcaacgcatttttctccaatttatcacagcaaattttgtgcgccagttcgatgttgacgaaatgtccgctggtgaaaatacaattcatacgaattttaattaatttggaaaaccgtcgttccaacgaagacgaattgaagcattcgatgcacatcagcgatttcgagtcgagacagaataaaatgaacggctcattgtgctgtggacagatggggcgacttctcaactgaaatcactatttttttctgtttttgtttcgccgtttaccctcccgcgctcctccaactcaaaaatgtgatgagtcgagaatattttggcctaaagaaaaaagaaacgattggcaaattctctttttcccaactttgtgggtcgtctcgcgacacccgctgcaaagcggctgatggcacgtgtcgcagaagaacatcggttgcgaaatctgaaataacataccaagaaaggcaagggcagttaatttgctctaattaattaaaggcaagggcggcagttaatttgtttcagttaattacctggtcgcaatttgcacatgtctcagtgacctcactcgaactttccaacacgtaattcagcactttgtcctctactaactcggaacagccaatcggatgaccacaaatcacacaacacttctcatcggcgatgcacaaacgacaaaaatagtgctgacaaggcaaacggacggggcatttgataggctaaaatggaaaaaataacaaaaacaatgtgaaaaagcatgggaaacagacggaaaagcatcgcagacaatcgagaggatttcgctgcactgtgtcagtgcaaatgccttcctcttcatcggcaatttctaagcccatcctttttgatttgatagacagtgataggagcaaattaggaaataacaggaagtcaaaccgaatatatagaaattgaaatttggtcatcggattaatcaaatttacaataaaaatctgtcagcaaaaagaaaaatcatgtggttaaattggcatggttttccgcaaatccgatcaatttcttcctgctttcggcattgattgaaggcctaacactgcgaatggcattttccaaatcggttacattcactgggcgcaattgttcagccgtacatcgcctcaaatccctgttttccattctcgcactttgcacgggaaaaagggcggcggctcgacagagggccttcaaatcggaatacgagtaattgtcagtcattgcagcgattttcctgaaaatggctttgggtgacaaatgagtaccggacggattactccaattcggcatcgttgagttgtaacttggtgttgctttgtttaaaggtccttcggatcatttgaaaacgtgcttttttgtccggcaaatcgatgaaaattcgctgaggaaatcgtctcaaaatgccttcgtccaattcttgggggcgattcgttgctgccaacaccaaaacgtggccatttgcctccttttccgaagaacatccgtccaactgaaccaaaaactccgtcttcactcgccttgctgctccattttcctgctcaaaacgctgacaaagcattgaatcgacttcatctgatgttattgggttcgatgtctttgaattactcatttcccttttttaattttaccgatgaaaatgatggatggctgtgcatttctggccacttggaaaagcgctttcaccagtcgttctccgtcgcccacccatttggacataattgtcgctgccgaaatgctaaaaaacgtcgaattgcactcactcgccacggcttttgccttaaattttcatttattagccaatgaatttgcctaattaacccacgagcatcgttttgccattccccggaggcccaaacaacaaaattccggtgcacggcgcccgcagacccatgaagagtttcgggtttagtgcaggcagtacaacactttcttccagcgctaattttgccattgcatttccttcgatgtcgtcgagtcgaatgtccgtcgtttccacgatggtggcgagaatttcatcgccgagtttggagtcgacgcttttcagcagagacattttggacaaattttgacgatttgagacgagctaaaagacgaaattaataaaatgtaatgacttactattaatgatttagtactatttataatttcctttactgcttttttgccgaccctttggtccgtggaagtgcacggcattctccttgctctgttgttgccggtttcgaccgttgccagtggaagaggcgtcgctctaagcgccatcggctcaatggatgctgaataaatttaataagttataccaagaagtccacccgcttacccaacttttccagccgatccttcgtctgtccaacaaaggcttttctaaaaacgatttggatattcttcaaaatatctttgtcaaaaccacaattttttctgctgttcctgcatttccgtctgcttgtgtgaagggcacgaagtgtgccgtatctccaatgctttgtttatttgctttaacacattctcgtacaatccgatcactcgcgatttggcaatcccttaacaacaccaattaatccatccattccgtcccattcaatttatgttgctttacagactcgtctcgtcagcttcgatggcctttctcagactttcccgcactttcctgttcagttcgtcaaacagccgataattggcataagcgacgtcggcggttgcaggggccgacttggagcccatgggggacgaattgggcaacaaatccaagcagaaattagcaaaagcgtagaacaaattcaaaaggaacagaacagccgactcgagcataaacaaaaaatgagcagcggaactcactccatccgtagcaaaacggaaaacaaatgataatcggaaaataaatgatgaaatagcaacggcacggcaataactgtatgaccatgaacaatggaaaaataaaaggaaccataaaatcattttattacaattacatatcagttgattaaaatataatttctgattgttaaaattttcaattctttgtttctccctctcttcgcttctcttttcggtcgtcaagcgcttttctgaagttgcccacggactgtaaatgggcatcgtggagcaaaatttggggacgtttctgaaaatggatttgccaatacaaatgttggaacagtgctggtcgtaaacaccttggacagagcatcaaaagcctcgtcaaccgaatagtcaaatttgtgcatcaaataacaaattgtcactgttgcacttcgcgtccgtcccgccttacggtgcaaaacggtcaaagcgtcggccaaccccaaattccttggtcaccttacagtgcacatagcaagtccgtccttttgacgatattttgtcaatgaaatgcacggcctcctcaatgttttgatgggaggtggaaccttcgaaattcgaccaatttgttcaaaaatgatttaaaaaatttataat

SEQ ID NO: 16283 - DNA, 2117 bp, Heterodera glycines
  unsure (1)..(2117): unsure at all n locations
aaaaatttgctcaaaatcacaaaatttggtcattnttgtggacaaatctgttacaaaatcgcattaaaaattacanaatttttcccctaaaagttnttggcaaaagcgctgaaaaaaaatcaatttcgatttttcatactcagattttcacaaaatgctaatttcaaataaaaaaattgatcatggacagtcaaaaatacaacattttaaacgtgttttgaataaatttgtaaaaatgaggctttttgacccaaaatgaggcttttttgcttgccgaatgaggcttttgaaaattttcatctgcgagccctggtcaaaactgattatttgatgagatgctgatttgctgctttttgagaaaatttgttgattttttgaaaaaagagctttacgagttggtggccgaacgtttcgtcactgaaataaaataaagaattttaaagggaaaaaatattaaaaattatatacatagatacatgatctatttgaaaaacactagtctaatacatatttaactttctgattcgtaggccgattaatttgttttagaaattggttcgatcatgagaataacctttaacctcccccgtgttttggtggttatttgtgggttatttctgatacttggctaatgttgagttctggaagtgtgttaaactgtgataacaagaaattttagggatgacaaaatatatccttgaacctaacccagtgtggtactccttgttttgctaccccccccccccctcgaaaaattttaaaaattaatatttttgggcttttcaaggtcactgatcatcatcaatatggcgtttgttttgacatctgctgatacctacatacctggtcatagactggacaaaatatctgtgattttttaaaatattttggggagggaggcagggctggacgcaagtggatttacaattacggaaatccgcaatccgcaattgtggcgattttctcagttgcggaaatccgcaatccgcaattacgggtgtccaaaaaccccgcaatttccgtaatttccgtaatccgcaatttaaaaaaattttttttttaataattttaaattttattttaaaaaatcctataaatcttttaaagcaatttaaaagcatattaaaaagcaaatttataaaagcaaaatcattcaattgaaaatccggttagaagcaagttatggtgaagaaacattcacgttgtttgtaaagttcagggtggtgatttttgaggtgaaaagtcagcacagttgtgctgagagaagcatttaatgtctttgagtaggaacatccatcggctttacatttagcagttgctttgccttgacgctcaaaataataccaccaattaccaggatttaagtttgacatttttaaattgctaaagaaataagaatttaaacaaatgtatatattttctttaaataaaaatagaaaaaaattcattttataaaaaataatattaaaagaaatcgtctcgaaaaataatccaatagtcaaattacggatcaaaattgcggataaatcccaaaaatccgcaacccgcaatccgcaattacgggggtccaaaaaccccgcaatttccgtaatccgcaatccgcaattgcgtccagccctggagggaggggtagcaaaacaaggaagtacccccagtgttaagcattttgttaagcgaatgtttaaagatttggtcgctggcagcacattgtatccgattactataatgtaacggtcaacgggattatgtgaaaaggccttaagaaagtccatttatctgcaacacaacaatttgtaacaactctttgctggattcaaaaacctgcgggacaagacccattgaaaatttattcaaaaaactaattttcgaacgcccatatcttttttctaactcatccaatcggttagcatttgcttagaaaaagcttcttctcatcaattgctttcgaatgataccaaaattttcaaattgttgccaatttccaaaaacttttacaagagctcattttcgggatggtgtgttatgtatagggaacggatttttaagcgcgaaaaagtccaaaataagtgcttaaataagggcgaaaaaagcgcgaaataagtgcgaaaataagcatg

SEQ ID NO: 16284 - DNA, 3459 bp, Heterodera glycines
  unsure (1)..(3459): unsure at all n locations
tttacctattctattactatttattatcaattttctttttataattatgtacatttaatgaactaataaataatctataatttatcttaaattattatttcattgtttattatttattttgttcaattaatgaatatgtttttcttaaattagaaaaattatcaattgcatttataatcaatctattttaatgaaatttaaataatgcaaaaaatatataataatttatggaaattgtataaattttagaaagtaatttttttattgttaattataattaatttttttctttttgaattaactataattttttaactttgttttttcgttatctcattagtttaatataaaattgttatgacgaaataaataaaatatgataacttcacaattataagaaaaaataaataaaattcttaatgataatcttatattaaattaaaagtgtttgattttatttttttttaatataatttttattattcttaaataaaagaaataaataactttcaaaaaaatatggatattatattctttttatttataataatctcgtcggttgttcctcttcgtacaaaaccaaaagcataattaattattatggcattttttaataatgtaatatttattatttcaggtttatttttatctagagtcgacaattaattctttttacttttttactctagtggcgtaaaaacggaaaccgtcttggtttcgacctgttaatattcaataaatttttttaatttaatttaaaagcttttttattatttaccttaaattgattgaaatgatttattttattgatatttgattatttttccagtggatttattttataacgtaatgattatttaatgtggtcgagaataacttaacatttagggcttttcattaaattctcaaattgctcattcattataccttctaatttatataaatttaattttataaaaatattaaccctatattcgcattttattaacataaaatttgaattttatcttaaaataatttttaaaataaattcaaaaatataagtgagcttagtaaaattttatttgcattttaaaatttttaatgaataaatttattatctcaaaattaaataatcatattttgaacaaaattttaaaattaattaaaattattaaaataaaatttaaaaatattataaaaatatattatttttatgggaataagtattttttgtattttatttatcctgatcagatatcagaattcttttttctaataatttttacatcatcttgacactgtgcccactttattgatgagttcgtggaccaaaaacaattgaaacagcattttatggaaccgcccagagaattttatttattttatagatttttgatgcatttcgcttttaattattttaccattaatatattcaaatttaataaattattttgtagacaaatatcaaattggagcattaaaatagtgcaattcaattattcgaaaaacattgcataattaatagaaatataataaaataatgattattaataatttttctttcattttattatgatccatctaattatataagagaatattctaacaaaaatataaaaaaaattatttgcgttatatatttatatttaacacttcatatgtttacagttacaagaaatcaataatgagccatttataaatttaatttgtgccttttcaatatagtaggttaattgtcatattatattcaaaaagaataaataataataataatatatttttatataataatttgtaaaaaataaataattaatgactaaattaaattgtatatttagtgaaggtttacatattaaatttttttagctttttattgttttttaacaagtattacagaaaatatctttgatataaaatataatatgatgaattgcttagatttttgattaaataatgtttttagattaacataaaagccattttttaatttattgtctgttttttatccaataattttaataaatcttcttaaattagtgaggaggacagtaacccgcgctttttcatgtccggtgttgaggacagggaattttttaataggtaggtacttttttagtcgatgattcaggtaaggtttttgttgcgtccataattaattataaaatgatttgtatttggcacctgaaagttaaaaagcaatgtagtttttcgtaaaaagttgaataaaagaaggttctgaaaaattgcattaatttgtaggaatatttgaagggttgaacaataaaagccccccctcgattggaagcccccccctcgaatataagccccctttggagggggggtgaacaatagaagccccgggggctatataatcgaggaaatacggtaaatgatttaaaccaaaatcctatttaattatattcgaattagtccatgttagcataaaaatatttttttatttttataaaatagatttcattttttatttcattggcaaaaataaaaattttttctttcccttttttcttaaagaaaaaatattttcggtaatataggagaaatataaacatttaatttttaatttaaaatatttgtagcatcattttatttcgactttttttcttgcctcaatattaatttataaaattctgtttattaatcttaatacaattattaagggatataaaattttagctaacaaatttttcttaattgtcttttgttgtaattttttaagaatggtcgttatattaattttttaatttaaattattatttttcttaaatttacactaaatattttgtcttcgtttcattcgtgattttactctttattgttttaaagaattatattattcacaaactaattaatttatttttcgtgtaaatttaaaattataaattaattatttgatttaggtttttaaatagtttctagtttctataaactggcttttttctaatcctttattattttattaatattaaattatggaatttttattcttatttttcttaaatttaagttttatttatttttgatgaattgcggcttttaattcttcgtaatttatttatatctgtttaatataaatttattcatctttataatgatcaaataatatatactcttttaataaacattaaaatttattgatggtcataaaaaattaaagtgactcaatgaatttgttttaattttattagtaaaccttttatagtttcttaacaaacaaagttaattatatcgcgatataaagaaaaagattatttgactaaaaaatttaaaaatatttaaatccaaataaattttaatttatctaataaaaatgaaaagcatatttttttgttttctttagtgttttctcataatcaagatgcgattattatccatttcactataaatattggaaattcatttattattattatattatagttccanataaataaaagtttcacaaatctgttttttata

SEQ ID NO: 16285 - DNA, 1298 bp, Heterodera glycines
cgtcctttgacggcggcagctgtccttttccaaggcctttattcgcctcccgaaaaagtccggggaactaaaaacaatgactctattgcagtttctgcaatagagccccaatacttctccacaaattcacaaaagtgtcagcagtcccgcgggggaatgttcggctgattttgagttcccccccccccccccgggggacggaattgtgccaacgaaaattcctcgcatttcccaccttcgcctttgacctccgttgcccaaaataaactgcaaatcccaacagagattaatcagtgaatgaatgaaatgcatcgactgaatttgtgagtggttgttttaattaattttaaagcaataacgtaaattttgaaaaattttaacccaaaaacggatacaaaccggattagtaccgaattttattattgcttctcataattattagttttttttaataaagaattaattaaaagaatttttagtgataattgaattatgaaattaaataaataaaaattttttatttcaacgataaatttatttgtttgttccaaattttgcataaacccttaatttttatcaattttggattagtcattaaaatcagtttgttctgtcctttctaagaaataagaaaaaaaagaaattaattttcatttgtaaattattaataatccaaggacacattaattttgtaaaaaaataattaaaatttgaaattggaaattctttccttttgccatttatcgcctgtaaactgcgaaaattcagtgggaaaagtttgaaatctgagactttttgtccaatttgttctgacgtcaaattgggcgtctcgcgtgttttgttgacgtctgatcgatttgtaagggaagggaaacgcgtaaaagccaagaaaaaagagagacatccgccggagaaaagccaaaggatttttgagattttccaatcattttggaaatttaatggatggaaaaaaaacattttaattagggagtatattaaaaggtcattgagaataggtagaagaaaggcacagcaaaaattaggggattattaggaaaagttaaaattttaattactttttcataattcgttttaaattttaatgagtatatttgattttccttccctttccatggaacttaattagctcaacaaatgccttcttttcctcacaatcagttcgtttcttcctgctccataatccgctaatcagtgatcagtcagcagttggtcatttgtcacttttggtttttgactcccccccccactaattatgttctattaaatcacaattagcg

SEQ ID NO: 16286 - DNA, 1865 bp, Heterodera glycines
  unsure (1)..(1865): unsure at all n locations
agatttcagttatacaaattattatgaataaaaaatcatgcgaatgaattgtcataaagtaatacacataaagatattnttgccgttcgctggccctgaaaatgcacaaaatttggcatggtttcgcggcgacaatgacccaaagtttggcagggcgccgcgccctcgggcgacaagcgccgctggcgcagtgagcgagcggtgggcggccgtacgtcggccaggcggcaaggcgcgaccatcgcacagaattttgacgctgtgcaagcggcgtccgtctccagccccaccgtactgacaccccagcagaccaagagtgtgaagacggtgcaggaccgactggtgctgatcaacggatacgataaaagaccgtcaaagagttcgatggggtcggccgcaacggcggctgtcgaagacgaagaagcgcaagcgacgacatcgacagcggcaacggcaaaatcggcaagaaaacagcaacaaaagctggggagggggggggggcgagtgatgaaaaaacgaagcttctaccgagaaaagacgacccgaaactctcggttcgttatggcattttatttgggttgagtcgaaatttcacaatttgacactttgtccattcgtcggattgtctgaatcgtcatatcgtattgccaagggattcgtccttatttaatgcccaacggataattttaataaaatcttcatttacgcttttaggccaagcctccaatcccttcgacatcgtccgccaatcaaaaagtgagcagccggcgcaagtcgcgcggcactgcgacaaaggcggcagcaccggcggctgtcaccacggacgatttaccggacaaagtgtcgaatcgggatacagccaatggcgccgaattttgggtcgagaaaaaggccaattccgccaatgaaatgagcagaaacagcaaaaagcagcagcaacggcccggcactttgcttcagcgcatacgccaaaggttcaccaaaagtggagaccgacgaagtgccatggccgagttggacagtgccgtggtgagtgaaagatgggaatgccaattaagtaaaggaggtaactgggaaaccaaattcatactttggcacagccatcggcggagcaccgtttgtcagtgacaatgacagtggaagttggcacgtgccaaaatggtgccaatggggcacaacaacatcaacaacagaaactgcagccacagcagcacctcggtggtgctgctccaatggcacaacagcggagggaggactatcgcctgggcggggaatggacgcggagcggcgacgcacttggggacgatgacgcatcgcaggcaaatcgacggactaattacattattattgggactaattagctttaattgctttgaactgaatgatttgaatgcgcttctcccaaaagggtcgttgttcgtcttttgactatttttcggccaccgcctcgcccatcgaacggcaacgggcgacggaacggcgcgaaagtgggacgaccgcggaacaaacatcgccttgccattccggcaacaaagcagcggacatggaggaggagctgcgatttgccacggccgctgaagcgcgggcatatttacggagagagcaagcaaaaggtgggaggagaggggagaggaaaacgatcggaaaaaggagcagatcaagggagtgatcaaaaataggccaaagcaaaactgatcaaggaaatcgtacgcaatcagtgaaatgctaggaacaaggaccagagatcttggaatgaacaattgattgggatgggatgatcactgtaaagaaattaatcgaaaatcatgtcctaatggcccaaaatggaaatgatcacttttgaaaccaattctaataaacgactt

SEQ ID NO: 16287 - DNA, 1198 bp, Heterodera glycines
atttgccaattagaaatattatatttaaattctttgtggataattaaatgaatattaatgatatctcataacatgatgagaggaaatgagaggggtaattccccttaatttccccacccccccccccgcaattcgacggctggccagaattttcgcatgagaataggcacatttgaggaagtttatccccgaaagatggacaacagatgagagatgaagcattgctcccttttggcttcaaaggagccaaagggcaattgccgaggcattgaaattttgggtgaatcgataaggcggattaaatcttaaaagtgcaccgccaaagacaagaaagcagtcactcatcaaatgagccgactcaattcaaattaatgaacaattaattagtgcggaaaaaacaaattggaaaatttgtattttggaaagaaaatttctttaattgtcataaaaatgaactcttaaaagatacaaagaaatgccactttagttgccgttatgaataatgctggaaaattacattttcgctaaggcaaattctccgggcgatggcacccgaggcaaagagaattcagcagaatttcctgtttttgcctgctcatcgtcggccaaagtttaggcaagcggaaaacacagaaaagggaatgaaaaacagagaaaagattttaagaaagagaatggccattggagtgataaaattattagccctttaaattggctaaataaaaggaataaacaagcgaaatccttggccgaatgatggataagtcgagacatttgtggattttgctgaaagagaggaaagtgaaaagaagagagtcgaatcgatcagtgaaagaacacgagattagcaaagagggatagtgggatgagaagagagttcagtagagagtagagaaaaaagattcagtgggaagggataaagcggaattaatgagtgagcacggagagacggatcagtgcaagggatgcttgctgacgacaaacaaatcagtgaaacatcctgatcagtacacaaggagagatggagggagagagaggggggagaggggggaaatcgtcaacaaaattggaggtgagagagtgatcaaagaaaaatttgatcagtcgaagaacagagggaaaggaaaggctttggtggtactctatcagcagagcgaatgcgaggagagagagagagagagagagagagagagagaga

SEQ ID NO: 16288 - DNA, 2014 bp, Heterodera glycines
  unsure (1)..(2014): unsure at all n locations
aaaattatttaatatntaagttaaatgaanaattaagaaaaaacatgaataaattttataatcgattaataaaatgaatgaaatcaatggaaatatttttagctaattcactaatcataattattttgccaaataataatttaaaattcgaaagatatttaaaatgatttttttaaattttttgaatataataaatcatcgatttgatatgtataaatgtgaaagatgtttttttgaaacccatatattctttgaagcaaaatttggtcgaaatgaatgaacgaaagccgtaaaatgcggtggcgggggaaataaccaacgaaatgccaacagatggccaaggaaaagcctcggggacccatggccattttattctcataaacattccctgcgtgaaaaattggccaaaaattattgcgtgcattcataaaaaggcacaaaaagaattgatggatggaagaatataattgtgcggaactgacgacaagacaaacaaagggcaaagaaacactttttgaagtggaaaagcaattaaaataaattaaacttaaaatttcaaatgaaattaaaaaaaataataattaggggaaaagaaacaaagaaatgccaatgagaaaaggcactcatttattaatcagctcatttagcatgtatcatatcaaggttctgtgttgatagagacaaaagctgctttaacggagtttgttgtaagtttatcatttaaataaataaacaattataaatttaaaaaaatattaattaattatttttaatgcatttgtgcgtttattgaatttagcattttcatttgtatggctatttttttattaatttcgaatttagttttgtctaattaagctcttcttttaatataatatgtcgatatttgcatttatacccatacaaatcaaaaaagttctggattaaattttttattaaataaactaatattatacaaaagttatttaaaggttacaaacaaaatactaacaatccgtacccatatgacaacaatatcaacaacaacccttacccagtgaatccgtacagtaacaataacagcccatacagtggctataactatccatcacgcggctacgatagacccgatccaaccgtaagacgaatgttttcaacatttgggattaaaaaaattaagatcatcgtgataaatgcaaatccaacaaatacgtatgatatacaatatgtgaaatagttaaaatgcacacaaaaaataaattcagtccagtctacagtaatccatcttacccattcaacagcaacaatttatataatggatataacccaagcaacaacaacaacgcgtacaacccttataacaatggatacaatccgtataataatgtaaacaacccaaacaacaacggatataacccgtacagtaacggatttaacccgagcaacaacagatataaccaatataataatggttacaacccatacagtaatggatataatccaatcaacagcggatataatccaatgaacaacggatataatccaagcagtaatggatatagcccaattaacagtggatataatccaataaacaacggatacaacccatacagtaatggatataacagtggatacaatccaatgaacaactataaccagtacagtaatggatacaacccctacagtaatggatataacggtggatacaatccaatgaacaacggatataaccagtacagtaatggatacaacccctacagtaatggatacctgaacaacaacggatacaatcaaaacagcaacggtataaaaataaatgctaatatatttcaattaatatgtttttcaaattgatgacttctcctggttaacaaagcaattaagcttatattgnattttcagattgcttcaccgcgtncatggtacaggaccaaagagcatgcagcgcaatgcaaaggacatgctcaaaccccgtgggtaattaataattnaacgaacacaaaaaattgggttcatttcactatttttgcatttt

SEQ ID NO: 16289 - DNA, 1045 bp, Heterodera glycines
  unsure (1)..(1045): unsure at all n locations
tcccttttccctccccctcttttttnggaagaaatcccgaccaaaagtgcttgtcctccctttntagggcacttcccgaacccggacccaaacaaccctggtatcattcgaaagcctagactttgtagaggtgcttaaacatgttcattttttgatttaaccttttttaaggcatgcaaaaagcgttcgaaaataggtcatccaaaaaaagtgcaatttttaacttgtttttctacacaacatcatagaataaagaggaaaagaatgaaacgtaaaaaaagcgttcgaaaataggtaatccaaatagtgtgattttgggtcggtttttcggttgcagttcgaacagttctgaacattttagaaacccaatttttcccttatagcccttgaaaaactgcgtcgattgaccccactcccgacccgtaacatttgctaaaaagtcttaaattagtttttatgcttggatcataggtataaacttcttatatagggaattaatgatcaaggcaacatgctttaagttcatttgaatcatttggttttatttgcaaataaatagcaaagaagcaaaatgaaatactcaaaaaaaagataaaaataaatttaacaattatcttctttggaaaggatttatgaaaaaatattcgaaagaatgaaaaaaagtcgaccatatcatttaaaatgaactaacttatgattaagccaaaattcatctctcattgttcagttgggtttcgttaaatcaattgtgatttgttttgatacattgaaaaattccgaagaattaaaaataaaattttgctgtaattttcttttttatatatttttttatttcaattaaattcttttacctctttgttttcgtcgaaaatttttacgtgaatgttttgttcaaaacatttgtttgccttttctccgtcaaaaagtgacaagtgaatttgggcagtgccggcttctttttgtccggtgccaaaggcgagtactgtactcgtaccgtctgtgttggcaatgttacagtacacctccacgaagcattgctttctgt

SEQ ID NO: 16290 - DNA, 3243 bp, Heterodera glycines
ttaagtttcaaaatttttacttatttaagtttgtccaaataagtgtcataaaatgtgccactttcatgggcctacataattcatttttttaagaaatacttgagcaatttgacgttctttccaccaaaaattttagtttttcatttgcgatgaatgcggcgagactctgccccgtaagaaggtgctgcagcacatcgaccagtgcccgaatgagcggaacttttcgtgcatggactgccaattggtgttcgaccaggacagttctcaaacgcacaccaaatgtatcacggaggatcaaaagtttggtagcccgagagatgtgccaaaggtgaacaaggtaaatggagcaagaaacaacatgactttattaaattacaatttgtagaggtaattttttaccacccatttttcagtttttgggtgcctaagaggggttggtctctatctatattgacaaaatattcgatttattaatgttatccacggcctagggcccagaggattcggcttggaaagggttcgaagaatttttaaatccgatttgcttttaaaataggcattttcaaacagaggggcgccggtggtgccgcccataggtgccgtcggtgaatattttccgaaaattttgatgtatttgtttatacatttgtgccaaatgactaatttttctggatttttgggtcaaattttctgaaaaatctatggaaagccattgccaataaacagttttcaaaatttcgaattactcaaaattttcaagaaaaaactgcacttgacggcgttttgccttttgtaaaatcataaaaacgtctcttttttaacacatctcatcatttctcaattcattttttggttcttcgcttaaaaacctttttccctgtgctattttttcaaaaattttctcagtcggagaaaattttcactttagccaactttaacaccatttttgggcgcccgcttttggtcccaaatttccaactaattttttttttcataaaaagcaggatgcctgggtgtcgcaagtgcgtgccgcaatccgtcatgtggacgacccacggctgaacaaagtgttgcgctccgtctacgcatatgacaacattccgcgcagtaaggcaaagtttgtcaacttcatgcaaaattcggtgcgcgtccgggaccgcgcggtgtgtgtggacgcgtggaatgccataaggcggggggcggacgcggtagcggaagagaagatggtggcacaagcgaagcggacggaacacgcggaaacaatggcggcggaagcggcacaaaacggcgacgacgcggacaaaacagcaaccggacgaacggacaatccagaaacgacgacaaaaaccatggagggacaagcggaggagcaagaaatggaggacgacacagagcaaaggtgtgggtttttggaaattttgataatttttacatacatgtacaaggggtgtctcagaccaagggccatacgacggacgattgggacagggggggtgtctcgggaccgatttttcatacgaaggtccaaatgttctccggcgacgaccttttttttttttttttgcttttcaaaagcacttattttttgcgacctttgcattgcttttcaaataaaacaatttttatacgccattgcttttattcatgtgaaaattttaaaacacaaaaaatattttattcgtcaaaagcggtgtgcaaagtcaaattggaattggaagaacactccggcgccgtcggtggcaattgcatttgagttgaaggcaaagaaggaagtatttttgtaattaaggcaaattataaaaataattttcacttgagagattgagattaaagggtacctctcgagattttcccgggaatttccggtcctgggtttttttaaatattgctaattttgtcgatttttgtaaaaaaaattttggaaaatttgggtgagggggaggccttggagagggtaccaataaggaaaactgggaaatttcggttaccccacatttgcgccccagccacttgcgcctatgtccaaaattggattctaacttacattttttcaatcccaaatagactaaaccgctttaaaaagcgattgaaagtgattgtatgcaataatttgatcgtcagcaaatttatgaaaaaataataaatttttgaaacaacataattattgttcctaataaaccaaaagaacaagttttcttaaatttaatgctgtttaagacctctaaaattgggaaaatataagtttgagcagcgcgtcatgacgcagaggcttggcaccgcaactttaaaatgtcaaactgttttttcatagacaaatttattgttggtatcatttggtagcccaaagtgttttaataacaaacacaaaatttaaaaagttatattcgcttccaaaaaagatttggtgcacgacgccaaaataacaaaaaaaaagagagtcgattttgccataactttagtaccccaaatgaatttttttcgaattttgcgggttaaagcagtaacaggcaagcgctttaaaagcacacaaccaaattcatttaaattaattgtgccactaaaacattgagaattttaataaatcaaatttttgaaaaaattacaccgaactctcaaaaaaaaaaacttttttttccaattattgtttttttaaatgattcaaaatgcctttcttattttgtttcttttggtttaaggacaacaacaaaaactgtgatgtcgggaggacaacaacgacaacaattggccggccaatcgtcggtggtggcgggggacagcgacgacggcggggaggaggacaatgacaactgcacaacaacaaccaccacccccacttacatcaacacatcatcatgcagcatcattttggatgaccaccagcagcagcagcagcaaagtgatgccgaagaacaggacgaagaagacggagcagaaaacgatggtggaggaaatgccgaggaaaatgcgcaaaatggtgacgggggggaggaggtaagaaaagggaaggggtgggagggcagaccagcaacgggatttttaggctttggaggcaccaattggcatatcattcagctaattttctttaattttttttgcgttattttttggttgaagaaattccaagaaaaaataatttaagaattttaaaacggtttgaatattctgggcacagaaacgcaattttcttgatttaaaaaaacttcagggtctctcttcaaaaagcaattttatttttgtttattt

SEQ ID NO: 16291 - DNA, 1512 bp, Heterodera glycines
aaatactgaaaaaatccgcaattttttgctctattatataaattttattttacatttttatccctttttaaaaaaaagttataaaaataaaagtgattttgggattcgggaccaaaggggggtgaccaggatttttgagtggaaaaatttttccacccaaaatcttccaaaaacatgtcattagggctatttgaggctgctgatcacgaatacgtgatcagattttacttttgacatagtcaagacctcagaatccctgtgtgattggggattctgaggcatcattttgaggggggagggggcaggttcggatccggacggtgtaacattatttttctgtgcatttttacgttattttcaatgattttaattaatttaaaatattttgttgagttaataaataaaaaattatatttaatttttttttgataaataaattttataagtttaaattaattatttttttaattgatagaatttcatgtatttttttaattaaatttgttaaaaaatattttcattttaatttaatgaatcactgttgcacctcttctaatcacggttgtacccctaaaaaacgggcgcgaagcgcccgtctggccccaactaaatttaaaaaacgggcgcgaagcgcccgtacgaggccgcgagcggcctaaaaatcaccaaattaaaaaacgggcgcgaagcgcccgcctggcccaaacaaatttaaaaaacgggcgcgaagcgcccgtctggcccaaacaaatttaaaaaacgggcgcgaagcgcccgtctggcccaaacaaatttaaaaaacgggcgcgaagcgcccgtctggctcaaacaaatttaaaaaacggtcgcgaagcgcccgtacgaggccgcgagcggcctaaaaatcaccaaattaaaaaacgggcgcgaagcgcccgtctggcccaaacaaatttaaaaaacgggcgcgaagcgcccgtctggcccaaacaaatttaaaaaacgggcgcgaagcgcccgcctggcccaaacaaatttgaaaaacgggcgcgaagcgcccgccaagcccaacaaaatttgaaaaacgggcgtgaagcgcccgtctggccccaactaaatttaaaaagcgggcgcgaagcgcccgtatgcccaaacaaatttaaaaaacgggcgcgaagcgcccgtctggcccaaacaaatttgaaaaacgggcgtgaagcgcccgtctggccccaactaaatttaaaaaacggtcgcgaagcgcccgcccaagcccaacaaaatttgaaaaacggacctcttctgatcactgttgagcgcaaagcgcccgtctgaggccgcgaagcggccaaatgagtccacaatatttagaagcgcaaagcgcccgtctgaggccgcgaagcggccgaatgagtccacaatatttagaagcgcaaagcgcccgtctgaggccgcgaagcggccaaatgagtccacaatatttagaagcgcaaagcgcccgtctgagggcgcgaagcggtcgaatgagtccac

SEQ ID NO: 16292 - DNA, 1000 bp, Heterodera glycines
aaaagtttaattgaaaattttataagcatactccccggtacagggctaacttaacctgaaaatatttcaacgctcattggtttttttgaaattctgagttttccattatatattttttttgtaaaattaatttataaatattttttcagaaatggctctgaaaacactccaaattaaattgccatgatactaattccctacaataatgaatatgggagaacaatacttttatttccatcccatagggtttccttaaaatttttttggattttccaattttctatacttttccaatttaaaaaaaattttgttctacataatttttcgaatagtatcagaagctcaccaaactttgcagggatgctaaaaggatgaagagcatcctattttaaactttttcatcccatatccttaaaatatttctacgctgattggttttaaacaaattatttttaacttttcttttttttttttgcaaaattaattcataaatatttttcataaaaggctctgaaaacgcacaaaattttagggtcatgccattaatgctacgataatgcttataagattttttatattttatcggaccaatttaaattttgaattaaagaaattcatttttttccttttttgttctttcaacatttacatcaaaatttttcccagggcttgcacccgaaatatttgctcagctccagtgatcacttccacaaggccattgcacgctgatcgaatgtacaaatcgatcactttatatgtgaaaaaagcgccattattgttgtctgaaaatgccattgggacgacggctggtcttaatggggacccatttttgctgctgaacatgatcggcgctgaattgccagccgatcggctacatttatgtgggtatttaaattttaaaatttgtgggaatttaattttaaagactccaaaaaattattaatgtgcttaaacactataaaatattaatctttgtattaagcattgttttaaaaattat

SEQ ID NO: 16293 - DNA, 1856 bp, Heterodera glycines
  unsure (1)..(1856): unsure at all n locations
taatttaattntaaataattntaattcattatgtccattctgaacttntgatacaggaaatatatacatntaatgatttatttatttattttttgatttctattatatatatattaaataattttaaatttttataaattaaataaaaaaagcaaaaaatatttttttaaaaattatatctaaaatatagattccaaaaattattttttaaattttaaaactttaatgatttatacataaatttctttagacccaaaattaccacccgcagacgctggcattgtgtcactcgcatttgacaacagctccggccatactgtaccaatcatggcaaagggtgtttacagtaacgcgcagttttgatccaatcactactgtaacaccgttatctgcccatttcctggattctgtacattttcacgcgatggcattgctagtatcacgtgccactgtgttgtttgcttcatcgtacaccgtgtttgcctaccgtagcacttcgtccttttacaaaatgtgcagtaacaattttgttaggttcattaccgtaatctttacgacaaatgatgcaatgtctgaaaatgaatgctcaaattattttagatttgaatattgtgcgagttttttaattaaaaaatgtttttgtagcgtgtacaactgccaaccatggtctactgtaggcggtgaagagtgcggtaaggtgtacggtatcgccaccgaagaggaccacccaatgagagggccagggcgtgtgtttctgctcaccatgctttcctctggcgctgttcagctgctctcatgcagttctgatctggcacaaccgttccaactgatcgccacgacaaaccatttcccatacaagtgagttggtttgatcaaatgttaatccgatctcaattagaatgtttttttttgatcattattatatgtatatagagatgaacatatttccaaatttgagagatttttagtatctttcgtattttttatgtaattaggaaaccaattggtttcacggattaatgtgttaccatactcaggaatgaattattgtaaaattttgggcatacaaaatctaacatcatcattttctaaaaatgatcgatttgtatgaaaaaaattaattaaagaattcgtcaaatggcatttgcggatgatcgcctgttaattctgacggatgatggattcttcggcaccattgatctgacactccaggtctgtttacactttttaatgatggggacaattgtgttaaaaattttttttattaaaattaacatttttagtttaaatattttcagaaaattagacaatttttttaattaaatttaactaattaattagtaacattaattgcttctaccttaattagttggttgctctttcagatgatcaacttgaacttcgctgtccgtgacattcaatttttgttggccagtgacaatgtggaagatgttggcggcgaccatcgcatccattttgagggtccaatacaatttgacgacaaattgggccaattcagctggacggtcagcagctggcaaaaccctgttgggcaccatgaaggtatggatggtgaaaattgagatttttgcattttggaaattcaatttttggatgactaaaactgtgccgatacgaattcctacagttttagcttcaaattggtaacaatttatttgggtttttaccatgctgatcatcatcatagctgattatgatgcacattttaaattctattcttctttagtgaaaattctcagagactcacgaaccgaggcactaaaaaatgaagaaatttcttgacactaaataagaatttcgaaatcggcgatgtcgagagctaaaatttatcatta

SEQ ID NO: 16294 - DNA, 1013 bp, Heterodera glycines
ttttctctaaccaattttttctgtcccttttcgtctcatatttttttttttcgtaaatttgccctaattagtgcaaaattttcatttttaagccattctttcacttttgctcactctcatttttcactgaaaaaaaccatcgccaaaaagtaacatggaaaccaagcgcaacaactacaacaacatcgactcgttgtggagcactttgtgtgacctcggctaccaaacctcgcagggattggcctactccgtcggcatgcccaacttctcattcggcgccttcattttgctgtccgtcatggtcggttttttcggggaggtggaagaattgtaagtaatcttattttgctccattttcagacttggtgctgctttttcatgccggtaaatgccatcattttgtcgaccgataattaattgaaaaaatttatgaactttctcccttttttagcccgtggctgtgttcttccgcggctatctgcgcgacgggaacgcgtgcactgagcatgtcatttacaacatcattttgtggtgagtgatgccctcgggggctgcgggtaccattttgtattttttcaaccaattttttcaaaatttttttttacctttaccaatttttttatttttgaaagggctgaaaatttttcgtaataccaacagattgctttaattgtagggtttttttttaaatttaatattttaaataattgacatttttatttgggcctatacaaatttaattaatttaaatatattcagattttttattttttttctcccttttcagctttttcctgtgggtgcccggcatggtgcacgccttttggtactgcttcagcgacatgttcagcgggccgaagaaggagggcgccgggtacagcaaaaatgcctgagcagaagagcactggcgagcggacgaacgcagaaatgagcattttttgaaaaatgacgtcatcgatcttattaatttttgacacctaattaagcgataataaatatctctctcacctttt

SEQ ID NO: 16295 - DNA, 1772 bp, Heterodera glycines
  unsure (1)..(1772): unsure at all n locations
tcaggccgttttcgtacgaacacatgttttttgactataacttttttctttgtcaaccaaatccaacactgttggtatcttcgaaagcctttcagatgctctattagcctgcaaaattccaaaaaatttcgtcaagtttaaaaaaagttcgagccaaaaaagttggaaaatttggttttttgaactcttctgaccataacttttttgaaccttaacgaaatttttccaaattttacaggctaatagagaacacttagggctatcaaatgataccaacaatattggatttggttgacaaagaaaaatgttatagccaaaaacttgggctcgtacgaaaacggcccgtacgaaaacgaccctgaccgagtttgtcccggattttgttatttttgttaaagttatgaattttctacaaaattttatgaatgggaaacaaaaaatgataaatttttggttctattagttcttaagtttttctaattgaatctaacgcttgtacaagaactcgtacgaaaatttcccccgtacgaaaacggcagtacgaaaacgacccccctcggtacgaaaacgaccctgaccggcgggggagggagccagagaaaagaaaaaaaagaatttaaaaataaaatattaaaaaaagtcaaaaatgatctgtcggtaagggacaccctcgtttcggcgccgctcgtttcggcgccagcccagtttttggactataacttttttctttgtcaaccatagcattattggtatcattcgaaagctctaagtgttctctattagtctgctaagtttcaaaaaatttcgttaatgctcaaaaaaaatatgactagaagaattcaaaaaaccaggccacatgtgtacttttggccataactttgttcaaaattgatcaaattttttagaattatgcaaaataatagagcatcagaagggctctcgaatgataccaacaatgttagatttggtggaaaaagaaaaaagttatagtccaaaaactgggctggcgccgaaacgaggtggaccccttagaaatgcgttttttaaactataaaaagggaaagtgatccangttgtttcaaatgtcacgcaaaactcatgatagctaaaaatgaacgtcatattctgttcagcgcataaaaatgccctagaaaaaattattaaaaaaaattttagggggggtcacaaaagggataagaaccggtaaaaaaaggttcgtttaatcccataactctaggcagataatttgtagttttacccttagaatttttatatttatttattttctcagttcgacattgtatacgaagccaatttgcacgtagatgatctttttaggcataatcaagaattcctaatgtgccatttttactgatttcgcaaaaaatttaattagcttagatcgctgacccacaaaatgtccagcccacgaaatgtccaagtctcgaatttgagttttttattattcagacgggcctaaggttaggcaaggggtaatataaagggtatattcgtattcagcgaccccgaaaaccctaaaaatcctaaattagactcattttgtttttataatttaagtcatacccccccccctctaagaattggcatttgacagatttaatatcattaataataattattattattctatcaaatttttcatccccttccctccccatcacaatgttcaagacttttcttcttcttcttcttccnctctttgcgcctagaaagagtgaatgccgtggcattgaattggtcttacgcaataa

SEQ ID NO: 16296 - DNA, 1122 bp, Heterodera glycines
cctaaattcaagtttattttgtttatttttttgtccattttcacattatcatcatctccttgaaatttcttatggcatgccgagcataaaatgcatattttcggatggagtggcgatcggccttcatcagctcgaagcagttcgtcatgtaggaagtgaccatgtgaaagaattccacggaaaaggtagcgtacacattttggcacgaaatgtgactgtgccgggcaaaagcaagagcaaaagtggccaaactgaggaagtgttgttcattgagtttattttgggagttgtggcgatccgaaccgataaaagcctaaaatgcaaagtatttttgcgaaaaacagattctaaaatacaatttctcttgtcattttcatcaatttattatagcgtccttcgatgagcaatcgccaaaaaaattccttcatcgaacgcattgcctccggcgccaaaagttgcaaattatccgtttgtttttcagacagacgcccgtcgacgtcgttgttcatttgtagattttttggcagtctcttcgggcgctttctctctgaaagtgccttcaaaggcgccgcagctgccgactgtccattctctttgttcgccactgttcctcgaagaacaaagtcattttccgaattgaatgccttcaccccttttaacgtgaaagttcccgtcaaaaaactccgtcggtttgccatcctaaaaattgtgaaatttaaaagttagtgtcaaagtttttgcgcggccttttgtttgcttcttcgcatttcgccagttcaattttggctgcttcgtcctcttcgaaaagcgccttttcttctatttcatttcctggaaattcgtcatcgccccgagcgacagtcaaaggattctaaaaataatttaatttatattttcctcccatagggtttttgccttttaccacaaaccaatgatccgaagaccaaagccaaaattgaaacaatataacaacagaattcacgttcagttgaattgttcgaaagtttcaagaaaatcgtttcaattcccgacgaaaagagacattttatcgctttctcgcgatcgcagtaatccacttcagggaccgaaacgtattttgcgggactttcagtgccaatagca

SEQ ID NO: 16297 - DNA, 2723 bp, Heterodera glycines
ttttgcgggactttcagtgccaatagcaaaaacgtaactgtagcaacacaaaaatacgttcaactaacaatcgctgattttcacttctgtcctcccactcctaaaaaatatgcaaataaaaaaacggaaataaaaaatgatgccttgtcaaaatattgttggatgtttgcgaagaattttttgaaaataataacatcggtgaaagcaaccaaagattggacaagtgacgtttcaaattcgtaaaaaatttgcaataaatcaaattcattttctccaggcaatttgccaccgaacgcaagcaaagtcggctgacacaaattgacacaaagtctgaataaggacagcttgcaaatttcaattgaaattattaagtatatattgttttaataaaattccattttcaccggctgcgcctatcagcaacgccgacccaaggcacttaccgaagcgtggcaccgaaaagttcgtccgatatctccgaatttaggatgggaacaaggtcactcttcacaatgttgtgccccatgcaaagccttctaacggtaaagtgtcggtcatcacgatggaggtaacgtatcaaatcccgaacactctctaaaggaagaagacacataaaacgaaaatgaaagaatttttcattatgaaatgctcacgaaaacagtccggctcaggataataaacaccattattgagaaaaccgagtgagttaatgagtgactgcacctcacggtcaacagaagacatcactaattaggacaaagcatcacaaaaagataaaatattcacggaattatgataataaaattggaaataaaataaaatgaagccaaaataaaatgggagacatttgaatattttcaatgttaagaaaattaatgtaaaaataaaaatattgattataaaaaagacttcaatttgaattcagtgaataatacaaatcgttctaatccatcaatgtttgttttgacaaaacggacggtcttcgccttaccaaaccctgaaaaggaaagaattcattttaagagaataacccccacccaaccatctcacttaggaatgggttgctttttcgcgcttcggtaagaattttctcgaactgagacaaacagccaagcttcgaaagaatttgaacaagttcaagagtgagtacgggttgcaaaacaggggcaaaatgtgagaccaattcctgttgagtgagaccagaacgatggaaaacgacggaaagcactccctcaagcatccatcttaatttgacgaaagtttagacaaggtcgaacaaaataaacacaaccttagcactttccagtttactcgcccggatgggaacaaccaaggcttaggcacaaagccatgaccctcccgggtccgaatgagccacggcctgcaatggccgatgcttacaaatcgcacttcatcaatgccgcaaattacaacgtcagcagtctccaccagtttattcaattgttgttgtaccatctccacgtcaaaattatgaacagacattcgttcctaaatttaaattaaccaaaattttccggtggtgtttatatggacctatgaattccagttatttgtaaaataaaatgccgaattaattacaatttgtgcatatttaatatttataaaaattcgcatagcctaccagcaccgtcgtacaaaagaatcaaatttgcccaccttcaattcttcttctgacactccaacagctccactttcatccaccaaatcaagcagcagcttacagcaattgtcgacaagagatgacgacttcttcccacgtgccggcgacttctcctgcactttcagactctgtccactgtttttggcattgtttggagtttcgtaagtgcattcaaaatccatttcttttggcattttgttttgatgcactatttgaacatttacaagacattctgggtcaggtagaagttgaataagagattcgatgaaactgtgactcaactcgggttgaattttgaccaattccagccgtaattcagtagtctccaaatagcgaagttgtttggttgcacttgcggtaaaatgctaacaatgagaagataaagaaaaacagaaaaaaatattttaccccaaataaatcactgccatcatttgctgaattaattatttcattattacgcgcagaaaacagttctttgattgaattcggcattgaagttgtaattgagaactgcaaatataaggtgttagtaataaagattttttaattataaaacctcgctaagattttggcataaatgattggcgagtgttaaaagttgaccagggcattcggagtcgccaaaagtattccaaattcgattcgttaaagcgtgcgaatattcattgaaaagcgattcacacaaattcttatggtactcgggttggaaaaaatgttgatagctgaattgggtgaataaagcaaaaggagcaagcaatggaccagtacaattgggtgcatctcacgtggttgcgccattcttcgcccatttgaatgcccaacttttgggggctctccgtcgtcttagttgccactggcgccgcacccctcgccgtcccgaaacattctccgccaatttcaacttccggcatttccctctccctttctttggtctcagttggcatttccatctccacgtcaatgttttgaacagtttcacttaaggttgtttccgatgctgcgcttgctcgtacgcccaacgatgtcgcatgtccacgaaacg

SEQ ID NO: 16298 - DNA, 1055 bp, Heterodera glycines
cagttggcaaaggaattggaggcggaccaacaagcgcaatgtgtctttctaattattttctaaactaaaaaaaaaaatttgtttagcttctaacaacaccgttcctggctggtcaatgggaatttcgtgcagttccgctgcgggtacatcagttcccgtgaccaaagtgactccagtgactgggtcatccaatgggagttcggatggcggtggaggtactacgccgttgcagcgaatccctggaattgcgagtgcattggctgctgcggttgtggctgttcaacagcaacaccataataataataacgttccgccatggccgtccggaactccgcccaacaacgccactcacccatctcttgacactccgccaattcgtcagccattggcacaaagaattttctcgcccgctgtcagcaactcatccagtttgtcaatgagcagcggatcttccaaaagcagcagcggggtttcctcagctacgtccaatgcactgttgcagtcgccgggttccagtggaacaacaatgatgaccggactgaacaacagcgacgttggcaaggagttcagggtaagatctgctgcattaaaaacatacctgtgcaagggggttagtcaaggggggggggtcatgacgtcgaacgtaaggggttaacgggtgtcgaacgtaagaaatcgggggggggggtcaagaggaaaaaaggagagaaaaaagaaaaagaggaaggaaaaaagggagaaaaggcagcgtcgaaatcaaggaaagtgccgtgaattacgttcgactaaccctgaggaatgcgatttgtcgaacgtaaaaaaatggagacttgaaaataaaataatttccacattaaaattttccaattcagctacgttcgacactctttccttacgttcgacgaattctgctgaagaaaattcgtcgaacatgagaggctgaaaaattcctaaaattttgctttcttttttttaagctttcattaaaatttcaatattttttctaaaaaaagtggcttataatcgcaaaaaacctaataaattttttggtaaaa

SEQ ID NO: 16299 - DNA, 924 bp, Heterodera glycines
aagcgatgggatttaccattcataaaacaaaacctgcagttcattgtctgccgagccatcttctcaacgaaaaaggcattcttccaccggttcgccgatttctgtccaatcgcttgacgagggaatagaaacaaaaacagagagggataaaggcgggaatcaaaagccgcgacagatcaaacaaacacggaaaagcaacgaagtggcacgactattgaacgatctaacggccggaaattgtacggatgagttgaaaaaagaggggacaaacgaaagtaaaaatgggaaaaagagggcccgattggaggaactgaacaatcaaaaagaggggaacgaaacaaaggaaaaagaattcgatcatgaaagtggacctgggcaaaaacattttggaagagacaaatgtgatcaaaaagaacgacacggaacagaaatcgacaatgattattttttggaagaaaaaatggctggcaaatatttaaaaatgaaaagccagaaaacaaatgagcaaactttgtttttggggaagtgggttggacaaaatggtgagtgtgacaaatatttgttgtgtatttagccggcttttaataaatagtagtaatattgcaggttcttggcaatatatggcagagaggagtcaaaaattggcttcccaaggcagcaaacccaatgttcgtggcgatggtactgattcaacaccaacgaaaaaggacggacggacgggcgttgaaaaaggacagaaaaacttgcagtcgcaatttgccaaaatcgaacggaaaaggccgttgaggttagaggaacggaagaaggcggagatggatcgaaagagagcgcacaaaatgatgcgacagattagcgacgagagcagcgacgaagagctcaaaggagggggggcaggaagcacaaatgggagacgggagtgcatgg

SEQ ID NO: 16300 - DNA, 1756 bp, Heterodera glycines
  unsure (1)..(1756): unsure at all n locations
cgccatcccgcacaaatggtcattgagcaagtcaaattttgaagctgcggatttctcccgtcgacgggacccaaagcaccgcccgcgtcacgcatgtcgcgcatttggccaatgtcgtgggaggcgagtgtaactctgaagggaagaaaaagataatttataaattgaatttcactcactctctgactccattcttatcgtcaaacacaaaacagagggaatcgccgacattacaagcgcaaagaacgaaggaagaagaagcacggacgggggctaccaaagccacacaaagtgtggtcaacgcaccgccctcctggagaatgagtgcatgggcagcatggaaagaaccgagcagacaatggaacacatccttaaacagaggaaggacacagaattgctaaacttggccgaatgaactcacattcgttgttttgaaactgtcccgctcaatagctaagttcaattgctcaatagcgcctcaaaaaaatccaaaattattggatggtctgacagatattgccaaccgcggatggcacatcgggcagccaaccgcgcaccttcgccccaattgacaccatcagccagtgcgagaatggctaaataatatgccaaacagttgagttttaaaagattaaaacgaatgcacaattgttttcacgggcaattatgccgaacacatcggcgatgggatggccagcggacagtccggtgaccggatgcttctcatagagagaggtggacagaccataagcctgtcaaaattggcatttggtggcctactttgagttgcttgctcattttgacagatttatctttttttccaccttcgcttcgtcccaattgttccaatcgtatcgacccaaaaaggaacgtggggtggtcgtcttttcaggattcttttttgaatcgatgctgtcaagtatgtctaatgaatcattcggtgttcgtgacagcgaattctttgctcgccgcttcccttttcgagagcgaccactcggaggaagtactgcttcagtggtttcatcctcatccttaattttgctgaatttacaatgttttaagtgcagattgaagaaaagcctttgttttattttgatatttctcactagtgatgacagactgaactcctcgtcatccaacttagccattgtggcgatggctctttgtcgtatgggttgaacctgcacctcaaatgagttccgcgctttttcgaagtcttcgcttacttttgtgagtcctccgtcgggccctgtgtgacaagctttcacttccgtttcaaatttatccaaatgtatcgtcggcaaatccaaccccgttttgccctgaatgagtcaattctttgtccattatgctttctgtcagtttgcagtgctattcccaccgaataaacttctggttcattttcaactctccgcccattctttccattcaaaatctgctcgtaaaccgtagcggactcagaagaaggacccacgccatttttgtgcccgttgagcttcatcataagcatcagttcctcctccacttcgtcacactggaattgttgttgctgctgctcatcggtgccaccaaacgaactgacctaaaaatgaaaggtaaaaaggcataattataggcaaaacggtatttatataaatggcggngtacttatacagtttgacccacataaaattttttgcttttaatgataaaaaagggtttccaggggttttcggggcccgctgatcatgaatatgaactctatttgacgaatttc

SEQ ID NO: 16301 - DNA, 1953 bp, Heterodera glycines
  unsure (1)..(1953): unsure at all n locations
ttttttataaatattcaaagtgttcgtgcctcttttgtacttatttgttntatggaaaaatgtttagtagctttctgatgttttaaatttttctttgggccattgaataaagaagccttttttcctagtgttctgatattttttattggacaatatgtacaaaaattttaattctaacttttcgtgatgtttgttaatttttaatcaaatcatattttttgtccatattatgtataaaggtttaagcttttcttatttatttattttaaataaaatatttctatattctcgcttccaatgttttttatcctctatatagcaaataattaaaaaatttcaattttttaagaaaacctttgaacttataattgagtataaacagccctcataatttaatattatgaagttttcggattcatattaatttaagcatcttgttttatgtcttgaattcttgcataatttaaaaaatattatttttttgtgatttttacatttttgcttatccatgatttgtcatatatatccaaatattttgaaaattcaattaaaaacatggaaaatttctaatcaaaagttattttcgatgtttgaaaattctgccgattattttcgctatccttctcttgcggacaactcctgcggtgttccgttctcggtgttgaacacaagaaaccgcttctcgtcgcgaattttgcgacagattagaaataatgacgtttgctttttcgtattataaaattagatttttattgaaatttcattatttttaaatcattattgtatatatatatatatatatttttatttccgtttattattcttatattacatttatttttatttggttttgaattcttaatttttaattaagtacaattctgaatgttgtaattaatacactttaatgcgccccacctctttgtcattagaaataattcttttaattatcatagttaggttttaattttaattaatttttcagataaatatttcgttatttattttttgaaaattttatgaagttgattatttagaaacataatttatttttgatttattttcaatattatttatgtatttagttgacaatcagggtttaataaaattaaattcaatgttagttttatactgacgcagtcaaatcagtattgagttacagaactttttaaattcaaaaatttgtacaaaaaaaaaaaattttaaagacgatttttgagaaactttttcatttcttaggaggtttattttcagaaatttttgggtcgattcttaggggtgtatttttaaaattcccaaaaaatctattcttaggcgtgtatttttcatttttattgcatttttgttaacaaattttcggcaacacgccaaaatacgcaaaaataggctctttcaaaatttttttaggctttttaggctctaaaaataaaagcctagaaaataggcactaataagtcgaaaagtagcttaacaacagcccaaaaaaaacatgcttttcgtgcgtttcaggccacggggagctcaggaaaaaataggctaaaacctaaaaattgcatccctaataattaaaagttcttttcccctacaggaccaataaataattggccaatttcattgtttaactgacaatcgggcggggggggggggggcactcgcgcattgtgtagtggtggtggtgggtggtggtgaatggatgttttaattttcaaccaacgacagacgacacagtttagaggttaaacaaatttttgaaatttctgggcctccaaaactttgttagggtatacggtccttaattgttagttcaatgatttaatgttgtcacaaatacctaatctttttagacacagtaaactgaaacaaatcccattgcttttttcttttctttggttcatttattcttcattgttcctgacttttgggtactcatcaaaaattagtgaatttgaaaaa

SEQ ID NO: 16302 - DNA, 2267 bp, Heterodera glycines
tgttttcggcttttgttttgccaatcatttcgcgcctcattaaattcggagaattttttgatggcgccgcgggcaaatgggtcgacaaataattcaaattccgtgcgatgcgccgaacaaattgcgcaccgacggggcgaagaaaaatgaaacaaaacgaattaaatattttgacaaggaaaagatcagtaggagaagattgaacaattaattaattaattagtgagctaattggcttaaaagagaaaaaaccgcccgtggcaaaggccgactgatcggatgagcagaaaaagtgatcaaaaggagcgcaaaagcaaacgtcacaaagtcacagacgcattcaaatccaattagaacaaaacacaaaccgaattaagtgcgaaaaacgctgttgcgacaaattgggcaaaagtcgaagggatggggtcaaattaggcggcgactaattggcagtggggttgcaaatggaattgggggggggggaataaggaactaaaattggaaaaaagtgagtgtgtgtgtgtgtgagggagagagaggagagagaaattaaaaaatcccatgggtttttatggagacctctgatcagtgatcagaagaagagatgctccatccaattgatcactcagtgttcagtggtaatgagtgatcactaaatgaatcgtctttgatttgtcaccttttcttcgtcgtctgtgctgctgcgtcgtgccgtgccgttctcccccacccttgtgattgtggtggtggtgatgtcggccggccgccgaccgcaaatgccgtgccctcgtcgacggactccgttcggaaatctgctgccacgcttcctcagctggggctgttgttgtcattgtcattgtgggggaagtgacggtgccaaagtcgtcgaccatcgccaaagaaagaggaatttccctgaaaaaggcggaaattggcaaatgttacggttaacagacaaataaaaatcagaataaaatgtgaaaaagcaatcagcgagatgcccacttcaaatcggcccttatccgcaaaatgccgtttcttttcgctccgtccggaggcactgaatgcgccgcggtggtggtgaacaaaggctaaacacttggctaattagtttcgcggctcaaatgattaattcggcacattttgctgctccgtctcttcctcctcctcctccctttccttctcctcccaacttttctcttcttcatcctcatttggcgtctcttcgctgggctgaagtgcctcgtttagcatcagcgaattggcagtcagcgagctcaacgactcgagggatctgaatgtttttgcatggatgaccattgattggcagtgccaaaacgatgtttgcccctaattgtgctgtctatggcccggcttttccttttttgtttggcttctcccccctcccccgcgccgacgctacctttgcaaatgttgcaatgctttgatgcgcaacgattgcacaaattcgcggttcgcttcgtcctctgtgccaatgctttccgtcgtcgtcgtcgtccgtgccattctccgctgccgttggccgcccgccactgatgcgaaagtgtcaatcagcaaaaggacagcaaaaatggctgttctccgtcgattgagtgctgctgccaattggtggtgccgtcgcccaaacctccgttggcacttttcacccgttttttgccgtcccattgccctttttctgttcaatggcaaattccagcggaagaaaacaacgacgattttgttgtcgtttttgtgacggaggaggaggccattctcagccctttctttggttgtcttttgtcactttttcttttccttttttgtaagtgatcagagaagtccgtcaccgttcaattccttttcaaaaaatgaaaaatgttcgccaaaaaagggaaaaaggcaaatggaaatgattaaaaagcattcgtaaagccaaatttggtaggaaaatcataggaaaaaatggaaaatggaatgaatcaaatggaaataaatttggggggggggaaagcggagggaaagaaagtgacggaggagaaacaccgaagaaacgaagggaaaagagcacagaaaaggcaacgacgcatcattctgtggccataaatcagaaagcaattgttttcattgtggttaaatgacagacaattaataaataaataattaattaattgccctttggcgccttgtaattgttttgcaatatttgcttccgattcagcacaaattggcaaattgtggggagacaaagcggagggggcgacgggggg

SEQ ID NO: 16303 - DNA, 854 bp, Heterodera glycines
atcgccgagcgggccaacagctcgttgccctgctgcacacaccaaaaccaactgccggtacacctcgggcaacataagagtgcccaacgaggcgtagtattgggagaacacgtccacaatggcgtacagggcgtggttgcacgtggtgaccatccattcgtttttctgaattttggaacaaaaaattgtcgcaaaatattttaggaaattgtcttcaatggcacctttccccctgctgaactgaatgtgctctttttctgctttccgctttccccttccttttcccgttcatttttgttatcacttccaattttttgttttaggtattctgtattagaattattttcgtcataatttcttccaaatttgcttttctgtaaaatttgtacattcacaaagaatggttttttcccttttcactcacttcgttgcccaattcgctgattttcccaaaatcgaaaatgcggaaaatcactcggaataagtcactccatgcgtccgcaccaaatgtgccaccgtacgttttgataagttcgaacaaaacctgcgatgatatccaagtgaaaggtgataaaggctttaaaccacaaaagttgcaaaccaaccgttaaacttcgtgtccgtacgtccaatttgcatcgatttatgatgcaggacaactcgaaaatgattggaaaccacccaatcagccagacgggttgtccctctgcaaaaattgtatcattcggaaaaagaaacacttcccctcatcaacctttgtgtctttccttcgcttttgttgtgttcagctgttgctgctcactcggcgctattccattggttgtcactgttgaagcaaaacgagcgttgattgt

SEQ ID NO: 16304 - DNA, 3013 bp, Heterodera glycines
  unsure (1)..(3013): unsure at all n locations
cgattgattatccaaccccggataaatcgatcaacaaaaccatatgcaccgtattctgcttgttcatcaaactcatcaataacttggaactcaagaacatttcgacaaccaatccaggtaagcaaaaaatagcggaccaattctagaattttgtgtctcaaaaaaaatattattcaaaaattacattcgacttcctgatcatgtgggaattggtggaccaacaaacaaaagtaattgtaaagaggttcgcccacaggaacaaatgcaagcgaaaaaaagcatttaatgtttgtgtgttgttcggcgttttccaaaaattgggtatgaagacccggcagacgttgcaattttcggtaaattgactgacaaaaatgaaaaagacagccaattctgatggcatttggaaacaccttaagttcaggatttcttgtaaaatttgttatttttacattagttatcgcgttcagcgcactggactcaaaatcagacataaatgtttgtgggtgccaaccaggaaccgtctgtgacaccgcttgaaacatctaattttcgattatattataaatttcaaattatttaactgacattagcatatgtgttttcggattttgagttgagtattccataaatacaaggaacagcaactttgtcaattagaaccgaaattgtgtaaatttgggtaaaatgtgctggggcacacttaaaaatttttaataattttattttatttgaattatgtataatcaccttgaaagtaccgtcgacagcgacatgattgccgtattgttcgagaagatttctcgaaaatggtgaagcaaaaacaaacatccgctgttggtcaacaatacggtcgagaagaagctgattttgcagtctttctgggatcacaatttgagaaatgtcagccagatcaagaagatcatctccgcgttccactttttctcgggcgatgtaatttcggtaggttctcgacattgctgaagcagaagtcccctgttgcattcgaacttcaattggaatgtttccgcgtgcatctgcaatagcttggcgtacagggaccgggttcggagccgaggcatgtgcttggagattcatttgcgcatcccttatctacatatctgcgaattagctaacaaaactaaggcgtgccgaatcgtgaatccgtgcatggcgatgagctgcattaacgattcggcccattttgaaacggccaattccatcttggtgccaagctgcgttggaatgaacccggccaccacagtattcgcgcccatcagcaccgcggtaaagacaacggtagaattcgatgtcttacaaaacgaaataagtcgaaaaagataactaaaaattactagggtcggcacgactgaatttgtcgaatccatattcaaagccatcatgaacgagaattgtttttttttgcgtcgattttttttctcgcagaatgatctggtcagcttcgggatttgccaggggaggattaggtccaggtgaattctcatgaatttcgccctcttcggaagacattgacaaaatcagggggtagagtggaaccgagtgattcgagaacagaggacggaatggcaggcaaaatgaagaacatcccccttcccatagcaaaaaactgataagcacttatttacattctcgttttcccaggggtcacagagattatttttataattttttcgagataatgagaaaaggggcacacaaataaaatatgcatatatatcatatgcctgccttagatagatttatggcaataaaaaaatttaatttaaataacttcagtaatgtaacttttattataggtacgaattctattattaactcaaataatcggaaattattttnaaaaattaaagtcggtgtcggattttccagcggtgtcggattttccgcttgtgtcggattttccagtgtcggattttccggtgtcggatttttcagtgtcgggatttttccgggctccccttatacagcatttgaattttgaaaattatagtgttaccacacctttgttgatcaaaattttttaaatgttaataatttgaaaaaacatctcacaggggattttggggtcgctgatcacgaatataatattcatttcggcctatataaaatccctgactaacaaaaaaattgaaattcaaaatttgccaaaatgtattaaatatactttttcggattagtaaaaaaaaaattactactggtctaaaccgaaaagaaataaatttaaaaccaattaaattccgatttcatgtcactaaattacccgcgctgggtcatcaaattggccagcagcgaatgaaagttcaccgggggccaagttcacatctgttgacatttcgacacaaattgcgacaggatatcctttaattcccaatttttcattattttacttcgttaaaatcaccgagtccgcgcgaaacacccatgaaaatcgccacgccgggcttgtacggtatgaccgtggcgccttcgaccaacgccggcggcgtggcgatttcagggtgtttgcgcttcgtatgcgcccggaaactcttttcgtttccgcaccccacagggcaaatgctaaacaatttcttattaattccattttcgttcacatacacttattaattacattaaatcaataaaagcgagccgagcatggtaccgtgcctggccaaacggtccggcgatatttggtaaaaactggttttgaggttgggctcagaatccgcccgggtaatactgtaatttattcccccctttaaaaaatttcgaaattttttttgccctaaaaaactttgcagggctttttgggttcgctgatcacgaatctggcgtccatttcgaatcactgacccaaattcgaacaaaaagtcgaaaattcaaatttgttttttttttgtttcaaaaatagtttaaatgagctctcattgcttttttaaaaaaanaggtgtggtactatcggcagtattacacagaattgatcttttattgcaaaattggtaatttttagaat

SEQ ID NO: 16305 - DNA, 415 bp, Heterodera glycines
cagcaacagccacagcacaaacagctctactgaccaacgaattgtggcggacatggccgagaataggcggagggatggcaccgccgccggtgctgacgaagaaatgcgacggcggagagtgaccaattcgaaagacaggacggaattgaactgctggttgttgtggtgatgcattcgatgcaaagaatggcacaaaaaataatgggggaggggagaatttcagcgcaaaagcaatggacggtggtctccgtctggcgacattcgccggggcccggtcaataagaaggtggttaaatgacgtggtcaaacgaccatggttaaatgacgggtacttttccgcatttaactacatgcaattttggggcagattcacataaaaattttgtttttttcttctatttatgtgataatgagg

SEQ ID NO: 16306 - DNA, 3108 bp, Heterodera glycines
aacaaaattgaattctttgtaaccatttaaaggcttttcatttttaccatcaaaattttcattttttttgcaaatattttcttttaatttgatgacaaaaaccctaaatttccctttacttttaaaattgaatttatttttattttcgataaatttttctctagtattatttttgacaccgtaaattaaaatactgctaatttatttttgttggcggttatcattcaaatgaatttattgttgctttttgtagggattctctttcacttaaaattatccaatattgaacccaatttatttgttgataatatctccctccacgctcttttgttgtattctttggcccctccctttccgttccccgagtcgcataattgatgcaaattttcaatcccccttctgcgcttcagcggaatgaatgctcaaaatgattaaattacgaaggtccgttcaccttttaatggattcgtcaatgttccccgacacccccccccctccttcacacttcttttgctgccgttctttgaccccccttcccttttacttcatccgaggcatctaattgatttgcaaatcccccccccactcgctgcatttctgtgcaacgattgcgtaaattgattaaagatgtaaaaattgaatattttcatgttttctttgtacccatttaaagggttttcatctttaccataaaatttcgttttgcaaatattacctatgacaaaaaaaattgtcaccaaaattccctttacttttaaaattgaatttatttattctgtcaaattatttccgtaaattaaatacggctaatttatttctagggggtttctcattcaaataaattaattgttgctttttgttggggattctctttcacttaaatttgtccaaattgcatatcccactttttagtgcatttttgacaatatacagctacgcatttggttgttgataatatctccctccccgctcttttgcagactttctttggtccctccctttccgttcccccgagtcgcataatcgattccaattttcaattcattccttctgcgcttcagcggaatgaatgctcaaatgattaaattacgaaggcttatttaaagattaaatatgctaaaatttaagtgccttgtcaactttgatttttaatttaattatttctacaacaaaatctatcaatgataaccttcatctccctgcagattagctttactatttgaccccccccccgccctcctcaaatttccatctaatttttaatcattaattaatttttctcatccaaatcctggctgtgcttctgcgtaaagttatgcaaattttttaaacatcgattaatttttaatcgttaattaatttttctcgtccaaatatttctttcgttttttttcttatgacgttttaattaaaatttaacctattcattttttttgatttgtatcatttcaaaatataaaagtttttaatgtgtttattcccaaaattttttgtttattttgctgtaaactgaaacatttcctaacaatatttttgttttgataaagaatttaatattttaaaatatgcttaacaaatatatttagaattttttcttcagacattttgccatttatttttttcatggcccttttttcgaccttgaacggaaagttaactttttgtcatttacgtttttcgggagcgcactacccccaattaggtaaattatttttaaattttatttgtcttttatttctcaagataatctgagttattattaaatagctcagacctttagagcgtcgtgtttgtacgaaggattaactgagttataaatttagctcagcccctaactacaaatacatctatatcatatcttcaataaagcttttttttacctacacatctacaatccttatctttcgcttcttttcctttaaataatttaatcttttatttccacaacttatttaataatatgcaggttaaaacattatctgaaaaatttatttggaatttatttttccattaagaaaaaccaaaaaaaatttcctccccacagtagcccatcatccccgttcttttgtgaaattacccaaccctttttttttgtgttaaggttttcttgacaataataataattgtttgattcaaaataacttttttgttgatatttttcagtgcaccctacatttttcccaatcatttctaaatatttaaacaggtgcttattttaaatttcgtttctgaaaaaattatttaaattcgcattttgtaattttgtggatgttggaaattagaaactctctgcctcccaggcactttttttaaaatactatcccaaataataataacaaaaaatcttaagtcttaaccttcgggggttctagttcgctgatcacgaatgttacgtcctttttcctgaaattatagtcccgaattttaagttcactgtggagtttagttgagcccaaatttatgaataattggtgcggaaggacaaggttaaaataaaatctgctcaactaaactcaattaaaaaatgaaaaattctcaccaaaaaagataatgtttgaataaattatcattttcgcaattttttaaaaatgtatatctttatttgcgttaatcaagcgattttttttgacatcgccgttaagtcggttcttaggcggtccttcctttacacaaccgatcaggcagtccccacttttcaccttcgatatgcggtccgcaccgtcacgccgccgaccaggcggtccctctccttttcaccgccgatcaggtggtccctcccccatttcaccgccgataggcggtccccaccttcacaccgccgatcaggcggttacgcttttcaccgctgataggcggtaccaaccttcacacgccgatcaggcggccctcccccatttcaccgccgatagtcggtccccaccttcacaccgccgatcaggcggttatgcttttcaccgctgataggcggtaccaaccttcacacgccgatcaggcggccctcccccatttcaccgccgatagtcggtccccaccttcacaccgccgatcaggcggttatgcttttcaccgctgataggcggtaccaaccttcacaccgccgatcaggcg

SEQ ID NO: 16307 - DNA, 2787 bp, Heterodera glycines
  unsure (1)..(2787): unsure at all n locations
ggctccgccgctccggcctcatgccgccgcctcatccgttaccgtcgacaccccaacacccccaccgctacggtggccttcacaccatatttgaggacaccgttgagcagaaggcagggcatgagaaagacgtacggcaacaaaaagaacaacgcagtcacacttcatcagctgctactgtcaatacagaggccatggtgcgtgaggctcaccgggtgacctcccaacttgctgccgcaattccggagcctatgcgtagcgctgtgacctcctccgtggccattcccatccttgtgtcggcggcacaaagtggcggtggtcgaaaagaagcaacgcaacacaacagtgaggaagaagaagaaaaggaacgcaattgatatagtgatggaagggcaaactcaaatgtgtttactagtggttcagtgaaataaatttggttcgccgacggatcatttcctgtaccgtgtgactaatgtgcgtaaaaattgcggagcaaaaaatggtgatggcaacacggttgctcaatttattgcacacccccaagtcgtgccttatgctaaattgggaacaatgtttccaacaccatttcacaactccattcttctcaaaaaaaacatttttatttttttcatccaaatgtttcgcctagtaaaaaacgttgaccaaatatacacagcaaaaaaaagtggaacaggcccgcaaagtgtcaaagaagacaaacggggcagagaggggcggggggtggcaaacgcttgtgttggtgcggatcggggggtgggcgtaaataggcccagtgaacaccgctgaccaaccaacccccaccctcaaggtccagctaaaaaaagtcaaatacggcccgcaaagtgccaaggaagacaaatgggcagaggtggcggagggggtggggggacacatacgcttatgttgatgcacgcctggcggaggggggcgggggtctggtgggcgcaaataggccccagtgaacaccgctggccaaccaaccccaaggtccagctaaaaaaagtcgaatagggcccgcaaagagtgcgccctatatctactgccaatgcgtcggatggccaaactgtggccaaatggctattcacgcctcgacctgacaattttcctaagcagctcatatgctttatggattcaacgatggaacagtggtcggcaaccgtggaatatcaaagcggtgatttatttgtcaaatttaattcgtttttttaatttttgcctttttaggcattttcctctgcttcttcgcctgttaatttcgttatttgcgtttgctttccgtccgattcgttttctgccgttgtgccgtttaaactgaccaacggatttactggagagaaattgacattggaattgtcacaaggagcaaatttttttaatcttatccgttgttcaattgcagcagtcgatggagaatggtttttatttgatggacataataacagcagaattgagcttgtcatcagagacgacgtcgacagattcgacgatgggtgaacaattttaaaaacactcaatgctaaatttcttatttttgttttgtttttgaggcttctcgacactgtttcttctgccggaccgagtggtgatcagaaacagtaaaaaatgaactgattgattgatgatgcgtttatgtcatctaattgtaggactttgccatttacgtgtaattattgtgtatttgctttttgtataaggaaaaagatggaattctcccaaattttctaaaaatgatttattaatagatctcgacaaaaattcattataacggcggaacgaagttcttaacccataagttaaattggattttattgatagctgatcacgaatctgaaattcgttttagtcaattttgaatcccggagccgaattcgaaccaaaagttgaaaattcaaaaaacgcccactctcgctaattggcgggcgttccgcgccttcagaaaggaattccttgtttatattttccatagatgctatgacgaagtgacataagtaataatgaattgaaatatttaaatttatttacctaattttaaaaaaatctagcaaaaatttacaaagttgttctgctcacaaattcataaaatgttaagctttactaatcctttgtaaattaaaaaacgcattagtttgaattgccaaaaaagcgcccaaaatcttagtctataggatcaaaaaagctgaattttgagaaaggaatacctaggctttagggttagctaaaaagttatacaaaaaacaaaatttcgaaacctcacagatttttttaaatcattaaattgttagaatttgcttagaaaagggatttctcatcatgagctttcgaatgataccaagattgttcggtttcgtggggaatgaagcgagttatggctgatcaaataaacaacacaaaaaaggcattgatcaatgtattttttgaattaacgcgaatttgtttttggcgtttttaagaaatttagcattgagtgtttttaaaattgttcacccatcgtcgaatctgtcgacgtcgtctctgatgacaagctcaattctgctgttattatgtccatcaaataaaaaccattctccatcgacggctgcaattgaacaacggataagattaaaaaaatttgctccttgtgacaattccaaggtcaatttctctccagtaaatccgttggtcagtttaaacggcacaacggcagaaaacgaatcggacggaaagcaaacgcaaataaacgaattaacaggcgaagaagcagaaggaaatggcctannaaggcaaaaa

SEQ ID NO: 16308 - DNA, 2710 bp, Heterodera glycines
  unsure (1)..(2710): unsure at all n locations
attcccgagcctaagcacattttcgagaagggtactcgattttccacattttttcggtcaatttattttaattttaggttatagacccaattactctgatcacgtttacacagtagacgaggcccgctcaaccaacccccagcactatttgctcaaagactattatggcacaaagttgaagagaaaattttatttgccagaattaacaaaagtacaagtggatgaaaacacaatgtatcgaattgaaaagaaatacaaagaacgagtgagagatggtaaaagagaaatgttggtgaaattcattggattccggaaaaatattgggtcacaaatgaagaaataaatgaataaaaatattacaaatttaatgaaaattaaaaaataaaaacaattatggcataatgtcggggtcattcagctcctcttctgtgaacatgttcacattgaggtctgggttgaacagacaggtacaagcgccagggcagttccacttacaccactcttcgtcgctgtacccaaagggcaccaccttcaacccgtgatccctgaccacccccttattcacggtcgggttgaactgcttgaccaaggggacggtgaaaatctctcccttcttggtgatccgaaagttcttcgttgggtagttgaagcggacgttgttgtccggctgtcccagcttgttctgcaccatgtccttcatcttctcgaaagttatgcgctcgcaggcatccgagtcgagcgtgatgccgcgcaccttgagcttgtactcgtcctcccccgttgcgttgttgcgcagccacaatccgtacgccttgggtccggctaaacaaaaagtttccatttattttggtcaaattttaactaatcttaccacaaataaactccatgatcgtatgattcgggtactcgtccgcgagttccccgagctgctcaccacccggaagtgggtcccccagccgcgtcaggtagtcgtaaaagatgctgtccgtgtcctgattttaaaaaattacttcacattttcattttattttctgaattttaccatgtagagaatgcgggtgtcgaagcgctctacacctggtgcagggccatacacctttttcagcgattccagcaagtggattcgcgcagcagaggtggtccatagggcaatggccacctgagaaaatttcaattgtcttttttaaatattttaaaacttttcttacattgcttgtgctgtgctccaccacatgctcatctttggccttgtagcagaccatccagaacttttccgtcagctgatcaatgctgctgacctcaatcttcgagtcgttgagcagtttggccagctcggcatggcactcgacgatttcggttttggtaagccggtttctgtatgatttgtatttttttcataattcttaaccaaaattttaccgaagtgcgaaccggccccacagcgaattcaaacacagcttggacaggtagcggagtccggggttgtgtttgattcggtccgcctcaagagggacttgggccttttctttggccttgtcgatgtgttcctgctttctccgtgccgactcctcctcgctgatgcccgcctccgtacaagacgctggatatccgcttgcttaaaattttgtttgtttaattttttttattaagtttttcaaattttaccctcaaatttcattttgaggaacttcagcaggtacgagtggaacaacccattgctccaatcgcacgccagaggccagatataggcacggtacacatgcgtcaccttgtaccacgagcggagagcggcttccagctcaatgtgtgtgactgttgtcgaaaagcctattaagaaaaaatatttgcttaattacaagcttcaaactcacccctttcagagtcctcaaaatgatcgcaattgtactcggggtcgatcaagccgcgcgggtacatttcggaacacgtccggcagaggggaaacagcgtgcggttgttgatccggtacggaaggaccgggatatcgtagtggcagtggcggggcggcactacgaagcacttgatgatgccctcaaggcggatgccgtcgtcgccgacaatgtcctctggacgcctccattccacgtccttgtcaaactgcaccacggtcgggtggccaaccggataattggtgaacatattccttaaagtgccaaagatttttcaactattcattttttttccgacatttcttaccgcgacggataaagactgttaaagtccttcactttgatcgtacggctcttccagtcgcccgtctcagggttgatcaccgaagcgcccaaatattcgggcccagttcgacctgtgccggaaaattagttaaaaattaaatggaaaaaggtaccgccaaagaatgcatcatggaagtcaattgggccagaatccgggcagttgtcgaaatacgccttcatggctgggttgtcctccagcattgcgttcaagtggcactcccaaatcacttccacttcgaattcccgcgcaatgtcccgggttcgttttgcgtcccgggccctgagggctccggccgtttctcctccgccccacaattgcgcatcgtcnggaaagcagcttgggcatcccatgccatagcaccttttgaatggngtaaatggcacatttttcgaattatttcctttaccattggactcgatggccaagtttttgtcctcatcaaggcgctccatcatcc

SEQ ID NO: 16309 - DNA, 838 bp, Heterodera glycines
tcacccctacaaaagcgcagcacttcaacattgcttctttcttcctcccccctcccctccctccttctcagccagtaactgatgaagcattcgtccgctctgttctgcggttgtgcgctgctgtcaatggttctccaattgatttatttcgtgccctccggggacggctaacatttcttagcctcgcttagcttttccctctcctcgggccaaactcagtcggtccgttgtgtgggccagtcaatgcgttgtttggtcggtcggttggtccggcaccattcccacgcattttcttcagcatttaacactgtctacgctcctacgaccggcttctttgctctctgcgagaggaagacaccgcgaaaagcgatgtcagacacagcaggcgcaaatggcacttttgggggggcaaaagcattgacagaggcacggacggcgccaccgcggcggcagcggttgctgcttgtcgacgatgtccgataagcagtgcagtggccaacaaatagcgacgataagagagcatggccaaattcgcccccttcctcgcccaatccaatccaaaatccaatccatgtgtcacgaagtgtcagattaaagagatttcattttaccaattttaattgcaaaatgaaatttaaataaaatgaagctaattatttaatagaaaaagaaagattcatgcctttaattcgacattaaattcctttcaaaagcttacattttctgtcgcccctccccattccatttatatagcaatatttgtgatgttaatttaaataattaatgtcatattaaatgttgacgagggacttttggattcttctctttctccatttat

SEQ ID NO: 16310 - DNA, 1089 bp, Heterodera glycines
  unsure (1)..(1089): unsure at all n locations
ttttccaatgttttttttttaaaattttataattataattaattttttcattaattacacattctttaagtgtttgatgtatatgaaaacaaaaagtacctttatttactgctggaacatgtgtcgggaggtgaaactcacatcaaacccaattcattaaagcaattttaggcgaattgttcgattatttggtcaaaaaaggccgtctaatggcgaaggaagcgcgcaaatttttccgacaaatcatttcagccataggtaattattaacaaattaccctttaaaaagcgtttaacttcattagacttttgccatgcccacaacatttgccatcgtgacttaaagccggagaatctgttgcttgacgaacggaataacataaaggtgaccgaagccgaaaattaacatttttaatgccttttaggttgccgattttgggatggcctcactccaagttgatggctcaatgttagagacgagttgtggtcagtgtattttattaaacatattttttattgtgccaataattcaaaagcatttccctaaaaaaggatcgcctcactacgcatgtccagaagtgattagggtaatttattattaatatttaacagtgattaatgtttgaatgtaattaactccttaatttcagggagagaaatacgatggacgtaaagccgacgtttggagttgcggggtaattttgcaacaatttgtgccaacaaattgtgcttaattaaggtaattttgtacgctcttctcgttggtgccttgccctttgacgtaagcgaaaaataaaaattatcatcattattattaaatgttttatccagtattatttaaaagaaatgaatttatttttattttaatatttattaacttttaggacgataatttgcgaaatttgctggagaaagtcaaaaagggccttttccatatccctcattttgtgcccgccgattgccaaactcttttgcgctcgatgatcgaagtcgatccggcaaaaagaatctcgttgcaggaagtgttgaagcacccgtggtcagtataaggaattntgaatttcgtaaattcataaaaaattctaactat

SEQ ID NO: 16311 - DNA, 1005 bp, Heterodera glycines
  unsure (1)..(1005): unsure at all n locations
gaaatgccggtagcacaagtggtgnaagtaattatgcctttttgaaaataaattataattcaatgttaaaattataattgttcattcaaagttttttgattttcagacccacataattccaaacgaagaaaacatcgacccggacgtgttcagacatatgacaaacttaggctgctttaaagacaaggaaaaactcgtgacggaacttctttcaccaaaacataacacagaaaaaattgtaagtgaatattttcataataaattttaaaatatcctattattttaggtgtattttcttcttctcgaccggaaacggcgtcgtcccgcaaagtcaacgcttaacatttatttaaaaatgaaaataattttaatttagggaagacgaacttgaagttgtgcatcgtgggtcggcactgaacatcattgacccgccgcgaaagcgaatcgatcagacaaagccacgatttccgttgtccgcccgaagagcggacggatcgccaatgaatgcgaggagaaacaggtgggcaaaaattaaattgatttaaaaaagagcttaatattaatgacaccaattgttaagaagaaagaatattaggtgttgtacttttgtctgatcagttttcctttgaccgatcaaaatgatcagtgacaaattaaaagaatggttaatgagttcatctgtacgtttaagcggtttctgttagtccgattttaggtccccatttttcgatttttgtacctaaagctatttaatcgaactttggcaccctattttaaggtacaataggagcaggcagtcctcgttgagtggttcgccagaatgttcaccccatccttcgccgcgtccgttcctttcggtgaagggtggcagcagcagcacaagtttgacatttttaatgatcttaattaccaacaaattgtttcagcaagctataataacagcatcgaattgtgcggcggcacttcttttacctcgaacaatcacacaaatgtcacgtcaattag

SEQ ID NO: 16312 - DNA, 1505 bp, Heterodera glycines
tcctttgccaccagaattgcctcataaacagaaatccctctagaccaaatatccgctttcacagacaacttaattttcctattaataaaatagcttttaaaatatgggcttattgtaaaaaaaaaatttaaaataataatattaatttactttaacagaaaaatttgccattttttctatttgtttttatttaattttttactattgagcaagaattttttaaattttttccaaacattaaaaacatcattttagacttttcgtttgtggtttcttgtgcccacagcctaattattaatattaattatgaattcttttatttgttcccatttaattaacttgtttattgccaacaaatatttcaggactactgtatttcccgatgtccaatgtactgtgtattacggttgttgtatcagccatgattgctggttcttcttcaatttcattgcatggttcgctgttgttgcaaatgcgaataatttgtgcccggtcaaaatcaattagtttcacaagtttttcgtttccattcggattaattggcacaaaaatgagtttatcaatactataatgaagatgagcagcaacttaaaaattttttaaatatttttttaaattcctaaaatgccaagtgcaaaaaataggcattataaaattgatcctagaagactcaaaccaagctagaaactcattttttgtgcttatctcaacgttattatacagggtgacaaataagtcttgcaccactttaaaatttttaatatttcataaaccagaaaaccgattttaatctttttatactcattttgaagcccattaaattctctttaaagtactctgaattataaagaaaaatttctttttctcaatggagtaatagtaccatcaaaaattgtgacccatttttttcaccaaaagtttactatgcgtagacaataaaaaaattcaaacaactaaactaagtgaagcaaaataatgaattcatgtggagaatatgtcataacatagttctttaaaatgagcttgaaatcggtggttattactgtttctaagatcagaaaaaaacatcaaaacgagagtgatcagaaatcgttgatttaaatgaaaacaatagcgcactgagtcaagtcaaaatgaaatgtattaatttagacaaagcgcaaaaattaactagaattattcctttattagatagttaaagccaattttattacaatgtatatggaaaaaagttatgggtctatgaaataggggatacccctcaggcacgcaacttggaaaatattttttcgggcattaattttctaaattaaaattgtttatattaaactaaaatcatataacatacatatgcacacaaataattactcagctgaaattctttggcgtgacataaagccttggtccaagtggtagcttatgccagataatggcctttttgaagaaatcaggaataatattttggatgattggaatttatgactggttcaggggcaattttttgg

SEQ ID NO: 16313 - DNA, 1876 bp, Heterodera glycines
aaaaatttaggcatttgcttaaaaatcccatctctagtgattaatatggttgaaataaacaaacaaaaattatatatttattttacccaattatataaattaacttcatttaataaaaatattctgttctgataatggtgatataaattttctaattattatgtattaataagaaataaattgagaataatttaaatagtttaattatttttgattgtttttttcttcttaattaccttggtgtaattcttttaaaggctgtgccattcttttgatttcttttattaattcgacttcttccattggcatttcaaagtgtaatcttcgtcctaattgttcacgtaaacttattccaccaagttccattatgagcacagaatatgcattttcagtttcagcaggacgactcgtcaaagtgccgctataaaaatcgtaaatttttttaaaataattataatttaaatttaatatttcatttcctttcaaaaaatacaatgttttttataaataaggtaaaatttctcaattattaacattagttgctttattaaaaaagttcaaaatgagcaaaagatgggaaaacatttataaaaaattaattcaaactaaagaaattgattttgcccgcaggcgcttatcgaagttgccggaccctaaatttctcaatgtttttaaatttgacgcaaaaattggcaattttgaataaaaatttatttaaaaaatcagtcaaaaagtttccaagatgttcctcatgcctcccccccccccctcagaagttccctgtaactcactaatcaattagtccaataatgtgttttctctttgattcctcaattttttgaatctcttccaaaacttgaactccgttgataatctgctgttcttgtatgcgatttatagcaatttttattgccacgcatttttcgacaaaattttgagcatttcttgacactttttcttcattcatataaccaccaaaaacctgaaaattttcaaaatttttttaaatagtttaaaaatattacttggccatctgctgagggttttgaatcgattgaaaaaactgttttccaaatgttatgctcatgtccatcatttttggttgatatgaattcttcaaatggaagcatattttcagtgacaaatccattacaattggtaataaatggcgatgaaaactttaaagtttttaatagcacaaatataaaaatggaaagcataaaacccatttggctaatgcgtaaaaagtggctaaaaatatatgataattattaattagggtgcgacctgctaaaaactggtaaaacgagaataacggtttcgccagctatattttttaaatatttttaatttttatttttttaaatattaaaaaaagaaaagaataaaataacataataaaagggtagcgaaattattaattggatatttaatttatttgattaaatttcaaagaatttattatttacaattgcattgagcattcattaaaacaataatttgtaagtaatggaataagctaaaaaaatttgcgattgaaaatcaatttaaatggtggttttcttcaaccttatattcacctaataaaaatatttttgcaactaaataaacaggaaatatcaccaaaaatgacatcataagaaaaaaaaacaaatattttttcattacatataaattgtccgcgtctggtttaacataacatttacgaatattaatatgtggatcatccattttaaacaaatcatttttcaatccaatccatcccgcattaagacaaggccgtaatatgatggtggttgcccgcgagccgagtatggcggaggcggcggtggaggcggtggtggcgggggcggtagtggctgatactgtggcgggg

SEQ ID NO: 16314 - DNA, 3217 bp, Heterodera glycines
  unsure (1)..(3217): unsure at all n locations
cacatggaataatgtcctttattccggaggcggatcctcttaatacaatatgctaatataatgagtaaaaaggggaaagggaccccgatccgtacaggacggaaggggaggggatcgggggtaaatgtgatcccggttatatgaatgaattgaggtgatcgctaggaaatgggccacattacgagaaggggcggagttaaagttgatcagagtgatcagaggcactaacaaaaccagacagtcagaaaataagaaatgaaataattcagtcttttttgcaaacgaagatggtccaaggaaacagatttcgcagacaaagaattgtagaagaaacttaattttcaaaaatccagtcaggtcctctgaaaaagaacgaatttgacaaaatgctccaaaaagagctcacattaaaagtaaggaattttataaactaaaatattaaataattgatttttctcatttttctttaaaaattttgaaaataagtgatttcgattaatgttgattattgcttaaatggatgaatttttaaaaatttttttggttatcttatatttaaaaaaacgcccttattttactataattttttgcacttgaaaacaaataataaagttaattatttagtaaaaaaaattgctcgttcgtcgtccattcttcgtgaaaatgctccaaataagcaccacatctgaccacgtctagtggaaaatgccagtgataacattgccggcggagttggctttgtatatggccgattgggaccactgctgccaaaaatgccatcgcttcgacacccataactagggctgctaattttatgtaaatacatattttttcctggattctccatagcctaattagtaggaaaaacactttcttttttgtgtttgcgaacaaaaatcgggacttttatttacatatttcggagtttttctacatattacatatgtacatatttttatacatattttggactttttcgcattttttgtacatattttgcaatttttgaagattttttaaggaaaatttttagattccccaaaaaaattgcaatttttcgtacacattttcattttttttcatattttgagaattcataaaattttttgtgaaaaaaaaaaaattttgaaaatgcatccctaaaaatcgattttttttttcaaaaaatgagatatcaaaaattaatatttaatgtactaaaatgtgattctaagcctattttggtcatttttgtggcattttgtgcctgtttcactttttacgaagaatttttacccaaaaaattaccatttaaaaaattttatcgatcagtttaatcggaacccattcaggcaaaaaatgttgtcgatgatgaagagctaaattgaaaagcaaataaaacattcattgcattatattatatattcacactttttaatgaagaaaaaatacaattttttaaagccatggccaaaactttggcaaatttggttaaaataattttaaattttttaaaaacatggaaaaactgacactgaataaagtccgaattgtacaaaatggtcgcatcgtccggcatcaaataagcaatccaccaagaaaaggttgaagtctgtgccgtgatcagcagtgaatcgcatgccaacacagcaaaagcaaaatcatttgcccttggcattgattttggcaaaaaaacattggcaaaaagcgaaaaataaataaaaatttatttaatttaataagcaaatatttaaatcattctttgcctggccgttgaatgataaatccgtcaaaaattgcttttcttctcccagcaaaacaacagaaacgaaaatgttgccaaatttcttcttgaatttaattgcataattaaaacagtgaatgaatgctcattaacgaacaaacccttaaatattcaaatccaaattcaattcctttctccgtaaaatcctttttcgattcccaaccgaaattgacaaagtctcccattcgaatgtgcacgcaaaatttgtgcgaatgatcatctctgaaaagatgaaaaacagaatattaaactagtaaattcaatatatttttattttattaattttacgttttttaaaatgtattaaaagtgtaattaatgaccgtacgtaataaaatattgttcattttaaaaataattaattattatttttttataccaacccaaataattcatttttgaatgccgtaactcttttacaaatgccttttccaaactgaaaaatttgacgaatttcggtcctccgactttcaaagtatttgtacgattggagacaagattcgccctgaacaattcatttttatcatgtttaatacagtaacaaaggcttacatccatttccaaatatttctgtttgattcttgaaatcgcaaatcttaaaaaaacaaaattcggaaattacaaaatttgtcaaaaaatcggttcaaattctcgaaataccttaaagcaattattttttcggtcaaaagcgaaaacccaattattttcaaagcaagctaaaaacactatttatttgattttctaaataaatattgaaaacccaataagcncgcgctaaaattatatcgtcaaaatcctaatctccatttttgtttattacgtatgatttttttgaagtttcttttgttcctgactttttttgcgccggctcccattcttggtttgtttaaagcgcttttaaacttccgacaaaatcttggggatgccaaagcttgtaataatgagattcaaatcactgagttaagggtccattgccataacggaaatgaaggtaattaaatctaaatttacaatacatttttttaatttaggcggatttcgcattgtcttagctacccatccaattttgtttggcaaggatttctccggcattttttactttgaaatttcaatcaaaaaaaatgcatcagtaaataaacagcatttattatcctaaagacaaatttttacaaatttttaatttatttagttccccttacgctttactctccttcggattcaccgtaaaaaaggacaaaaaattgggagaaacaaacattttttatcttaatcgtggattttttatcattaatggcgtatggaagtgtcgacaagttgattcttacacagaaaacgatattgtcggatgtggcattaattcggccacccgacagattttcttcaccaaaaatagacggcgtcagggtttgttaacaaaataataataattaataa

SEQ ID NO: 16315 - DNA, 3415 bp, Heterodera glycines
cactatgggtcaactccactgtgcagagaaaagcctagtactatctcgtcgtttctctttttctttgtaatttctcttactttggcgtactatctcttcattttaattatgtaaaaaacaacatttacttcgtgacgtttaacttttttcctgcacgttaaatccacacaaaattttgcaaatcgatagagaaaaaaattctgcatcgattaatgcaaaaagtttttttgtttatgcgctagatcaaaatttgcatactcaaacaaaattaataatttcttttcctctccttttggcgtactattttcatgtctctaacacattaaaaatcatgaaattcgcaaattctaataattttggttataagggtacaaaatcactttgaacatttagaatcaatagaaaaaagaataaatttagcattttggttagaaagagctggctaggacttgagttataacatgataaaagtttgaaattccgacaacttttttctgagatgacaaattacttaacattcgcttagaaaaagattctccttttcaaaaacttttttttgataccaaatttgttcagtttagttgggaatgaagcgagttatggcagatcaaaataaaaaatacaaaaggcattttccagtgtcaattttgaaatagcgcgcaaaaatttacgccaaatgcgctatttggcgttatgagcaattttgtctgacactgggcttgacccatagtgagagaaaaatctcaaaagggtggaggaatgggtacaaccggcacggttaccgaaaaaaactccgaatgacaattttagtcgaacgggttcggatgggactcgaagttagcctaaatgttggttaatttgtttgaccggcgcttcgaaaaccgcagaactcttttcacgatctcacccaattcttccaaatggagaactgacaccgaaccagcagttcgcatggcccatcatttttcaggctaataaaaaaaatagtttaaattcgaaaattaattttaaatgtccaattaaaaaacgttaatttatgcacctccgggttatataaaagattatttgtttgtgtactctttttgcttgccgcctttgaactcacaaatattttttcctcgattattttaaaataaatttgcagaaaccacccgccgaataacaacatttctttatccatttgaccaacaaaaaaggggtaacaatgggtttttatctttgtgtgctcattcatcggcaatggccaccttctccgacacataaatgccgtccaggaatttccgaatgtccttgtttttgacggtcgtcgactgttggatgcgagcagctgaatttggggagaaaaagttattaaacaaatattttttatttatggggttgtatcggtcggtcgaaaaccattcgcttggaactctttggtagaacaaaaacgaacacagacttttaacattggaatgcaatgcctgcccaaattgtaatgcaagatttcatgatcaagagtccaatttgaaaatggcagttttcccgaaaagggattattccatggaaccgaccccggtaaataaaaccagtcaaattgggtcgacatttatcggcactcaccggcctgggacactttttggatgtcggtaccgtcaatgatcaactcgtccttctgtttggtcgacattacagcgctaacgccttgcggtagtccgacacggcgcacaaatttctcgcccaagaagtttcgaatctaaaaatgtcactttttccggttttgccaaaggtaacgaaatttttggattttcgtgatgcaggacgcggcccctgacctttctcaggatatttagtgtaccagtacttaacaatgaatgttttatccgaacccgacccttaactaaactcgggtaatttttgttggtaacacttcagtttatccctcccgcacattctgaatggtcatttcttacattgcttcgattttgtgcaattaatgtgaaaacatgaaacaaattcgaaattgctcaaaatgtgtatcaattcgtaaccagtgactctgaaaatcctatcttttggtgatcgtcatattaatatttaaacaaaaaaaatcggaacttcgcatttcaacgaatttcgaatttttcgtctaaaaaaggcttatgtgatcttttattacaggaatgatgactttcagtttgttttcatgcatttaagtcgttttcgagacattaacccaaatttaaatttaacttcgattctttgttcgaaatcaggtccggttttaggaattggtcgaaatggatgtcatatttgtgatcagcggcccaagtaacccccgtgtgacaaagaatcgtaaaaaccgccttatttattctttttttatgggaccagtaaattaacccattacccgccccccccccctgcaccaaaaaagtcgctagtaactaatccaattcaaaatcccgggactttactggattgcatataatgcaaagaagacaaaacaaaacaaacctcgacgacggtgttgttctcctgaagcgtgatgttaatcggaaaatgcgcgtagactgagcgcattttgtaccgaaatccaacagtcacacctttgatcatgttttcaatgtgtgagcacactgtgcgaatggctgccaactctttgcggatgccaaaccatttccgcacacggagcagctaaaaacccacattttagcattttgaaagttggaaaaataaaagtttaaatttgagactattttaaacgaaagcgcaatcatttcaacaacaattagaaatgaaaagagcactataaatttcagattttgtttgtttgttactcagaataccttcgggttttctcgcataatttcaatgtttaagtggcgaaagtcgcgcttgagcgtaccgcgcggtcccttcacagtcacaacacggttgttgagcgcgaatgtgacattgtctgggaatttgacgatgtcgctggattcaatcagcttcatttttcgttatgtttaaacagaaaattgatctgtaattgaaacttacaaaatctcttttttttactcctagaaaaatatatagcaaacaatactattatcataggagacttttaacattggcagcaaagatataacttgggtcaacaatcttccagtacctcataccagtctaggaataacttttcttgatttttttaataaattttcactaaacactaatattataggtccaagaagaggaaattcaattcttgatctttgtctttttacaacccttgatttagtctcttcaattgaactaaaggatagtattgttttttcagaccattcagcattgtattttaatattgatattccttgccaaagacaaaaacccctaaaaattacggtcagaaatttcacccagtctaaaattaaagcattcaatacctatt

SEQ ID NO: 16316 - DNA, 2285 bp, Heterodera glycines
  unsure (1)..(2285): unsure at all n locations
caatgcttttcgtcccgaatggcttaatcaaagccagaaaaatgctttagtttgcccctctctccgatcgcttttgctcaccgtccctttcgaggccccaatcgggcaaacaaaagtcaaagcattcgctgcaccgttggcctgccaagcaaaaaacatccttgtttagtcgatcgaacagattttggcctggtccatcccttctcacctttctgatcggttggcgttctgatcagttctatccatcgcgccccttggcactcggaaatgtccggctgaaacaattgggcaggggccgacacggggtttggcatgaagtgccaatcctcttcccatccatgcaactgggcattcttctgcaaatttatggcatttgaatcaaataatattaggtacgcacccctctccctattcccattctccaccatgctcccgcccctcccaaatttctcacttcggcacccgcttttgccgccctttgcaattggtccatgccgagcgtctgctggcggtccaaaggcaacacaaaacaaacggactgacgagcggacgaagcggaacggagagaacggtccaaatgggcgacattattctgaaagggcggaagaaagtaaaaatgaaaaaagggaaagaaatgggaagtgacagttttgaagtccaaaacggaaaaaaatgttccattttgaagggaagcggcacggtcaattccaaaaggacctttttaacaaattggaaacggaaacccctgaccagggatccaaagggggcaaaaggtcccttttggttcgaaccggtcccccaattccccccctttcaagggccccccaatgggatggggccccccgcctaattgggcccgggggaaaacaaaaaaaatcaaccccttggggaaaggggactttttgcccaccaaataaatttaaaaatttttttttttttggggcccaaaatttttcgccaaaaggaaaaggccccctaaacccccctcaaaaaaaaaaaatgggggcaaaaacaccagttttggcccccctttttcgccccaaaaaacagcaatttttccttgggggaaaaaaaaaaaaaatatttttttttattttattatttttatttataaaaaaaaaaaaatatttttttttttttttttttaaaaggggggggggcgcaaatcttctcccctctttttcccccccgccggggcgccctctttttctcttcttttctctccggcccagttttttctcggcggcgggggggggggggggggggggggggagaagaaaaaaaaaaaaaaaaaaaaaaaaaaaatttttttttttttttttttctttttttcttttttataagaggggaacccaccccccccccaccccccccccatattttttttttttttgtttttggtgatataaaaaaaaacaaaaaaaaaaaaaaaaaaagtgtggggggggggggggggggcggtgttttcttttcttatttttttttttttttcttttttttttttcctcgggggtgggggggggggggggcgggggggggggcgaccacataacaaacccaccaccacaaaaaaaaaaaaaagaggagggagggggggggggggtgtggttttttttttttttttttttttttttttttttttttttttccccccccccccccccccgccgcccccccccccccccccccccccccccccccccccccggcggggggggggggggagggggggggaggggggggggggggagccacccaccccccccccccccccccccccccccccccccccccctccctctttttttttttttttgtttgtttgttgttgtgggggggggggggtgtgtggtgggggcccccgcncaccccggggggcggcggggcggcgccgcccgcccccaccacccacaaaacaaacacaaaagaaaaaaataatattatattttatttttttnttttttttgtttttgtgtttggggccgccccccccgcgcccccccccccccccccccccccccccaaaaaagagaggagggggggggggagggggggggggggcgggggggggggggccccacccccccccccccccccccccccccttttttttttttttgtggtgggggggggggggggggggccccccccccccccccccccaaggggggggccccccccccccccccccccccaccaacaaaaaaaataaatttttttttttttttttttttgtgggtggggccgcccccccccccccccccccggccccccccccctccccc

SEQ ID NO: 16317 - DNA, 2610 bp, Heterodera glycines
tagaaattttcaaatttttttttgggttgaaaaagatctaccaagaattttttctggggtaaattagggtcctgagcacctttatgatgtttattttaagtttcagattttttggaattttttaaaaattcgaaaatatttttaatttttttggtccttggaaatttgggttaaaatttgaaaattcataactcaatggaggactggtcaatttaagtgaattaaagctttaaaaatagcaaaaaatcgggagaattttatgagatttatttggttttataatgttcaaaagaaaaaaagttattccagaatttctggaaattttcgatttttcagaaaaaaattcataactcggttctgaaaagtcattagagaagagtaaaatactacaaaaatccgcaattttttgctctattatataaattttatttcacctttttatcattttttaaaaaaaagatacaaaaataaaagtgattttgggcttcgggaccataggggggggggggtgcacatggtttttgagtgaaaaaaaattttcaccaaaaatcttccaaaaacatgtctttaggcgttatttgggccgctgatcacgaatacgtgatcagattttacttttgacatcgtcaagacctcagaatccctgtgtgattggggattctgggacatgttctgaggggggggggggggggcggcaggttcgaatccggccggggtacattatttttacgtgcattttttgattacttttacatgtttaatttcatttcaaattaaataaatattcaattaataatttccaaggttgtttttaattaataaaagagtattttattattaaaaaatttttaaattaaaatgcactcgaacgggcgcgaagcgcccgtataagcccaacaaaatttaaaaaacgggcgcgaagcgcccgttcgaggccgcgaagcggcctaaaagtcccagataattttaaaaaaattccaaatctccacaacaagagctaacttctaatcactgttgtacctcttttaatcacttttgacgtcttttaatcactgttgtacttcttttaatcactttttacctcttttaatcactgttgtacttcttttaatcactttttacctcttttaatcactgttgtacttcttttaatcactttttacctctttaatcactgttgtatctcttctaatctctgtaaggccaacaaaatttgaataacgggcgcgaagcgcccgtccaaggccgcgaagcggcctaacaagctaaaaaacgggcgcgaagcgcccgtatgagttcaacgaatttaaaaaacgggcgcgaagcgcccgtccaaggccaacaaaaattgaaaaaccggcgaagcgcccgactgaggctgcaaagcggcctaacaagctaaaaaacaggcgcgaagcgcccgtatgagttcaacggatttaaaaaatgggcgcgaagcgcccgttcaaggtcaacaaaaattgaaaaacgggcgcgaagcgcccgtctgaggccgcgaagcagccttaatagcccaacaaaatttaaaaaacgggcgcgaagcgcccgttcgaggccgcgaagcggccttaaagtcccaacaaattttaaaaaattcgcgaatctccacaacaagagctaacttctaatcactgttgtacctcttttaatcacttttgacgtcttttaatcactgttgtacttcttttaatcactttttacctcttttaatcactgttgtacttcttttaatcactttttacctcttttaatcacttttgtacctcttctaatcgctgttgtacctcttctaatcacttttgtacctcttctaatcacttttgtatctgttctaaaatttaaaaaacggcgcgaagcggccgttcgaggccgcaaatcggcctaaaaaggccacaaaaagggcgcgaatcgcccgtctgagtccatcaaaatttaataacgggcgcgaagcgcccgtccgactcaacacaatttaaaaaacggccgcgaagcggccgaaaagcacaacaaaaattagaaacgggcgcgaagcgcccgtctgaggccgcgaagcggcctaaaaatcgctgataattttttaaaaattccaaatcttttcacaacccgatagctaatctaggtagcgaagctcaagaagcgcgaagcgcttttccccagctaaatagccgacggttcacgcacccgctagttaaatattatatatatatatatatatcatttcaaaactaattgcctttatcataaaaagttgtaatttttgacagaattcgagatgaaagactaagtttttttaatttaaatttttcaattttcataaatctatttttggtctatttataaagaatttaaatattaaatttgcaattcttaatatatgattacgatcttcttgtttttatgaatttagaagtttctaagtttttaataataatagtgaatatgctatgtttcattgattttatttttattgtttcttttttaattatgttattttgacaaagaataaaaaaaatgtgagcttaaaaattaagcttagacatatcatataatttattttctaatttttcatttcctgttcacattatgaaa

SEQ ID NO: 16318 - DNA, 3594 bp, Heterodera glycines
  unsure (1)..(3594): unsure at all n locations
tgcaggtnnctgacaaattgaagagtcaaaaatggcaataattntgatctttctcatatgttttgtgtatgtatttttgccacactgatcagctgcattggtgcccttcctcacttcgtaaagtccgcggagtaaagcggcactttgcgcttggacgccgcgcaccgttctgttgcggtgataaattggggatttctttgacaaaccatccatcatttcaattttgatcacctccatttgaccatccgatcgataaagtcggatttgttagcgtcggtcaccgacagatccttgcctcccggcaacaattctcgctcgattatctaaatatcatccatcaggcgattccacgtgttccaatccaatcccatgcattttttcggcatttcgccaagggtctgaacaaatgccaaccgattcgcaatagtttcaattgttgctttttttcgcctcttcccatcattcacctcaccagccacctcctccgtcacgcaaaatgccaatgccaatgtcgtcggctgatcagtgacttcattctcctcctccttctcctcttcagcggcccctccgatcggatggtcgcgcaaccagcacagggaatgccatagttgggggtccaagtctcgaaggtcgtccagacgtagcggactgaaaaatgccatgccaatttggccaacaatgggggaggagttggggggggggggggaatgggacgaacagttgggccatcattttgtagaaagggcgggtgaaaaaggagtcgagcagacagcgatgctgaacaaacacagacattgataagtcaaaacaaatggagagattcgagaataaatttgaatttataaggcaggggatggaaacagggattggcattttgtctgataactttttaaaaattcccgaaattggaataaattattggaaaaaattaccacaagggccaagccgagaactctgccgcacaattccatccttttaaagggaaacaaacggtgaatgaaatgccaattaaaagaatggaagtgccatttgaggtgatggtcgacgaatttggacatgggactgatctgaacgggcaaaaaaatggagggacaaaacgcaaaaatatgccaataagtgagtgacacctggacggtgtgagcattgggcccggaaaattcgaagaggccgtgccggggatggaacagttctcgcgagagtaggaaaaacagttcacgcgaggggccaccgtaatccaaccttgcaaagcaaaacttagcatacggtgagacattcggactcacccgtcctcacagtcaaaggtcacctgaagaaaattgaaattattgaccaaacgtgtcaatgactcgctaaaaacaatcattgaccgttttggcatcaccgaaagcctaatcaatcccaagcaatctcgatcaatgattattgaccaattttcagtcgcttaatcccctcctcccctccctctccccaattaccatcatttggcactttttgagctgttccgcgccgactgtcaaaaccttttcaaatgcatcattcattaagtgatcgcgtcgcaggcggaagctaaacaaagagaaaagctattataaaagttcgttttcgagtatcatttttatcttttcttttattctctctcgatcattcccaaatgccaattgttttcgtgccgattctcaatggctttatattgctttttaccgcaattcaaagcagtgaattacagtatctgtcccttccccctagtgcataccgtattctgcctggtcccttgccgtggcctgccctctccaaacattggtggaattgtgccaacttctgctccagaatggcatcacttcccccaccgtttgttcgttgtcttcctccaagtctctcgactccttcgctttgtctgttgtactgctccaaaatgctgatggccatcaccaagtccatgtcgttggcaaatcgcagcatggccaattcgccaaacttggctattatttgcaacttcttgtacacctttaattgatggtattttagatgagaggaagggtatttgagtttgtcatttttgcccctattttgaaaatccagttacgttcagccctgttggtcccaacagatgaagcatggggggggggagggaaatccgcttaagtgccgaccgtttcggcgatggccgggcacctctccgccaatacattgcgcacttcgtccgccctctgcgcggtccgtccccattcccagatcagctcattgcgcacccattgatcagcagaggcattgctccgctgatcagtgccatttgctgctctttctcttctccctccaacacagtcattttcattttctctcttccgtctcgcctctgtccctttgcgtctgatcggtggcgcactgcgcgtcttccgatcactttgaaagggaaggactgatcagacagacagtgagtgttaaagtgattaggcaaaagactagaattggtcaatttaagccaattaataaaattgtgaaatagcagaattggcacagcctacggtattctactacagtatggcaccatagcacaacaaataccgttgctgttgcgctgctgtgctccgccgttgcaacactttcgtcatccatcggtcggacagccgcgggtcaatcggagtgatctgtcgattgatgtgatcgacgaacaatcgctgcccattttgtccacagtcgcgcgcgatttgccaaccgacgggcaacggttgggtttggtcggcaaatgcgttgagaaaactgaaaggatgaagcaatattggccatggcattggccactgatcggtgggactgactcgaccaactcgcggttggcgcgaaagtgcgagaattttgaagggtctcgccgaatgcggtgcacaatatgcttcagatagagactttcattgtacatccgaagggcttcctttttaagggggagggaagaggaattgatcattttgtttggctttacacgagtattgattgatcagtcagtcaattggctaaccgccgagtgataatgttttagtcaaagatgtggaccatgtcactgatcattagtgtttggtccttggttatagcatatcgatcaatcaattggcgctgagtgccacttttaacggaatttccgtgcccaatcactcggtggacgtttctccggtccattttttgactaatcagataactgatcaatcaggtcaatcaatctgtggacggcctttctctcctaactgttctgatcagtatcccttcgttcacctcgttgtccgtcagtgactgtctgaacttgtcgttgtctatcacaaattgcagtgcctttgagtccgattcggccaccaccaatgattcattgctgcttctgtttccattagctttgtcctcacccattctcgaagtgtcctcgtgctcttctcggtcgtcgtcaatttcctcccaatttcgagcactttcccgtccgatcactgtccttctcgacgacgcgcttcccatggaaaagtgttcaattagaaattatcattcgcattttgtaaatgtacaaattgatcagatcattcagcccaattggtcaaatcttcctttacacggcgattcaat

SEQ ID NO: 16319 - DNA, 3148 bp, Heterodera glycines
  unsure (1)..(3148): unsure at all n locations
tttacgaaaaattatgaatttacattcagtcccgaacctacaccggctggtccgggtccaataactattcgtttaaatttttgaaatttctcaccaataatccactatagctctcatttattgagaagactattaaatgcacaattctctattttataaaaatttttatacatttttaatcaattttttattttcgtgaaaataatcaacaaaaaacgaaattaattaagacatttggcagtaccttaaaaattttgaagaatcaaaaggaattactgataaatgtttatttcttgtttcttctgattttttaaatattatttgccttactttcgaattgttttaaaaccaacatattttattgtatagtttaacattcaatgcattatattgcattttttcatcaaaaaaaattactacaaaagcctaatattgtaaataatttaaaaaacgccttaaatcattagaataataaattaaatttaagactataaatttaattaaggggggtccactaaattcagtcataatggtgaacaaaattaaaataatcacaattcttttaataaaacaatttgaataaaactttgccagattatttttttatataaggcccaactattgacgaatcttcttctttggcatcacaaagtggcccagtgaattgaccaaggtcttgttaaaagcactcaaatttcacgagacactaactattcagtcccattttttttgtttgtctaaaacaaataatggatttttttaaattggtctctttatgccacccgagcactctttgaataattcattaaaaaatttcgaaaaaattgcatttttggaagatgattttaaaaaacataaaaatttatgaactcaaaataaaattctgaaatatggcttattaaaaagcccaaagtttctctttcgagtagtatatgataattatagaacagataaataattcaatcgatattattcaataaatttattttcacgaaaataaaaaattgattaaaaaatgtataaaaatttttataaaatagagaattgtgcatttaatagtcttctcaataaatgagagctatagtggattattggtgagaaatttcaaaaatttaaaagaatagttattggacccggaccagccgggtcgggtttcgggactgaatgtaaattcataatttttcgtaaattttactcatttaagattttaataaaaacttaattatggtggattaatgtgtctatcgaagagacttaatcatttgggactcagtggccttggcccgcaaaaatgtgcgctcggcgattagaggcagcaattaattaattttgggctctttatttatttttgatgaatgagaattttaaataatatggaatttcgaaaatcacattttatcagcttctttaattgctataagaaacaaagttttgaatcgaagaattaattggattattataaaattctgaggttgaagcaagcaataatttattttttgcgtgcccaatctgtggctacaaaaaccattttaatttaaggaagtagagaagagaaagtcagtagcaaatctaaaaatggacctttttgaattggattaattggcataaattactaaaataagtttaaatgacgacattttcaaaatgatataaaccaatgttttttatgcgattttctcttatatttgaaggatataattgaaaaaaaatttttttctgagatataataatctttttttttttgttttttaaaattatttagcaaatttaccggtcaaattgcaatgaatgaatgactttttcattctgtctcaaagagttaatttaataattctatcatttacaagtaatgccaaacaataatgaaatttattttaatttctcaaaaaaaacattttttctacatttttgggttttctntagtcaagtaattgaagttctcgtgtataaaaatgtattttgtgcttgcctcattataataataataatatttcatgtgtcgtcattttacaatttataaatccctttaataatccattattaaaatttttctattcccaattaaatccgctccaagtccatattttatttatttttcctaaaaacaaaaacgcagagatcaattaggtccatttattttaaatcacccaacaaaaaattaaaaatttttcgaagaattttcacattgagcgattcgctgctaaatgcccttaacagctaaataatcattttccaaatgatatcccgctatgatgacgtatgattaatctctattaatccatcaccactcaaagtatcataacaaatgatttgggtcgactcgccgccgatacggcggtgcgatcagatcaatcggcggcttagttggatcggacattagcagcaggataattatcattctttatttattactagggctcgcttcgctcgcgctagtcaaattttaaaacaaaaaatgagtatttatgtttctttctcttctccttcttggtgttgacgaagtctatctatctcatcatctatcattcacacccccagcaggactctcttttgtactcgctctctctgtctctctctttctcagctattctctccatatctctctctccttctctcactcttcaccctcactcttttacactctctctatgtctatctctctttctctctttctctccctatctcttttccaacgtgtctcttcatatttgtttattacttcaatttcttttttcattttttactcgaaaaaaatcccgctaattcaatctttacaaaggccaaacagacgcactcaccaattattcataggattgttgtggaatgtaccgccattgacgagatcgcccacacccaacgcaagcgaaaggcagtaaaactaactaatgatgatggaaggaaacgacgaggggatgaggggtccgccgagggactgctaatgcattattagcattcatcaattctagctattatcgtcatcagcagagaaagagagagaatttttaggaatttttaaaaattatcattaattttagaaataagtttatgttaattagttgagaaaattttatatcaaaattaaagagaaaaaaactcttacaaaaattcgattttaaataagtttttcattcactaaaacaattaaatg

SEQ ID NO: 16320 - DNA, 2574 bp, Heterodera glycines
  unsure (1)..(2574): unsure at all n locations
aaaggacgaactcaactatgaagtagcacatttctgcttctaggtcgagtatgattttaattattatatcaatcattcatttttgaatataaacaataataacaattgtgataagcgttaccagttttatacacaacattggatgcgataacctgaatcacaaatatattaaataaaatcaattttaaaatagaccatctgtcaaaatccgcataaaaacgatattcacgaacaataaaatagtgtttgaatctgctgaaattccggtttcaattaatgtatgttgatattagggatgcgaatttagtgacgaaaaatctcgaaatagttaactaaaatagtgagcaacaatgccaaaatagtgaaaaaagtccgaaatagtgacgttttagtggcatatttttcagccaaaaattgtgcaaaaataaattattcactgattgcagttgcaaatgaggtacatttcctttctaatattttcacagcaaaaattgacattttttaaaccaaaattttgccaagaaaaaaaatttgggggatgaatttttgataaaattttctaattcttaggggcgcattttgaaaaattttagatcgatttttaggggtgtattttttcaaaaaaaaatttttgttcgatccttggggtgtattttttgtttttattgcatttttgataaggaattttccaaaaaatgccgaaatagtgaaaaaaatagtgataaaacgtcaaaatagttaattttcactattttagttactaagcgccaaaatagtgatttctagtgaccgatagtgacatcagaatcgaaaaatgtcaacgcagaaatacgttttttgagctcctttattcaaaacaattgagtaaaaaaattagtaaatcactaaatgtagcgaccctaatcatcagataagccaaaaaaaaaaaactaaaattttaaattaaaattaatataaaaaaattaaaaaaaggcttcttcgtgatcgtttcttcgtccatctttcaccattaaaaattccaatttttatgcatatcggaagcaagaaaatgacacatttttgccatttttgggtcaattttcagaagttgtttaacagaaatgcaataaaaatgatttttattgacgcgatgacattttttggcgacatgttcaaaataaatttcaaaaattttccactaaataaatcatcgaaaaataatctcccagtctccattagtctaccaatctccaattatctacccctttctgaggaggttgaaaaataatataccatcatggcatataaaaagagtatatacggtagacagtttaaaaagaaaataaaagaagttatcagcagcgatgttaagacgttcgttactcattaaaaaagatcattttttaggaataaaaaacatcaaaaagagcgcagaaaaagaaaattctatgtaaattagacgaagaaaaaattgaaaataaataattgtagagcaaacgaaaacaaaaaacgactatccgaaacaggggtgtgcaaaaactaaaaaaaaattaaaaaacaaaacaaatcacgaaaacgaaaaattttaaaatccgaaaacgaaaaaatacacgctttcgtacgaaacgaaaaattttttaactaagtgctgatttggcattttggtgcttttttttgtgctgtttcgtcattttgagaaatttttaaaaatattttcagcaattttcaaaaaatttattaacaaatatgcaataaaaatgaaaaatacaccccctaagaaccgatccgaaaaatttcagaaaaatacatccctctcttaattttatgcttttttccaattttttgtgctgattttgcctttaattcggattttgcacttatttgagggtttttgaaaattgatggttaaattcttaaaatagtcaaagtcaagcaaaaaattatttgttttatgatttttatttcgaactgcagaacagtaaaggaaaactcagtagaaacagcaaacaaaacaataaacaaaaataagaaaaaagctaattaatcgattaaaaatgtggttagagaaaaagaaatagaaaagaacacgagaaaaaaaaacttaatggttctaaattttaagcaactaaacatcggagttttatataaattgattttctaactaagtttggaacaattagaggtttgaattttgttgcaaaaattatacaatcttaaaacttcggacaaatctgaaaattcttggaatttttaattattcagagtgcataatctcaaactatgacaaatacgaaatttaatcgagatatttagaacattaaaaatccaaataggtaatattaaaaaatgaacgtttgatgtaaaatttattaaactttcaattgaaagaattcattaacaaatttttaatttaaaaaaatgcattttgggcatttaatatttttatttttttanagcaatttttcaaaatgagcataggataattcttaaattttcaacatattttttaaattagtgtcanattttggagaaaattgtcctaatttaacaaaaacattatcaaatttctctttaaaaataaaggatattttgtta

SEQ ID NO: 16321 - DNA, 1293 bp, Heterodera glycines
  unsure (1)..(1293): unsure at all n locations
ctacatatcttcagatttgttcaaaaaggaaaataaattactcacttncggcatcaaaattatacaagaaaatcaaggatgagaacattgaaatgaattcactttgttaaaatattttaattaattaattaattttttaaatttagtttaattattaattgctaattatgttcatttaagcggcggatcatttggaaaataagctgaaatctgttgataataaaactgattcgatttatcaatggcttgacaatgcgattggcgttatgtgcagttacaaatttgaatttcaaatggatgaaaatgttcaacaaatgcgcacaaatttatgcgaacaaaaaagcattgaaaaagcagcggaaattttgcaaaaaacaactggaaaaagtgaatatgtaattgatctgtccattttcaaaacatttatacaaaaaactcaaaattttacttcgttcatcaaagatcaaaacataaaaaaccttcgcaaatttgttggatatttcggtgcagcaatcaaaaagtgttacgcaggtatttttataaaataaacataaatagcatttttttaagttccaagtgtcgactcgagaaaagtcaaggggcagaccggtttttaaagtagccattgtgtgaaccttgaaaattcagagcaaaatcacaatcacataaatttttcgagactcccaaaaatcccgtaattagggaaatggcaaactttaaaaaacagtttaactcggtttgaaaaaatgacaaaaaatgtcaacttgggtttcgattctatttatgtaattttttgtaatattacagtgaaattggaatttttagctcacttttccgcgaagtaacaaaattcttgaaactttaaaggaatggttttagattttaagtaaacttaaaaaatcggattcctgtcaaaaaaaagtctaaaaaactgaaattcctagctaaccctggtgcacaatatacaaaattatataattttttttgaatatttagaagcaaaaattgtcccaattattgttcaaaacgtacataacacaagacgattaaagcgtaatgattacggtgaggaggaaatacagcagctgctcgtggacgcaaatttttccaaaattgtcatccatctcggggccgccatggacctgcgcttgtgcccggacccaccaccaaatttgctcgatcgcaaccggggccgtgccgcgcgaattgtccgcgtctttctttttgccatttttcttgtcatctttggcattctgctcatgcgtttttctggcctaaatgtgcactccatgg

SEQ ID NO: 16322 - DNA, 3002 bp, Heterodera glycines
acgttgcagtcgtcgctgtgcgtttgcacgtccattcctcacacggccgcggtggtggaggaggaagaagaagcgacgcatggccggaagctgaagcttaaggagcacccggtgaccgacgaatacaaagtgtcacatgaggtttacgcggtccgggctggggggattttatccacccatgctcaaccaacagatcgtcggcattggcgaaagcggtaaagttatggtaagcgagcatataaatattgatcactgttttttgggctttgatcagagataaaaaccgttcgccaatctctcaatttttactctgataagcgggcttttttaaataaactgttgtttccgagtaaacacaatctttggtgaccgatcaagcagcagttttctgctgcagcactctgatcattgataaatgctgatcacttatcgaatttttctttttcttctgctgatcactcactttctccctaaggcgtgtttccataaacgacgcggcgaaaagtgcgcgctcaaagtgttgcgtgacaatgcgcgcagtcggcgcgagttggcgctgcatttgtcggtggttgggcatccgcacgtggtgtccattgaagacatgttcgagaacagcttcgacggactcaaatgtttgctagtggtggtcgaattcatgggaggaggcgatctgctgaccatcttcgagcagaacggacgattggcctactcggaaaaatgtgacaaatggtcgacaagtccgaaaacccatcccctttcccataaggtgtggcccgaattgtgagccaaattggcagtgctgtgcagtatttgcacgagcggaacatcgcacatcggtgggaaattttaaaggaaaaaagatttttggatttcatgagttccattaatttttactgggtaaataattttttaattaattaaaaagtaagttttacaaaaatttttgaaaattagcgcaaataatttttagttgccgaaggttcaaagaggtcaaaatcgtcctgaggcgataccccaccaagccaaacttttagggccttccctggattccctcacaaaacaattgctcttaaatattgaaaatttgaataacgtcccgagaaatatgtcaatctcgagaaatgtcattggattcatagtgagttttgcagggacattaagctggagaacattctgtgcagttccaacgcagtggaaaagtgcaccttcaaattggccgactttggcttcgccaaacgcacggaaaagggccgactgatggagtcgccgtgctgcaccccggcgtatgtgtgccccgaggtgggcaatgtgctaaattaattaataacggaggcaaagggacactttcagattctgaaccgcaaccattacgacaagggatgcgacatttgggctttgggagtggccacttacattctgtgagtcacagaagggcaatttttgctgccacaaaatggcactccaaccccaaaccgtctctttgttttcagtttgtgcggttacccacccttttattccatgcagggccttccattctctccggggatgcgcgaacggatcagtgagttgagaaaaaacgaaaaagtgccaataaaagcgaattcagtggagggaatgttcgccttccccgaggacgaatggggcaccatttctcactcaagtgaaactaattcggaccaaaaatcaaatttgattaacattcagctaaaaatatcatcgctgcgatgcttaggacggaccccacggagcgaattaccattgaacaagtgggcaatggggggggggaggggggaaagtgcgggtgccgattggacactaagcccaagtttgtaacggaatccagaacatgattccaagattacaacattatactgtactagttctgaaactcctatcatggaaacccaatcttataaaatggccccgttaaattcgattttccgggctctaaattaagggcatctttggcaccaatgcatagcttttgcttcattaagctgatggcttcctctttggcacgtcctccagcccatctttctaatgcttttccgcttccccccgtctattccgattcgtcgctttccgacggtggtttcgagtctgccgcggagacggctaagattttctcatctgcggagagcggaagcgaaagtcacacggaatgcgaatgcaaagtgctgagggaaaagactaaacggagggcgcacttttttgtcggcagtggcgcgaagtcatcgctgaacatgccgaaaatgggcgtgccattgccacgggaacgcgtgtacagcatacaggtggacaaagcagggcagggcatttttatggaaattttggaggggggggggaggcttattttaaggcatttgggaaatataaaagcgaaaatgcaggaaaatgtcagccatgcgctttcgatgatgcgatttggcggagattcctgtgcactgcaagaactaaaaacagtgaaaaacaacgcattgttggagcggagaagagcggcaaaaacgaaaacagcgaaggcggaacaccaaaaagttgagagagacggcgaataatgggcaaagaaacagaggaaaagcacacttaagaagaaagcgttcatgtaattgtatttttgtcattttattaatgatcataaaacattgtgccagactttgctaatcaatggggaggggagaaatgttgcaacttttgggggtgtttttgatttgtacttcttgatcacatttactgctgggagttttggctttgccattctctcactccgtttgggtacgatcgcaaaatcagttctccgactgccatcattgccaccgtgacaaacacgaccaatctgacaaatgaaatgaatttatcaatttgtttggctttgatttgtgtctcacccgacgaatgcgatcagaagcacgcggtccaaaacagtggcgagaaattcccattcgtaggcgaaccggcgcctcaatttcaggtcaagcattgctgctgcatttgcgcttggg

SEQ ID NO: 16323 - DNA, 4079 bp, Heterodera glycines
  unsure (1)..(4079): unsure at all n locations
agatgtgtcgtcatcatcaaaggcatgtaaacagaaccgttaaaggcccaattacgaagaaattcagtaaatccgtttagtccatcatatctttcataatattcgttgaccactttttggctcgtgccgtcttcttgccttaagaaacccttcacctaaaataacaataaaaaatgaaaaaagttttttttcattaacctcaatacagtcctcagcatcaaaaatgtagagccggttcaacgatgtcagtgtgcgaatcatcagacatccgcttacacgatagtcacgatggctcctgtatgttggagttagtgttgtaaaacgaaagaaacatacccaaggtttggtagtggcgtaatacagccaaattcacgagcaacttcctcaagcattggcacccattcgatcagtcggaattcggtgttgaatgtgacggtcatttttttcaataaaatacacaacttatttatttctaacgtcattcagatggtttgtgtccggtggaatagtgcgcttacaatgtgtgagaggctgatagaacaaagggcaacaatcacacaatatgcagtcgacaacaacgaatcgagcttttgttgaaagatgataagtgggagcaaattgaagagctggttggggttttgaaatgtgctgaagaaacaacaaaaaggttcaccgccgagccaattttatttgtccttcctcaagcaagagcactatatgatgatgtgtttttgactaccgtcgctccaaattagcaccctgttagggttgggacccaattgtccggtacccattttgaccctttgctttacttgtatttccctcttcccttcattatgtcacgcccctttttccgcccataaatacccgcgatgttgaccctccccgttcacttcattcatttgtgttatttttccttcttgttatttaaatattgctccgcatttattttgtgtctttttcccctctgctccaaataaatattgattatttgtttgccatcggccggcataacataccccaaacggcagaaaaactttttttttgaacaagtctcttccccagatgaattacaattattgaaactatttttttgttcattttattaaaattgttatataatttctacatattgatgaaattttgtggggtttttccaaattaacatgtaaaaattaaatttttaccaaccaggaacccggttccgggcccggcaatttgaaaacccgagttgaccgggtttccgggttgaacgggttttgagaggcctggcccggaaccggttacttctggaaaaacagccccggcccgcccggcaatctggaaaacttcattagttttgccactcttcaaaaatggagacaaaaatntagtaaacaataccgtcctatatctattacttgttcctgttgccgaatttttgaacgcttaatagcaaaaaaaacttactgaattcttacttaaaaacaatcttatctctgaacaccagttcggattcctaaaaagtagatcaacaaccctcccaattaatctcctcactggaagactggtacaatgcgatacttagaaaccaaaaaattgatataatttatttagatcttcaaaaatcctttgatcaagtcccgcatgatcttttaatatacaaactcaaaaaaacggaacaacgggcaacttattaaattggcttcgggattttcttcttggaagaacctttaaagtaagaataaatcaaaaattttcaaatgaatttcctgtcaaatcaggagtcccacaagggtcagttctaggacctattttatttttaattttcattaatgatttgcctgaagaaattccaaaagaaatctcaattaatgcagatgatacaaaaatttatcattgctattcaaatgaatcccaacgtaaagttttagaaacagctctaatttcagtctttaattgggctgaaacatggggcttaaatttttcagtaaaaaaatcttccgtcttatatctaggtaaaaataacaaaaaaataccgtacacaattaaaaattcaactttccctgaatcaaaaattattcgtgatctagatattttaattgacaacaaactcaaattctacgaacatgtttcaataattctccaaaaagctatctcaaaagtagaattctttttaaaaaaattaaaaccaagacaaccaatacttggattacagtttataaaagttatattcgaccccttttagaatacgcaaccgaaatttggaatcctcgaaccaaaaaagaaataaaggtacttatacagttttatttatcgataaagaaaaaatttgccatcagaagggcgggaaccacttactctgatgactgatcaagtaaaatagtcacagagtaagtgaataaatatcaagtgagatcacaggttaaaaataaacaataacgaaaaatttatatgaaaataaaatcgaggtcaaagtcaataaaatgcctcaaaagttaataatttctttatacattggtgctttcagaatcaagagtcaattctaataatttttaaaggtgtttaatgagctagacattaacgttttattaagggcattccaggccttgactgatctgttaacaaaagatttggaagattttttagattgtaatttaacatataaccggaaaaatgacttgtttcgagtatttaagttagttcttttaaacagagaatttgggtccaaatgtgtaaaaccacgtaaaattttgtaagtagttaggaggtcaaaaatttttcttcgtttttcaagagtagctaatttaaaaaattggagccgttggtcatagggaatatatggaagacaacattttctgaaagcaattcgagtaaaatatttttgacatttttcaattttaataatatgtgattttagttgcggattccaagattcaggggcatattctagaagtggacgaatataactaacataaatatttttccaaattgcaattttctttgatttaataacacggaaaagtaaacgcatacggtagtaggcgttacgggtaattttgcttatatgttcggaaaaagtaaatttattgtcaataagaatccctaagtcacgaatagttttaacttcacaaattgcattatcattaattttatattgttccctggggttattctttccgaagtaaatgataaaagttttatcaatagaaattttaatataccatttcttagaccaatcagagagaatatttaaagcatggtgcatagcaattctatcattttttgttttatgtacggaatataatttgacagcatccgcatataattttatagaaatttgtttaggaattaattcccgtaaatcattaatatatatcagaaacaaaagaggcccaagaacagaaccctggggaacgccagagctcattttatattcagaagagagagtattatcaacccgaaccctaaaggtacggtttgaaagaaagtcagatatccagtttaagattttacccctaataccgattctatgaaccttatataaaagtaaattatgggggataacatcaaatgctttccctaaaatctatatagacacaatcgatattcttattattataaataccatcataccaattttcaagggttgaaattagttgtgttgtggttgatctgccctttataaatccaaattgatgttcggagaataaattgttctttaaaagaaaatcggaaatagcccaaaaaataaatttttccataattttgcataaagaacaagttaaggcaataggcctatagttcatagggttacttttttccccttgtttatgcaaagggataataatcgattgtttccatatagtgggaagttttcctgtatcaagggtgagtctgaaaatttcagtaacaaaaggagtaaacgaaagagaacaattttttaacagtctaaaggtaataccgtccggtgatgtgttatttctgttaggtaaagttttaagaactttaccaacagaaataatattaaattcaacgtcgtttattgttggagaagaaaaagaagtatcaaaatcaagagaataattatttacagtaaa

SEQ ID NO: 16324 - DNA, 1274 bp, Heterodera glycines
caaccgggaaattttaaaaattcaaaaaaattttaaacattaaaaaaaaattcaaattttaatttatatcaagtgaaaataatacaaaattatttggttttttatttaataaattaaattaatgaaaattttcaaacaaattttcttcaattatttcaaacaattaatcatttttggactaaatcatcgaatattaatagaaattcagctttgattttcacatcactttttttcggagcgctttttcaaaaaacttttgggaaagaaggggtccggcggtcgataggcgccgccgggggaaattttaaaaatttgggtgcaatttgttaacagattttcaacaaaaaaaggttggtttttgcgattattaagctcaattggtaggattttcatttaaagaatgataaaatatgtatcaatttaaaaaaaactatgaggaatcatattttctttataggaaacccacgagtatacaaaaaaaaaaattgaaaataatctaatttctgtagagggattgaaccaggggaaagaagaagggaaagtcaaggagactagccattaggccatttgcacacttaggcagtattacttttaaagaatatattaattattattttttatttttccctttgactccaattttcttcactaatttttcactcagacccccattcttaccagtgcttgtttttcccggttcccggttgccctaccgggaccgggacctgagcttttcaaaatccgggaccgggaaccgggacctctgaggaccgggaattcccggcccagtcccggcgcactctacttaaaagtgaaaaaagtcacattttggtgacattttgccaagaatttgattggcaaaccccaaaacttccccccgcgtcgtctagggcctagcgggcttttaccggaccaccccggtccaggttaattgtctgatttagagcccgatcccgttcattcaatctctaacatcgcacgaaaactacgaaactgatcccaaaaagttttttggaaaaagcgcgccgcaaaaaatttcattttgaataaaattttccagaatgtgattttggccccaaatgatgattttttgtcggccaaatgctgattttgaaaatttcagttggcagctctaacgctaataaaatattgttttaagtctatttttcatgtttttattgcgtttccttcactctactatttgtttttgaaaaatcttatttttgtggtaaaatcttagtttagcctcgtttgtccttattttgaaaaaaaaa

SEQ ID NO: 16325 - DNA, 1379 bp, Heterodera glycines
atatccgtcacccaaccttacagttggtggccccgattgatttttttatttaataaagcattacaaacatgcttcccttggttttcggggttgctgatacgaatctgaaatcagattaatacaatttcgaacccataaccccgaattcgaacatttttcgatttttttgaaaaaattttttttttcgtcgccttcagtgaaattccaatgaatatacagcgatttgagaagggtgctgatcattagtatggtaatgaaataagagataacaaataattaatatggaaaagcgaaatttaacaaaattcgattttttttgcaaaaagccgtgaaaattggtcctgtttctattattggatggcgagcatccctcagaaaaacccttacttattgaagtttttataacaataaaacttgtacgatcagtaataataaacggttgcattaatgcttcgtaactcatttaatttcagtgagaattaactaattgtaagataaaaaaaggttttttttttaaatttttgtcaaatttccttttacaacattttaggaggcaaagactacgtggtgaaagcccaagtgttggccggcggtcgaggcaaaggcaaattcgactcgggactgcagggcggcgtccaaattgttttctcgtaggccaatctttgtcttttttttcttttaaatgcgcaaaaatccgtttgaaattgcccttttcgctattcattcatcgaaaagcaatgcaattaatcaaaaaaaaaatatacccctaaatttttgttgcttaaggcctaacgaagtgcgcgaaaaagcgagccaaatgatcggctaccatttggtcaccaaacagacgacggccgagggccgactgtgccaggccgtgttggtctccaagcgactgttcacgcgcaaggagtactacttcaggtttggcatcagcgcatgcgcctgggaggggcgggggggggcggcgaaaaattgggtcgaattctttcgaaaaattttttttttgaatttgagccaactttttcgaatgattgatctgtccccggaatatattatttggtggcatggcatcatcttatgattccaagtctcttttatccgtcccaatttgtccactcttttgccttttcagcatcactttggaccgttccaccgccggtcccattttgatcggctcctccaagggcggagtcaacattgaggaggttatttcccgttttcgtttattctgcaaaatggttaacccgtttccattcaaagataagaagaaatgtattgaaaatgggtttttttttgaatttttcaaaataagtctgatttatgccaatttaaaaatttctgtgtccattaccatcgccgaaaagcgtgaaattgaa

SEQ ID NO: 16326 - DNA, 2649 bp, Heterodera glycines
  unsure (1)..(2649): unsure at all n locations
aggtcccccccctttactttttgataaaattcaaaatctgtcactttcatatagcgccgaaatttctattaaacttacttttcctttctctgttttattctcattggtccttaaatgataatttatttatatttaaaatttaattattacatttttcgattgtttcccttttcttttcggccctcctcaaaaatgaaatgggcaattaacacaattacaataataaccgtaattgtatttaattttaacagtaccaaatctatgcctaggcaagcctcggcttaacctttctcatgccattcgatccacccaatgcttcgttttgtgttttaattacccaaaaaccgattattaataaaattaaattgtataattaaaacattcatcaatgatacattcaattctttttttttttattaaaatccatcttccgcccactttccgaccatcgattcactcgttggaagtaatgttggcaccaaaaccattaaaattatttcacattttttgatattgcccaactgaaaatttaaaaaaatgtctatttacaagtggaaacgcttttttcttttgttttttattattttctttctttttccttaccgtttcgaatttgccgacccaccaaatgacaaggaaaatgagaaagtcgaacggaaatgcccttttagtaacatttattcattcgttttgtctccatttttcattgttttattttaagaaattggaaaattttcgcgggaaacgccccaacaggtggccaattaagcaaatggcaaataattgagtacatttaattgttcaggtgcacctttcactgaccgatagaatgaatgagatgaacatcagctggttgacttttgaagacggcaaatatttcacttttaaataaatttattggcaaaaattttagttgagactttcgtcgaatattggcacgaagattcaaaaaacagaaaagaaagaaaatttgccaaaactattaagcacgaattcagggactttatgaaggtaatcattcggaaaagccaaaaaattgtttttgcattttgtttgccccccaaggatgaagtcggcttcaactccgatcagaaattggccgccaacttccgctacatgcacaccgtaacgctggagggactgtatgacgactcgacatacggtaacacttactgtaaccagctgctaacaaaattctgctcgcattaacttcaaaatatttaaactattttttaagttgtcaatatttggccccgtttcgctttttaaccggcaaattgtcattattacacaaaaataaaaaaattaatggggacgataaaaatgcagtcgatctccgtcagtttgttgtgattcgttgccttttcgatcaaaaatccgtctaaatttgtgattggttcgtcagatcaaaagaagcgtatcgatggttcgaatcggctccatttcttctccacttttccagcgctgctgtactcatcggcccggttccctctgaatgtcggccattgattggccaattgtatcggtcggttctaagccctctccccccgattgatctatcactgattgatcagtgatcccacactcattaatcccctcctttttctatcgatttttgtccctttgatgttcccaccttgtgcctttgttcagtggtgctaagaatcggtttctcggtgccgctgatccgtcanatggcatttgctgttgctgaacccatccgttggggccgagcagaaggaacagcgatggctgctggtcctcccncagcaaaaccattcgactggcgccgtgactttgtgccgttactgcgctggcgacacaattcagtagagaaacggacaaaagcactaaaaaggcaaaaaaaaaaatgtgaaaaaaagaaaaatggaaaacgaacggaatgccaaaagagaaagcatttgacgaaaagccatcaaaaattgagagggaattgaacggctgcgcttaacgattgaagcaacaggaattaaatgttttaagaaggatgtctggacactgaaacaacactttgtgagacaataaaattaattcttcgtggcattcattggccaatggattaataatttaattattcaattatcgactcgcaagggaatgacaagggcaaaggagaacgaatgaactgttctcataatgtttggttagtgaggaataacgaacactttgaaaagaaacagtgccaaaattcaattaaaagccggcattttggcatgtttttaatcataaaatggcaatttgcggtgattttttgcagagcttttcccacttttctctaatttacccccataagaatggcatactgtcacgaaaggatttacaacggcaccaaatcctgacaataattaaaatgaaaagcttttgtctttgctaaatccggctcttcggagaacaacggaatgaatgatggcggtaaaggcgtgtcgaggccaaggccacggccaccctcatcatatttaagccatttcattgtcgggggggataatattcgaaatggcgacggagaatgacggaagcggaaaaacgaaataaggacggacaaaacagaacagcaggcaaaaagaaaaaagaatgaatgaaagtaatgggcgaaggggggggggggaagaagagggggggggggggggg

SEQ ID NO: 16327 - DNA, 2484 bp, Heterodera glycines
aaaaaattcattaaaaaaattaatgcatttcttataataaagtgaagacaaatgaatattatgcctaattaaaagagataaacttaaaaaactgaaaagaatattttaaaataataaaagaaagattaataatattattatcatgaaaaataaacttaaaatggaacactaattttttggaaagtgattataaatgttaaactttaaattccgagagattcatactcaactcagtatcgtttctattcttgctaagtcaaatatcttaaaattaattcagaataactagttttataaggtttttacaaaaatatatattattataagaaataaatcatcaaagaaaagtaacgtttcatcattaattgaatttttcatcttaaagaatcatgagtgttcttgtattattgcgcgattatgaaattaaaggaattaaaataaattcaaaattcaagaaataaatttaagagagaaaaaaataatacttattctagtagtctctctgatctatctgatccaatgttacacgtgtcaaaaaaacatattatttgaaatgaattaattttaaaatttacaaaacacaataatgttttaatccagtccataaaacaagatttaattaaaaaattcattaaaagtaatcatcgttaaaaaattcttttttatcaattcgaaatttaaataccaaatttcatattaaaatttataatagaataaaaattcaaagttaaagattaagcagatttttttattcaagaacctcatatgagcgccattctttatcgctgccgacacaatactagaaacgacgaattcttcaacaaaaaattgctcaggtaaagcacaaaacattgtttggagtttaatcccgcgatttttttatattgtaaattaaacaattacatgtaacttctaaaaatttctatattttataaaatatctaatgataaattaatttaaattgagtgcttaatctttttacttgcacatggtttcgaacataatatgaaataataaaaaagataaatgtttttggtaaagcgcaacgctcatttaaatcagcatgtgcgacattctatataaattcttcttcataaaaataataatttctataaagacgacgcatattccgatttttaaattaattattaaattcaaaaatacatatgaaaacggatataaataaaaatttcgaaaaaagtcaaataaagttactgttactaatcataaaagaaaaaactttaaatatacaaaattttaactttataaatgggcacctagaaccagcaaaagaatggaaaaatgaaagattgagtattaaatgtgaaatttgtgtatctgttttttacttccaaaaaatttttacatgaattatataaaaaaaaagaattttttgatttataaatagtataaaaacattttttctttaaatcagatttgatgataatttaaaatagtatttgccgttttactaatttattttgattgaataaaattgttttggcgcgattaggatagtttattgtaaaatttctcgcatttattatgaaagaattgaacaagaaaagatggaatactaaaactgaaattacatctctgaaattttctattcgatcagttaaaaaaataaattttaatggaaatttttctaaaatctcctaattttatggtttgttgatcatgaaaatgaaatagtttttcgaagcaaatataatatatattagaaattataaaattttttcaaaatattatctaccgctttaaatatcacaaaattcaattatttgcatttttcgcagaaaacagaataagattattacaaaaattttgagatgtatttttttttgcaattttgaagctagaatctaataaagattggtatttttaaatttaaatccattttttagcgtatttttaagtctgttttagcaagtattgaatataatacatttttcggaattttttatgatttaaaagatatattttggtagttttagtcaaaattttgctccatatttggccataaacaaataaaaataaataaaatgtttaaaaaaagaactgaaactaaaataaacaatatacattataagtcataaaacttctttatgattataattttaaatttattaatgattttattgaatattttaaattcttaaatatttaattgtaacaaagaaataataaaattaattcaaaaataaaacccaaaagaagcaatgtcaaatttattttagataaaggacccaacccaaaaaaacatcaagcaaaatctaaacagactaatattatttatgatgaaacaaatttagataataaaaaaataataatttgctataatagtctcagttatcatttaaatttatattgcataattttttttattcgcctgttacttcaacatttacgggccatggtaaatccaatgctttaataaagcctgtatgaatttatgtcaaatattattaaaaaagaaatact

SEQ ID NO: 16328 - DNA, 1517 bp, Heterodera glycines
  unsure (1)..(1517): unsure at all n locations
atgcctgtctgttttgccctttcttttttaagccttaatctctcttttcccagcctaatgtttccacttaatctttttatgtttccattctgtccttttcctttggcgccttaatatttaccaaccagactgccctcgtattcccccctctcgatgttctcgacccaccacccccttcccacgaatataaaagcgatcaaatccctttatttgttagttcttttaactcattctcattttgtgtcaggttccctgcctgcccttcctttgctttaaaatttgaatcacttactcacattttgccttgcttttgcttaaataaatttccttttaacttgttgtgaattgactaagttttgggtacgaatccacttggggacatagcactttttggtgccacgaccagggagtaagccgtcagtgctcccctgattcgtagaggaaatcggactggtcaaagtttagtacttccagtgccgaaattaatttgagctggtcaaagttaagtacttccagccggagatccaaaaaacagaaaactgatcaaatttcagtgagctgatcaacttgtgtagtttcagccgggcttagtgccaaagaaaacaaaaaaaaatggtttcgagaagtcaatcaccgattgatcaacaacgaaataatggctctgactaagtcgatcgccagacaagccatgtcaatctgtaagcaagccccgggggagaaagtttatgaatttgctaatcggcttaatgaagttgtccgaactgtcttatctggggaaaatgaaaatgtaatacaaaagcgtcttttggaggaatttttggacagattaagtccagatttacaatttgaggtaaaagcaaatcgcccagtggattattctaacgcatatgagttagcccagcattttgagttgttaatagctggccgaagaggaagtcaaatttcggtcgctgagcttagttcgaaagttgaggcccttgctattcaacaacaaagctccggcccaagggggggatatagccagcaaaataagagaggtgtttgtttttattgtcaccgccccgggcatttgataaaggattgtcgaaagagaaaatacgagaattcccagaaaaatggtcagagaaaccaaacttattttaatcgggaaaacaagagggataatcgtaattggggaggacaatgggaaagggcaaatggcgattataatgaaaaccggaatcgagaaagggagaattggaggactagacggtctccaacccctgaggggagaagaacgtggataagagagaaggagaacaatcgacgttacgaaaatgccgatgattacagtacaagagagcggtctcactcgcccgagaaaagagtgcgatttcaaggagggagaatcccagcggcgagaatcgcaagccctaattgcagttttgaccctttttggaggaactttgggtacaanaggtagtcccatgatttgtctgcccgacgcaccaacaagcctatggtcactacctgctgac

SEQ ID NO: 16329 - DNA, 1056 bp, Heterodera glycines
gttgttcatagtagagtagagcgggaccgggaattttgggcaaacccgggaccgggaccttttcgggttgaaaaaccgggaatttttggctgggaaaaccgggaaaaaacccgggactggtcccggtcccgctctactctacatagttcatagtaattatttaattcgataccgtacttcaaaaaatttttttgggggataataatcgagggagaggttctattcgagggtggggttatattcaaagaagtatgataaaatattgaaaatttcgagattgtttgagacaaaaatataaaaaaataataaatgtatatttatttgttattttgttacttaaaaattataaaatttaatgcctttttacgttatatttagggagtgtaattatatggatataaaatcgcgaaatatggccttaaaatatggaccaaaaatcgcaaaatatggacataaatggcaaaaatgtcaaaatatggacataaatttttcaaaattgagtgcaaaatttcttcaaatttaatggttgaaattgcatatgtatgagatacatttccaaattttttgactcggtaaggcgctttgacaaagacggctttcgttttgcaattagtcggtcaacattcggaaattggtctcgaattttttcggcaattacgtgcaatcattttaaaagaaaaaaaacataaaagctaaaatttattaatttttttagcgcaaaatcaacaacaaaagcgaaattttcgcttttttgcttatttttgacataatttattaatttttaagaaaatttaaatttattcaatattctcgagaaattttggcgaaaaaatgattttttgaaaaatttttcgggttttgggctcaaaaaggctaatttagctgctgggggccgttctaatagaggtttttttgaaaaatgccaaaatatggacataaaatatggaccaaaatgccaaaatatggaaatatggacataaatcgcgaaatatggaaaaatatggaaaatatggatatagaatccttcctagaagcttcaaaccaagctaaaaacat

SEQ ID NO: 16330 - DNA, 1548 bp, Heterodera glycines
aagaacaattgctaataatgctgccaatttgacacaaaatccttttgttttgtcaaaaaataatgcccaacaaaatgcgaaaaggcatttcaaaggtttgacatttcaaaaattaccctctcaaatagaaaaattaaaatttagcaaaaaatgataaaaattattgcaatttgtccacaaatcttcaaacgtttaattcgctgaattctcagagaattgatgagcatttaaacaaataatttggataaatattgcattaaaattattaaaaattaaattatttagccaaaggaaaagggctacaaattgctcaatcgttggaaaataagcgaccaaatttgtcgcataaaattcactttgattacatgaatcagttgaagattatgctggccaacaaatcggaaattgaaaaagtgcgaaacgcaacaattgatgccctcgggggagaatttgaaaaaggaaaagtatcgtaaacataaataatattaaatgaaaaactgattaaattacaacaggaaaatgatgcttattcaatttgcgcattaaatgcagcattagcaaaagccaaagaaatggtcgaacactcggaagaccaattggccgaagctgaacgcatttcgaaattgcaagagtaatgtggaaaacgatcaaaaagcatgacaaagtgccaaaaaggatgtaataaggtcaaaaaaatgaaaaacatttacacaatgccgtgggcattgtgccgcggttgcgcttcatcggtttggtgctttggcatttggccgttcggtagagtccgttgattgaccagcagcagcacgacggggcaccactgctggtgttcactgccaaaatgaggccaaacattgacccgcatgacccgacggaatggcaaacgatgctttggcaattcgaccaaaatttggcgaacgcagcgatggcgacggaaggccaaaaagaggcgaatgaaggggaaattgaggacggaaaaggggagggggaggaggagcaaaatgagggggaagaagaacgagatgtgtgccaataaatagagagtgcagagaaaaaaacatctctcattttggcgtactatttatttatctctgttaatagagaaaaactgaatttacttcgtgacgtttaacttttttcctgcacgttaaatccacaccaaattttgcatatcgatagagcaaagaattctgcatctttctatagtgaatgtaattttgtctatggtcaaactcaaaagttacaagtttggaacacccatatcttttttctgattcatcaaattgcttagcatttgcttagaaaaagtttctccttaccaagagctttcgaatgatattaagattgtacaatttggttggtaaaaacctccaaaaataattcccaaaaatggtcatttttttaattttttgcacaaaaataaataaaaatattcatgttgcacaacggactcgaaccaacaccctttgtccctttactatcttacaaaaaccactgagccacacatgcaaatctttttggaactgggaggccaaaattgaaacggtg

SEQ ID NO: 16331 - DNA, 1266 bp, Heterodera glycines
  unsure (1)..(1266): unsure at all n locations
ttatacctctacccaaattatnttggttattgtaataaaatattcttaaaaattatggcaaaattaaataaaaatttagtggtcaaataaaatataataaatgttttaataaatgctctactcaagtggtcactatatataaatttaaaaaaaacacttttatataaggggtgtttttctgacaaactgaaaaatgaattttctctttaaaatataaaaaaccatctaataatttgagcaaaatttgctaatgattgaatgtttaattgatcataaatagtttttatcgggaagcataagccatgaataattggattttccagggaatcccgagcttttctttttactaaaaaggtcttctgagttgagaatcctgaaaaagggaattgcacccatttttggaatcgcaaaacttaataacccaaaacatgggttcaaatttttcacaatttcgccttccaatcaaaaagaaaattttagcggtttaagaacaataaaaaaaatttggagtgatttatgcccttgattttcttgcttaaatacacgccaattttgtgcatgcacttaagttcaacccatggcacagtcacaatgccaaagtgcgtggtgccatctcagccagacaattatcacgggatttcgcaatgccctttattgaaagcagcttattcaaagctttatgattttattaaagggatatattttcttttgcctctccaatgcacttaagtctaacccacgacacaatgccaaagtgcgtggtgccagagatgccagacaattctcatgggattttgcaatgcactttattgaaagcagactattcagagctttatgattttattaaagggatatattttctttttcttctcaatgcacttaagtccaatgcacagtcacaatgtcaagccaagtttgtgccagacaatcattgaattttgtaaataccatccattttttttattcaaataatttaataaatattatttttactgggtgccaatattttttgctctaaacacagccggcggaccccgcccaagttcccaaaaagtttttttgtgaaaaggttctacaaaaagtgccgtgaaaagcaaagaataaatcttatggtgtttgatatgcttatttcttctacaaaaaatgttaaggtgataatggaggctgaaatataatatttgatcattttaactagagtgagcgtgaccgggacttaccaggtcagaaaggcgggaccaccgcgggactatcccagagaaaattttt

SEQ ID NO: 16332 - DNA, 1859 bp, Heterodera glycines
tcccccaaagtgcgcaggcagcaaaaaagaaagtgtatttcgtttatggtactcaggtcacagttacagctgtacataacggacgcggaattaatcttggagcaaccacgggagaaggtgttgaatcgaaacaatatttggagattgatacaaatgtgtggaacggaatgaatgacaatgatcagattgttttccatgttcgcacaccgcatagcgtggtaacaataaaattagaatgatcaaattactttagggggtgtattttctaaaaattttttggtcatttctttggggtacaaatttttttgtttttgcatttttgttaatgatttttctgaaaatccttcaattaggtaacaaaaataatgaaataggtataactaatagagtagaaaaactcccaaataggtaaggataggtattataaaattgggtccatgagctcaaaaccaacgtaaaaatggtttttttcccgcttatctacacgtattaaatgcgcaaacattttggtatttcctaaaaatcccaagccctattcattaaaaaaagacttgaggatttgcaaattggagaaatttagtaatcgaaggttgctcattgatatgaataggactttcaaagataattagagtggaattgcttacacaaaacagctatgaaaatcggaacttagctaaatttaaaaattttgtgaaagaattttatttatggtaattcatcccttttattttaattttatgtatttttactgtattgaccatatcatatttttctaattgtattcatttctttgttttccgctataagtgcaactatgttgccttgcggtttgctcaaataaataaataaataaataatttttttttgccaaaattataatacgaaaacccgttaacaaatagagccaaaatttcctggcgttgattgactccctaaaactcttttttcttaaaaacttcctcaaaaacggaaaattcattccaagtttttctttaaaaattagctcaaaatcgcaaaatttgtacctatttttaatcctgtttaaatcaagttaaatatattaaaatgattttcatttatctcatctcttttttttctcttttttatctaaaaattagaattaataatttatattgaaaaatttttcattaaccgaaacctaaaaccgagggtaccgattaacaatcggtggtgacctaccctttttaatgtctaaaaaatcatcggcttaaatttttgctaatttatctttttcagactaaatgtgacaaagctacagtacgcgaattacgtcaaactgatcaaccgaaagactttgctgatcaaacaatccgaacagtttaatgatgaagatgagtaggaagcaaaccagcagaagaacggctttatgtatttgacttcatcagatgtcattttcattgctttgttgatgccatttttggcttgttgaaaaaaaacattttttaaaattttttgtttttctgttatttcttgcagattttggggatcattactagagaatagagcttgcgcgaacgagattcccgcgtgaaaactcgggaatacgtttcccatcttttttcctggacgagattttttacgggaacaggaaaaaaggcgaaaagaccgtcccgctttttttcttttcccgttcagggaaaaaatttccttttaatggttgtcaattgattaaaaaacagaaaaatttcgaatttttttcggcagcgaattttttttgaaattttagaattaggtattaaaactgttaatgaaaatttgttgaattataaaaattttgttcgttattgtggcccgtcgcatttatttggcccgtgccatcgccgctgtcgccatcaatg

SEQ ID NO: 16333 - DNA, 3011 bp, Heterodera glycines
  unsure (1)..(3011): unsure at all n locations
agacaacagctgagccatactttcggatgcattcgtcgtaaaatccttaaaagtttatttattttttaattaatttttattttttgacaccaaccgtaaacttgtgtgatttgccgcgattcgtggttccctctaatcagcacgattcttcaaaagaaaatatttctgaactgctcgcaattttccaattgcctgtccgggtagcgaattttgagtgccaacagcagcagaaatgtctccacggagttgaagccgcggtccacaaagtcgccaaggaaaaggaaatttgtgtccggcacgtgaccagccactcgaaagagttcttttaggtcgtggaattggccatggatatcaccacaaatctaaaagacggaagtttgtttggtttgcattttaatgtgaaagtccagaaaaggagaaggggaccgtcacgggagcatcgattcgctgcacatttccctcctgaagaatgatttcgcgggccttcgaacacaacactttcacttcttgctccgtcagacactcacaacgcatcagcacttctatctgtctgcaaaacaaagaaatatttagtaaatgcgtgtcacttcgtccgtcctctcttaccggtcgatgtcggcgattcgcattccaatcccaccggcggcgacgcccaattcggtgngaatcgtggcacgaggcaaactgtcaccaatggcatcattttcgtttaccgaaacaatgtttgaactcatatgtgttggatttgatgacgctaaatccaaaactggatcagaatgacgtccatcttggtctgttccatttccattttcaatttgaatctaattaaattgcaagggaaaatatcgtgtccagacatttgcgacctgatatttgcgactatgtccaaaatcgggtcaaacttacattttttcaatcttagaggtcttaaacagcattgaatttaagaaaattcgttcttttgggttattaggaacaataattatgttgtttgaaagattaattattttttcaaaaatttgctgacgataaaactatcacataaaatcactttcaatcgcttatttaaagctgtttagtccattgaagatagaaaaaatgtaagtttgaacccaatcttggcattcaaacccggcattagttaattaactggatttcctatgattaggaattttatcaaacataaatatacttgttttccatttgaatgcattggcgtttttttacgacaatgattttataaatttttcgatcattaattttcctttttctgtgaaaatcacactcaaaaagtgtataaatatggccacttttcgagtcaaaaatcattccctccagttttttctcattttaatttttaaccatcaatttgtcttctaattgtgtcacacatttcatttagcgttcacacattttgccatctgtcaaccaatcatcatcgtcaacatcgtccgtcaacagttcaacaacaaaacgttcaaaatgtctgcggaatcgccaacaacatcacaacgccgtgctcgcagtcgcaagacgaagaaacgtgcggtcagcgctggcgagaccaaaccactgcgacgctcggcacggattgcggcacagaaagcggcgaaggaaaaggcagccaaagtgacgttttcggacagcattcctcctccgtcgtcactcattcatttccccttttttcagcagaaagctcgtgacggctccaccgcgtcaacgaagtctgctggtcgtggtcgtcctagtcgctcgccgaagaagtcaggcccgaagagtcgtcgctcgcccgccggtcgtggaggaggacgttctcagacgccgcgcaagaagaaacaaccgatgaagaaggcgccgggcccgagcagtcgcactcctggtcgacgcgtgaagaaaccgccaacgaagaaatcgcctgctcctcgccgtgcaaaaacctccaccaagaagcgcggacgtcctgccaagaaagcggaacaagccgaaccatcggacagcgggacagccgccgacagtgaccgcgacgacagcgaacgtgagttgaaacggggtgtgggaatggcacaattccaatttgtgtccattaattaaactgaattttcagattccgaagagagtgccactgagacgaagaagaagccaacccgcaagactgccggtggacgtgccaacaaacagacgaagtcgcgtgggcgcaaaacaaccaagaagacggaccaggaggaggagcgcgccgactccggatccgaggccgaagctgcaggctctccgcgcgacagtgaacgtgagttgaatgggggtggggaatggcacaattccaattgtataatcctaatgaaattgaattttcagattccgaagagagtgcctcggggacgaagaagaaaccaactcgcaagagcgcggctgctggacgttccacgaaacagaaggcgtcgcgcggaggacgtgcgggaaacaagaaggcgcaggaagaacgctctgaatcgccaactgaatcgggctctgatcgcgaggaggatgaagaatgaatgagccagccggagaagaatgctgcttcacgagaccaccgcgataataacactaacccccatttaaaaaaagagaaattgtatctctatatatgtatgtatatattgtatgtccatatccctgtggcattgtcttgctgaatgtaattctcccacaaatggttgttgttctatttaaatatgccatatatatgtgtattttttataattgtaatatgtttgccctgtttatgcatcttttatggtcatttattctcattgccgaataaatacatttatttatatgaatgagtacattttccatgtcatcaattagggagtccaaaaatatggatataaaatcgcgaaatatggccataaaatatggaccaaaatcgcaaaatatggaaataaatttnttcaaatttgctnaaatattgtaaaacttacaaaaaatggctaaatgtggtattaaaaccattttagaaaaaaaaaacatga

SEQ ID NO: 16334 - DNA, 2070 bp, Heterodera glycines
aataatcttttcaaaaagaaaagccgaaacggattctcacttaaatgtcgtttggcttttgtgtgcgtgcaatgagtttctggcaatgtcaatcagtcgcagcgcttctttgacatcgatcatttccacttcgtccgcgagacggagacgcgcaagagccgtacacatgcgaattgccgcctaattatgggacgtaaataaaatattcatgcgcaaggggtctcgagacaggtcaaaatttcgaatttctgttaacaaattgcaaagtcggattggtcgagaaaccctttgcgtatgtttgaaaaagggaaattgcacaagtaaaagacgaggggaagtgaaggtcgagtcgctgctgttcttcgcctcacagcgcatttcgacgtatttctccaccagcacttcttttagggcattgggcaccacgggttccttacgtttgcatatcgaaaggtactttctaaaaattgcaggaaataatagcgtttgattaatcatttgcctgaagagtttcatgttaattggttcgaaatcggcttgcggttgttcgcctttacggtgcacatatgttatatggtcggccaatttgcggtcggtttcgcgatcaggcacatcttggataagccatagcaggtcaaaacgagacaagagagcggccggaagttgaatgttctcttcaatcgacttgttggggttatagcgcccaaatgcgggatttgctgctgcaataatcgaagtgcgagcattaagcgaagtcattatgcccgccttggcaatcgaaattgtctgctgctccattaccttaaaaccaaaatgaagccaaagcaattgctctgacaacacttcgtgaattgcagtacggtctgaatccaccattttgtcaaattcgtcgatacaacagattccccgatccgccagcacaagtgccccaccctcgagtgacatttcgcctttattaaaaaccatttttgaattggtttgaaaagtttaattcaccagtcaactgatctttgaccactgctgccgtcagtccaacgccacttgaccccctcccagttgtgtactgacttcgaatggcaaggcgatcaacataagtcagaagttgtgacttcgccactccggggtcacccatcagcaaaatgtttaaggcccctaaaactcaatgtaacacggtaaaaataagtttaaaaaatctccaatttttagcatttgcggacccgataaaaataaaattagaaatttcttttgcagtgattaagcggataaaagggggttgatcacaaatcttgcctcaatttgccaaattctgaatcccggaccaaaaatcttaacaattgccaataaatcacctctaattttcattccatttgcgttcttgttaacaccaccaattaaagcgagaagcaaagacttctttacatcgctgagaccgtaaatttcgggcgcaatactgtaagctaaaagaaaaagaatgaatttgaaacacccaatggaaaccaaaacaataacataaagaagtattcaaatctgctaacattttgcttaccaatatgttcataaaaattctcatggctgactaattcgatttcctccgcgttcaactctccatccaaaagatcttcatttgtatcacgataatttttgacatgctaaaaaatttaatatgcaaaaataactataaaatgaaaacgtacataagcatcgagaaacagctcagtaacaagacctccagccatttgccgaaacccggtacgaagcattgggatgagaacgccgcaaatctcgacaacatcgccaggaatagcctttctcgtgttttccccactgagataaatggtcattgagcgagggatgctgccaactccgacttggtcactctaattttaagtgcggtgaaaaggatgcaagttagacaaagcaattaccaattcttgaatgcgcatttcttgaaacttcacaaatttagaaccgcggaattgcatctccaaacggccattccgctttgctttcaatggcattgtttgcttggacaattgtacagtggcgtataagacagtgaattcacctatc

SEQ ID NO: 16335 - DNA, 844 bp, Heterodera glycines
  unsure (1)..(844): unsure at all n locations
gtagttcgaatacaccnnncacgcaagataatcaactttccaancaaattgcgctttcaagtctcgaacagccaatggtttcgtcacatccatcgttttgaaataaagttcactaaaataaatatttttactacaccatgaagtttatattttatcacaaaaagtgaccattatcttttattaaaggtaccatacaatctgcgaaggagttcaggtggatatgccttagatgggtcatcttctcgggcattcatttcacctctggcaattttcaacattttgtccatataaaggcgttggaagataaatgcgtcaagcgcatcaataaccgcaggctggattagaaaagtaaattaaaatgtgaataatatcaaaacaaaacttcgttgttgccaattgtttcctggacaagattttgaacaatttcataaaagagttgtcgataacgcactgtattgaaagtaatccaatcggaaagttcggggtcatgaagatgcacctaaaaaggccaaatgggatgagcagtatttatacaatgttacatcatcttgttcaatgtagagagcaatttgctgtctgtgagcaatttgactaatctgatctcggtatttgaagactttgcagccttcttcgtcctcaatgtaaaattcgtgcaaaaaatctttgatccgttctttcacaaggtcataattgggttcagccgccatattataaatctaaagaagaaaaaaaataacaagcatatgccaaatgcccatgccaataagcaaattcgttttattcaaatttattttattttcataacaaacatttttcaaattcaaatttaacgcccttaaaatag

SEQ ID NO: 16336 - DNA, 2327 bp, Heterodera glycines
tttttgggaaaaaaaagcctttacaaaataatccccttggagaagggaggtggaaaacaagatttcaaaattttcaattttttttagtttaatctactcaaaccggttcagaattcaataaaaattacattcacggtgcgaaaaatggggtttgacaagtttattggggaaaaaaagactttacaaaataatacccctgggagaagggagtgggaaacatgatttcaaaattttcaattttttctagtttaatctactcaaaacggttcagaattcaataaaaataacattcccggtgcaaaaaatggggtttgacaagtttattggggaaaaaaagactttacaaaataatacccctgggagaagggagtgggaaacatgatttcaaaattttcaattttttctagtctaatctactcaaaacggttcagaattcaataaaaataacattcacggtgcgaaaaatggggtttgaaaagtttattttgaaaaaaagactttacaaaataatacccctgggacggggcggctcgtttcccccccgccgattcccccccgccgtttcccccccgccgtttcccccccgccgtttcccccccagccgtttcccccccgccgtttcccccccgaatcagttcccccccgcatcgtttcccccccgagaaaatttaaaaaaaaaaattgctaacttagaaatttttcaagaaaaaaatcttagaaagtttttttacaagaaaattctaagaaaaaagaaatttttgagaaatttttagcgatttttttgaaatttttttgaaaaatcttagtaattcaccataaaaatttctcaaaaaattttttttcttagaattttcttgtaaaaaactttctaagatttttttcttgaaaaatttctaagttagcaattttttttttttaattttctcgggggggaaacgattcgggggggaaacggcgggggggaaacggcgggggggaaacgaggtgccctcaaaaagtttgcctgccaatttttgaatatttttttcgtcgggacaccaattcttgatgattgccaatttggcattatgcaattttcgagtctgggacctagaacgatatttatatttacctaggagactattcaatattttgtccgtgttttagtcccggtcccgacctaccctattctatatgtaaatgaatacatagtggtgttaaaaattattggttttatctgattattagggatgcaacttttagtgatttaactattttttctgctcgattcttttgaagaaaggagctcaaaaaacgcatttctgcgttaaaatttttcgattcccgcccccggcgggggtgacgggggcggggtccgaaccctaatttcaacattttttggaaaattccttaacaaaaatgcaataaaaacaaaaaatacacccctaagaatcgaccaaaaaatttttttaaaatagaccactatgaattgaaaaattttttcaaaaattcttaccccaaatttgttttcttgacaaaatttttgatttaaaaaatgtcaatatttgctaagagaattttataaaggaaatgtagcacatttgcaactgcaatcagtgaataaaaattattttttgctcaatttttggctgaaaattatgtaactatttgccactatttcggaatttttctcactatttgtcactattttagttaactatttcgagatttttcatcactaaaagttacagccctactgatcatcccctcattttttaatccatttgaaataatatttatatttttttttcgtttaaccaaattaaaattttttcacagtccaaatttaattgtttttttccattctttcagctgtcaaaggcgaagatggaggagctgtacaagaaatacgaactgaagctggacgaaattcagcggggcatcgccgaacagctcacttacatgtgcgacggcaccattttcaattcacaaattttgaaatttcatttttttaaaaatgcttcagggaacaggtgtgcgtcggcgccgagcaccagggctcaacttaccattaccatcaggtgggtttatgtacagcacataaaacaactttttttggatgggtacagtaatgctgggatgtggccgaaatacagtaacaatgatattggaagacaattccaatttggcatatgcatttcacagcatttattctgcggccttttttccccgaaaaactcgctaaaggaaagggccggcggtgccagcgggcgccgccaggtgaaaaattgagaaatttggctatatttttaacagatttgcaccaaaaattgttcggctgtggtctt

SEQ ID NO: 16337 - DNA, 2822 bp, Heterodera glycines
  unsure (1)..(2822): unsure at all n locations
ggaggagagaagcgcattgggccctactccttggatgggtggattgaggcggaacgacgcgcaatgnaagtcaatggtaattgagttaattatttttcaccattattataaaatgggcaattntaaggctgcacgtggcatgggtgcaaaaagtgctacccaaacgacaacatgctgctccncagtgggaagactgcggggcaagtgcgcgaacgggattccaagcggatggaatttctgagagagaaggtcaaccgagtggacgtctactgggaatgcgaaatccatcggatgctggagaggagcaaggaaatgcgcaaggcatttgaagactatgtcgatgatggcccgctggtgatccgcgacgcgtttatgggagggctaactggaccgctgaagctgctgcgcaaggctggaccgggagagaaaatctcctattatgacttcacatcgctctacccgtacataaattgagcacagttaaatttgtaacaacttttaacattttttccttcacagttttaccacctgctaccccattggcactcccaaagtgcatgtgttgaaccaggaagtggagtggcgcagtgcagcggacaacccctaccctttggcattgctcaaagtgtgggttgtgcctccccgacgcgtcgacgtcccagttctacctgtgaaagttggagagcggctttgcttccccctgtgcatcacttgcgccaaagagcacccgacaggaggagtggacaacgactaccactgcgagcattccgacagacagcgggggtgggtgagcacgtgcacctccattgagctcaacgaggcgttggacgagggctacctcgtcacaaaggtcttccgtgtcctcgagtatgagcaaagtgacgacaagctcttccgcccgtacattgctgagtttatggcccagaagatccaggccagtggatttgacaacagtatcagaggcaatgcggagaaggaacaacagtttgtccgagagtgcgcagagcagtttgacatcaccatcgacccaaccaaaatggcggtcaacaaagggaagcggtccctggccaagctctgcttgaacaacttatgtgagttttgtcgtccattattattatattaaaaaaaatagggggacgattttcgcttaacaactttggtctcgctcaaacactcatcactgacgacccagcaactttggcggagtacctggacaacaaatccatcaaagtgacatcaatcgacgagttggacgagcagcacatactcatcacctatctgcagaagaaggattgggtggatgagcactcatgctcaaacattggtgagacacacacactcacaataaattgttaaagtacttcagtcatctctctatggaccacctcagcagcgcgcctcgttctgctcaaggcaatgcagaaggtggtcagatcaccgggctcggatctgttgtacactggtaagtcaaactacaaaaaaaaattttgtgcacaaacatttattttagacactgacagcctcatcctcgtccacccggaggagcggtgcccgttgaaaactggcccccacttgggccagttcaccgacgaataccccgaccacgacattgtggaattttgcagtggcggagcaaaacaagtgcattttcagttcatttttgtttacttttcaattttaccacgctttagtatggtctttgtctgcgacgcaagggcgcggaggcgggagcccaattggaacatgtgctaaaagtgcgcgggctgacgctaaattatgatgtgatcaacaatcaagggatgcgctatgaaaacttcaaagaggaggtggtccggtacgcgacaagtggtgaatacgagccgataatcatcaataccctaacttccttcgcctaaacatcagggagggaggtcgggtggtttccatgcctatgcaaaaatgctatcgcccatttgtgggaaagggaatcatcggggtcaatttcaatgtgctgaattttggacacacattgtaatttgtacattatctctctctcacacacacacacacacacatatgactgtttcttttgtacctcaagttgtgtacattttatgccattttattagtttttaataaaaatttgtgcattattagtgaatggaagatgcaattatgaaataattaagcattagaagatgtcatttttaggtagaaaaaagtgcataattaagctaaagaagacacaatttttgaaaaattaaggaatggaaaatgcaatttcaaattaatagatggaagtggtcattttaaggaagaaaaatgcataattagtgagcaaaaacaaaactaatataacggtacagtactctgtgagcattcattgcgtccgatgtcttcatccatgtctccctcaaatactaggcgcattgttgtgtcggatgagtttgacgacgattgtttgtcgtcaatttcagtgaaaagacggcccagccaatgctcgttgttgttgatgtccatgtccatgttgtcatcaatcagctcaagaagttccattggatagtgccggtcctcccctccccccgaaaagcgttcaattatgcacggtgcatacgggaagtgaagctttatgcggtgccgtgcataaaaatgtgccgccacattgatgttgaacgggttgcgcaattgcccatatgcaggaagaaatgcggcgccttgtgccgaaattccagtgacgaagaaagttttggtcatcccattacgatggttgtaggtggtgcgcactttgcgtccaatgatgttagaaagacaagcggccgatcctctgggtggtgagccggtcg

SEQ ID NO: 16338 - DNA, 2042 bp, Heterodera glycines
  unsure (1)..(2042): unsure at all n locations
taaaagttttncgtggcaataaaaaatcatattcaaaaagcgttggttacgtacaacatcgacaattttatgaaattttcttagcttataaaacttggtgaatactagagcaaataaaaccattttatgctcattttgaagggaaaattctggagaatattgtaaattttatttggtttggccttaaattgtggacttggctaaaaaagaattaaaattattgaaaatttcacctagttgaaaaatttttccctatgttcaaattttcttcaaattttgcctaggatagttttttgaccccatctatcgaattctcttttgttatttgaaagtttcttttctaactcgagattggctcttccatttttacaagggaaaatccccggaaaattttaagttttgcaaagttttggcgttctgattactaaataaataataaacttatttgtacttggagcccaaaattgaatcgccgtgtaaagcttttttttttgatatatttctatatttgtttgaaaaaattattcaatgatttcatcaaaatcttttttcaagtcatttactagaacatttttgggaaaggtaaaacattacaccttttttttgcgtgcgcttttttcataaactttttgagaacatgggcggggggggggggggtccgggggaaccggccacttcggcgcgggccatttcggcgccgattcaaataacttttttcattatcaaccaaattaaatatttttattatcattcgatagctcttgagatctctattagtagggctgggaattatatggaaatccatatttttttcctggactgtggaaggcctgaaacgcacgaaaaacatgtttttagcttggtttgaagcttctaggatggatttctatatccatattttccatatttttccatatttcgcgatttatgtccatatttccatatttttccatattttggcattttggtccatattttatgtccatattttggcatttttcaaaaaaacctctattagaacggcccccatcagctaaattagcctttttgagcccaaaaaccgaaaatttttcaaaaaatctttttttcgccaaaatttctcgagaatattgaataaatttaaattttcttaaaaattaataaatttatgtcaaaaataagcaaaaaagcgaaaatttcgcttttgtggttgattttgcgctaaaaaaattaataaattttatctttcatgtttttttttttctaaaatgattgcacagaattgccgaaaaaattcgagaccaatttccgaatgttgaccgactaccgtatatgctctaattatagcccagtctctattaataccgcagtctccaattatccccccccccctttctgaggagtttaaaaaataatcacccagtctccaatacggtaattgccaaaacgaaagccgtctttgtcaaagcgccttaccgagtcaaaaaatttggaaatatatctcatatgcaatttcaaccaataaatttgaagaaattttacactcaattttgaaaaatttatgtccatattttgacgtttttgccatttatgtccatattttgagattttcgcaattttatggccatatttcgcgattttatatccatatttttaccagccctatctattagcctgcaaaatttcaaaaaatttcatccgtttacaaaaaagttatggccaaaaaacctcaaaaattgactttttcttggctttttcggcgccgcgtgccataacttttttattgttgaatcattaatttctattttggcatgtaaatatagagcacacatagagctttcaaatgatgccagaatggctaaagttgactgacaaataaaaaagttatagcatttcaaaatttgcggcggcgccgaaatggtccgcgccgaagtggccggttcccaaaaaagataatgtttttctctggcactctctatttattggtacacatctcgttttttcggacggntgtgttaacaggtcttgcccanaatagctttatttcgagcggagtttttttt

SEQ ID NO: 16339 - DNA, 1309 bp, Heterodera glycines
taaattgcgaaaaacattttcccacttttttgttgaatttttgctgtttttggagcagtacacgcaacacaacaaaatcaaaatgtaaaaagtgactttggcgaacgcaaatttttcaattataattttttttccttattcctcggcatcattaaaatgaagcgcacccgattcttcactttttgcttacgacattaattttggcggaaggaaaagctcaattaaatggcggcacatgccaatgtaaaaaatccttttaatttaattggaatttcaagctgaacatggcgtttgatgttcgaaattgagatttctcgtactctcaaaaattttattggaaaaaatcttttttttttaattttgtaaaatatctgaatttatttttataaaattattagcccataaattattcagcgggctgttgttgttatgctgttgttcacagttccgttcggtgtgtcgacacgacggcacaaactgtgccggcgcacctgcacaattttgtggtgctcccaagcaacctgagcatgaatgaagccttggacaacaataaccaaagtccacagtttgagaaaacagtaacccaattacacacggacatccttgaaattggaccttcacactcgaaaattgtccttgaattcaaggtgtccttgaaaatgcacattcgaaaaaacatcaaaaatttaacagtttttgaaattttcgaccaaatttttagtaactaaaatctgcacttaaatcgcacaaaaatccaattattccgattcgaatgtcaaaggtgtctaaattaaaaatgaataccatttatggggcagcataaaaaccgatgtttgggtgtgtcttcatgaatttttttaattccgaaataatatggcattagttaatcatttttaaaacatccactatttgctcagtttggtcccattcgatattgttaatgtttggaatggcttttcctttgttgttcctctttgcttcgtcttaagcatttgaaacattgaattctttctaaatttgaactggctaaagaattgactggagaaaaattggctttagtgcactttatgagtccagtcaattaattttattcatggtttttatacaataactttaagtacaaaatctacaaaaatttaataatacgagaaaacaagagattgctaacaattcaagaaagttactacgaacataatcaacgttacttaattaatcaatcttttttggcaattcaaatacttttaaattcaaatacttttaaattcaaatactttttatcttatccgtcgtccttgtgcaaaaaaaagag

SEQ ID NO: 16340 - DNA, 2764 bp, Heterodera glycines
  unsure (1)..(2764): unsure at all n locations
aaagcaaaaaaaaaaaaattatttattgtttttaagcgatgtaaanaatgtgntctataatttagaaaacaaaaaatcctaaataaaccaattaacatattcgaaataaatttattttcatattttttaaccaagttagataaagtaaactttcttcaaattttaaagttttcctagaattccttaatattgttgagatctgtttctgccaaattaatttttttggtaagtatagggggctggtggttccgacaggctccgccggggaaatctcgtaaattttgcaacaatttgttaaacgctggtgcaccttaaaataaaaaaagaaacgcgagattttttggctgttttaaaaataaaagaaatttttgaatttttttgttagtaggtaaattttcagaattaaatttttaaaataattgtactttcgcttactttaagaaatatttaaaaaagaatatgaaaataattttattgtgtgggggtcgatccaaggcagaaatcaaagaaagactggctattttattttttgggttttatggtcaaatgatagattaaaatctatttatcttcacaaaaattttccttttttcccaattttcaaaacatatttctatataaatgaaattttatttattcaaaatttgggacttttccattttgccgaatcccttgaaaatgtcatcatcccggcaaagtaaagcttttttctagggtagttttaggcgctaatcaaaagtctggcgtcaaaaaattgcaaaaattagtgtgtttttatctatgatttcgccaaaaaactcagaaatatgtctaggattctttaaaaaatacaaaaaatgccctgagggccacggagcggcgcgcctttagcgagcatgcgattacggagcaaatagtggggcgcgcgagcgagcggagggttgcgagcgcctggttaaggtcgggtcgaaggcccaatctcaggcgcgagtaacccggagcgagtgagcggcgccgcacctacaggccacagtagtcgagagtacagtgctaatcaccagcttaatttgaaaagtgatccgcctcatccaatacaaaatttgtctgcgctataattttggtagagatatcgtagaatcctgaaattagtatcatttcggaccctcttgatgagaggatttttttaaattgaaatatcgacaaagtcatataatgaaaatccgagataatatcatagattttttctacagtattttggtgccaaattcttgattagcgccaaaattatgcttaaaagtgccttcctttgtggggtcatgatttttaggggagttcggcataaacggaaaaataccaaaaattgtttttaataaaggaattggaagagaaaaatgagaaaggcggagagaactgactctttgaagaatgttaatttattattaactattaatgatgctaattaaatgaaatattaagttttaataaaattgttttttatacctatttgtaatattagaatgtttctcatattataaaaaaaaatatttatttttattttataaaatggaaatgaaggattgtaataaaaaatgccaacgaataaagctaaacaaaatacaaaatcaataatggtgaaagcaaatgtattgcgtcaataagaaagtgacttttattacgtcagaaaaaataaaaaattatatttttttaatgtaatgctttataaattgactaataattagggatgcaatttttaggctttaaaaaccgcaaaaattggtaagctttaggtccgaaaaaacctcaaaaataggggctaaaaaatggaaaataggcactaaaacccctcaaatttagggggtaaaatgacaaatttattcaaaaagataacaaaattaagccaaaccagtattgagataaaataatttttattcacaaattcacaaattcttgtcgaaaaaataaaaataaattttgtggaagaatttatgagaaagtttttcatttcttaggggtgatatctctataattaattgtacattagatatttcttattttctgactgtctgattttgttagtgcctctgatcactctgatcaagtttaactccgccccttctcgtaattggcccatttcctagcgatcacctcaattcattcttagaaccgggatcacaattactcccgatccgctccccttccgtcctgtacggatcggggtccctttcccctttttactcattattagggatcggatttttagtgataaaaaatcccaaaataattaactaaatagtgagaaaaaaaattccaaaatagtggcaaaaatagtggcgaaaaagttccaaatttaggggtgtaattttttaaatagctgttttttaatttgaaaataatttaaaattaaggaaaaagattttattcactgattgcagttacaaaatattttcttagaaaataatttttaggtcgattcttaggggtgtatttttgaaaattttttaggtcgattcttggggtgtatttttcgtttttattgcattttttgggaaattttccaaaaaatgccaaaatagtggcaaaaataatgacgaaacgccaaaatagtggcaaaaaattattttagtggctaacttccgaaatagttttttttagtggcgaagctccaaaatagtgattcctagtgatgaatagtggcactaaaaacgaaaaattttcgaaaaagaatgtgtttttcgtgcatttctcgtcgagttaaagccgcagaaaaaatagttaaaaaactaag

SEQ ID NO: 16341 - DNA, 3679 bp, Heterodera glycines
aaatttgaagtaattataccctcaatttagaaaaatttatgtgcatatttttcaatttttatgtgaatattttgcgattttatgtgcatttttttggcggccctattaattactactgtccattaagaatgggaagtttaaaacggtgagaagcaagcgaaaactcttttaaaatggtccaacataaaaccatactacccgttttttaattgttcacatccaaccctacctcacgctaatttgactaattgattataagtcctatttggaataatttctcaaaaaaaaaaattgtaaatacggcgccgatttagtgtttgtgccgttggtgccgtttcagttgatgacagggttccattactgttaattatcattaagccggccatttgccgtttatccatgtcactcatcattgcaaagcgttcatggggaattgcctaaattaaaacttcctaagtcatcaagaaaattatttttaggaaagtttataaaaatagcaaaaaagctattattttttctgtttcaattctaaagaaataaattccaagaaattttttaagatattaaaaaaaagctaaaatttggtcaaaatatgcttctcagggataaatttaagaaaaaaaattttctttttatttgtgcacttttaaaaataattttttcgattattttggcgcttttttattttttattgatattttgactaattttcagaaaaccctgaaaacgataaatcaaaaacaatgaataagatggtgctatgtcattatttaaaaaccatcattatgtgcgttatttaaaaaaccatcaaaatgaaaatttttgcttataactttgctctaaaataaccaaattttaatccttgaaatcattcgatagaaataagtgttctttagaagcctgtaaaatttcaaaaaaatttattaactttaaaaaaagttatggcaaaaattgttcaaaaaccaaggttttttgagttcctcgagctataacttttttgaaacttaacgaaattttttgaaattttgcagactgatagagaacagttagtgctatcgaatgatatcaaaaattaaaaatttatgctttagagcaaaattataaataattattcgacaaaaattttcataattatggttttttaaacaacgccccgactccgcccaaataatatgacctgccaatggcctccacttcgctgattgcatttagccacccgactttttgcccgaaatcgtcgcttttgtcgtccttcatcggtcaaaaattcagccaattttgaagcatcttcgtccgactcggatgaacaggacgaggatgaatcagcagaagatgatgaagagtttttatgtttattatttgcaattttattattccttttgttatggtgttttttgcacattgcaacatccaacagcaaaagtgccacaattagcacaacagcgacagagaaaaggcagcaacgctttaattttaaaaaataaaaataaattttagctattttttcatttaataattaaattttccaaaaaaaaaaagtttaacaaagccactaggctagtaatgttcttgaaccccgaatatttaaatagccaggctttttgaattgggccaaccgagactcaaatccggaaaatgccttgttcctgattataagccttgttttagtgccagtataccggatggaaacagaattttcctaaaaatttggactcaaagtgatttaaaaaagattaaaaaccatagtacttaattttaaaacggattcttaaatgactcaccatttattttatttaaattaaaatggagataatgtttaaaataattatgattattttttcttgaatgattttgcgaacaactcaataggttttataaagaaattctgtattgaattttagttgcagtgattaaatttttgagtcttaatttttaaaaatgattttttaaatttgtttagctttcaaaaatgacgaaaaatgcaaccttttgcaatttaacattcatcaatttgtcattttaaatgtgaccaaatattcgaggaaaattaacatctattcaaatggaaaatgacaattaggttattaaattgattcagaattaatttgaaaacttttataatttttgatttaaatatttttttgctgagaataattaaaatcacgctaaaaatcacttgtaatttaatgataaaaaggtacaaagaataggaaaggttattcttttttttattattcttttataatacttcagattttaatctagcatctttaattgacgtaaatttcccatttttcggcattttattttttcaataaatgccaatgtctgcgataaattgaaaagcttctgtccccctccccagtaattctattattggcctgattttctttatttttatttttttggttttttaatgaagaaaattttaggcctaatttgctcattacatacaaacaaagtcaaatttatcatgtgaaattgggttgaataagcacagccacgcattagctgagtttataaagcaatttatttacaaatcactttaaaaaatgatttttacagaattcttataaatttttcatataaaaattgtttattcaaaattacatcgataaattaattctcttacaaaaatatagcatatatcatcaccgctaatacaattaatttataattaaaaataatattttagtttatttatataataaattatcattttatttgctattaagaaaatgtttaattttggttctgctgtaatttattttataattcttcaacatttctcattttcaatttcaaatgcaaattctttagtgagtttttgataattaattgctaaatcaattttaattaggcaaacgacaatttgctaattgcatttatgaaaggtcatcagaaaattcaaatcagtgaatattcaaagcaaaaatacgaagctcatcttggcattgtatattatatgagaacgaattggaaatgtgacaaaatttggaagaaatttgacgaatttgaactgaaacaatgccaaaaatatcgaaaatatttgaatattttgtatgaatttttgtacaaaaaatacatcggaattccttcagtgaagccgaaatttgcacttaaaaatgaaaaatttgaatttgatagtccaataattaatgtcattaattgccttgccaaaatttcgcagttttattttaattcaaaatggagtgatcactatgatcatatattaagcaatctgttcttttaccattttgatataatattattgaatgagaagagaatgaattacgaagaaaaatttgaaattgagccaaaaatgccagttaatgaaatgattttgaaattggcaatttacacagcaaatgaatgccaagaaagtgttgacgaaataattcaacaaaattttaaagaaaatatgaataaaatgctgaaaaatgcggaagaaaaggcaaaagaaggcttttcgtcatggagaaacaatgccgtaaattatgacaagcacaaaataattttgcgtttgaaattcgatgactcaaatacttgggttggcattcaattaaaataataattgattttcaaattaatgccaaattcagattgatgacgctttattttcggtgtttgtgcaaggaatggcaacaaattatgtgaaattttctgaacttgtaaagga

SEQ ID NO: 16342 - DNA, 2982 bp, Heterodera glycines
tttgtcagaattggcaaaaaactgcgattatttgctgactgaccgcttgcgatttgtaaatcggcgtcgcattctttgatgcgttgggcagcatcacgaactcgtgctgggtaaatgcagacggaggcacagcggacctaatgggacttggaaagcgtaatgttcggggtaaaatgccagttttcggccacaccttcgcgtcactttcggtcggactcagcgctctgtcgaccaaatttttcacccgttccggcgtgtcatcgccagacagtgtggtcaggtcgatgtacgaaatcaatcgttgcaaattggatttctaaaaaaataaacaaaattagaataaatccaatcggtgttttaggtatttacatatttcttaattatacctcattaataaaattttgtgcttccctatgaatacggtcaaagagctgctgacggttggtggagttcgcctctttttcgctgaaaatgaggtcgaatttgccgatttcatcaagcagtcgctccagatcagagtttagtgacatgaaaattattaagctactaattgcaaaattaaaaataccaagcatgagaatgtaggtaagtaatttaaaatgaacattcaattaaatcagggttcggatctgtccttatttataagatttgtccttatttggagggtccaaatcttacaaaataaaaatgtccttaatcgaataaattgtaaaaatatctgatttgaagcaattttgcgaaatgttcttatttttgaccataaaattttgcgggattaatcccgcgggatcccgtcccacaaagaattttgagttccaatcccgcagctggatccgcaaatttgaaatttccggtctctactaaatttatcaagccaaaaaatttaaaaatttgtgaaattggcatgatagcaattttaaatagaaaaaattttgcatatcgatagagaaaaaaatctgcatattgtaatacagccattttatgttttatacactttttcatgagatataaataaaacatgaaaatgcatttcttttcctctcattttgacatattattttcacatctctacatatcaaaaaacacaaatttgcaaacgctaacaatttttgttaaaatgatataaaaatgttaaaattttaatttcttattttattatctataaataaacatctgatttaacttatttgaagtgaattggaagctttgatctctgattatgaactagatcaaacataaagacactttgtttttcatttgagtgtgttggcgttttgttgtttacgccaattactttttggcaatttttttcgttttttaccgtccatgactgggactggagtgaattcatgttctctactgccaaccattgcatatttttttcccaaaagtgcgaattacctaatcatataatatgtaattaggcaatttgtattgaagcagtgttctcaaaatatttctgtcaactgaagcgccaacaacaaggtaattgtcgtcgcgtttggcgccggcattgccgtttggtgagtcgtctgatcccctttcatttaattaatttctaatgccatttttccatatttaggtatttgcgtaagatgatgcgtaagcgagaggaggaagaggaacaggaggatgaggcgccgccgggggacgaggccccgcccccgcggaggacgaggaggacgcggaaaatgacggcgggccgggcccgcagcaggcgcagccccagaaaaaacctttgccggattttttcgttcaggaggaccctcgagacggtgccaattagcggcgacgaaaaacttatttctccatttttggacaaaaagctgtaaacaaatcgaattaaacattacaaatgtttcccggtggcgcctattggcgccgccggatcaccccccctgtcccacaaaatttttgaagaagcgcgccgcaaaaaaagcgtttttaaagcagaaaaaaattcaatttaagtatcaaaattattagttacatagcctattccaaaaaacttttaagaagatattttcttgataagaagccccgaaaacccccgggttggtcttttcatgatagaaaaataattttgggtgggacccagattctccaatatacgaattcattgatacagttattcttttctttaagttatgtggagaaaaattgctggctattgtgggttgttgtcgtctcgtttggcgccggcattgccgtttggtgagtcgtctgatcccctttcatttaattaatttctaatgccatttttccatatttagttatttggccaaaatgatgcgtgggcgagaggaggaggacaataatgcggagggccggaggaggacaataatgcggagggccggaggacaacaataatgacggagggccggaggaggtggacaatgacgacggagggccaggccagcaacagcagcaaccgaaaaagaaaccgcttgctgacttcatcaccaataattaattaacggacgattggctttttgttcctgcacatttattcaacctgttctattgaatttaggctttcatcaaaaattttttggaaaaataaaatatgaaatctaaaaatcgaagattttttctggtactataaaggtcgcccgaaaaacgcaaaacaacaaagttttaattttttgctttttgttcggggttcgaattctattcatgtcagtgactagcgttccctatacacaccgagtcaaaatacgagacatgtgtcaataaagagagagcactatgggtacgcgccagtgtcagacaaaattgctcataacgccaaatagcgcatttggcgtaaatttttgcgcgctatttcaaaatttacactggtatatgccttttttgcactgtttattttgatcagccataactcgcttcatacccaatcaaactaaacaaatttggtatctaagaaaagatttttaccaggagaatcttttcctaagcgaatgttaagtaatttgtcatctc

SEQ ID NO: 16343 - DNA, 967 bp, Heterodera glycines
tttcagtacaccaacttaacttcatccacgcacttttgcttttatctgtcttctatttggcttttccctctcgcactgttgaagcaagctttcagtcaagacgaccttcttttttgccatctaaaccctgtgatataccgtgccataatggtggcacttgtatggatgggacttgccgttgtcctcatggctggggcggtccgcaatgtgagaattgtgttgggagagtgaggtgaactcttccacttaaaactccactttttgtattttaagaagggttgtatcatcttcacaaccgaacgggtcaatttctgatggaccgaataattacggggcttctgcccgctgcatttgggtggttgagaatgagaaaaccaaggacggtgcactgttgttcaaactggacgacttctttgccgaatgctgttgggacatgctttatatttacgacggaaggggcgtttatggcgacctattgggcgtattcaggtaacgttttccaagttttctgtttattagttaattataattctgtgtttaaaaaattaaaaattttcaaatttcactttcgttcgaattcggtccggggtttgaaagaggccaaaacaaatgccatatttatgatcagcgacccaaaaacctttagaaatatcttttaatgacttaacaaaaaaaaaattgtatgccgaaaaaaggtgaaaaaattttcaaaatagtccactttgcaagtaacgcagaaaaagatatcaatttcttagatctttttatgaaaacattaattgaaattagcaatcttttccaattactgaagtttgttgatgtgattctttatttagtggcagtttgtcaggacgtgaaattctggccaactcgggcgaagcaaattgtttattttgccagtgatttggcatttaatttacccgggtttaacattactttatgcggtggacatgccttcaaaattgca

SEQ ID NO: 16344 - DNA, 888 bp, Heterodera glycines
  unsure (1)..(888): unsure at all n locations
tttttttttctttttataaggttattggagtgggtgaacattgaaaatcttacgcatgataccaccattgttgggtttggttgacaatgaaaaaataccttgctttacccctcggaggggcctctgattacgctgataaaattttgctcattttcagtttgcaaaaggccagtaaaaatatacagcaaagagtttgaggcaattgcacgttatgggcacagtgcgtttgtgagcggtgggaatatgttcatcgtcggaggattcaatggggagatgctcaacgacgtgctgttgttcacaccgggtgcccagctaaattcacttttgtaaatgctgttgcgttgtttagccaattgtgacagtcaggccaccaatgcggaggaatgtttgcgattgtccaacggcgtgcgctgtgttttccacaacaaatcgtgcaccaaaactctgcccaattcgtccttcaggcagtcctttctctcaattgccaagggcgaaacggcgatggtctcttaccaagaacactgtacagggactgccatgggagacaagtaaagacaagactggttgattacacacttgaaaagtcgtatcatttcagagatgccgtcgaattgcgcacctgcactttgttgaccgactgcaacaattgtctgcttcaaaagggctgcggttggtgcgagagcagtcaggtgaaagatgggaagggtgatttatttcttaatgaccgacaattaggcccgtatctaatggagcgaagcatggatcagtgacataatcagttttttttactgacaatgagaaaagctttcttttgtcctgtgacaactctgttttcttgagagttgcctcggttcctacgcccaattgtgcgacctgcagnnngcatgc

SEQ ID NO: 16345 - DNA, 1926 bp, Heterodera glycines
ttgcataaaaaaaaatgttcgaattcggactcgggattcgaaataggagcgaaatggatgtttggcatatatccgaccaattcagtcctaaacaggcattcacgcgaaaacgtcctgccccgattcttttgaggtgcatttgataatttgtgagtcaaaatttgattatccaaaaaatgggtgagaataattaaattaaattttttaatttagcctattgcccagatcaaaacccacactttgatttaaaactactgagaatcgggaagcaaattagccataaaatttgccgaggcttttgcaaaatcctagctcgggattcaagacagaaccctgagagtatgtgaaaaccacagaacgactaaccaaaaaattaaatgttcattgccaaataaagagaatggttttattaggatgtgtaggcaaaataaaaatgtgaaaaacgatgctcgcattctgcatctcacccaccgttaaacgacatcaataacaattttgttccccaaaatgatctcaatttagtcaatgccaaatgtaacggagcagctcagtgggccggcacggttgggccccagcatgcttttccactatagcttttgtctttgtcatccaaatccaacaatcttggtatcattcgaaagctcttcacatgctctattagccttacaaaaagtgaaaagattttcaagcttatgaaaaatttatgaagaaaaaacttgaaaagtttcgacttttcgcaatgtgaaccccaaaaaacataccaattttctcgctggtatttcccgaagctaggtgtggcctttatttgctattctttcattttgttaatttatgaattatgattaaattctataaatttgaataaaaatggtaaaattttggtgataagtacatatatttctgaaggttttttcaatcaatccgagtcttgtacaacaactatttcgaaaactgccctcgtagaaaacgatgctgaccgttaagtgtcgggaaagacgtcttaaactttcaaaaacccaacatttttgatgctaccaacaggaccttttataactaaaattgataaaaattgtcaaaagtttttatgtatacatatatttttgtttttcgaaatgtttttgatcagctaatggccattttccaatggtccgaaaagtctcaaatggcggtccataaagcccctgtaccgtaaaaactgagcttttcttataaacaaagaaaattctgacttagcctcgaaatttaattcagattttacccggttcaaaatccaaagaaaatcggcaatattgaatttacagtttgtattttatttattgtgttaatcttttttaacctttcacgttcgcgtacaaacctttataattgttttgttcggaatctgtataccctggagttgaatgacatttaggaaaaacaaaaataacattaatgtttaaaactccaatataaaaatttggtattcagattttaatttcagttttcctatgaaaacctctgtttgtttttatagcttaaatgttgttcttaaaagttattcaaaaaacaaaattttgaagcctcgtatcttttttctaactcatcaaattgcttagcatttgcttagaaaatgcttcgcctcatcaaaggctttcgaatgatattgtccaatttgattggcaaaaagatcaaaaaaataatttccgaaattagtatttttttaattttttggacaaaaataaataaaaatattcatgtgcacaatggactcgaacctccttcctttgtccctttactatcttacaaaaaccactgagccacacatgcaaatctttattgttaaaggagctcatttctgggaaggtgtgtatatcaggggctgacttgtctcagaaaagacgagagcgagagttcggcgagaggcgagagtccccaaaaacacgagag

SEQ ID NO: 16346 - DNA, 929 bp, Heterodera glycines
  unsure (1)..(929): unsure at all n locations
atcaaattgcttagcatttgcttagaaaatgcttctcctcatcaaaggcttcgaatgatattgtccaatttgattgcaaaaaagatcaaaaaaaattatttccgaaattagtatttttttaattttttggacaaaaataaataaaaaatattcatgtgcacaacggactcgaacctccttcctttgtccctttactatcttgcaaaaaccactgagccacacatgcaaatctttattgttaaaggagctcatttctgggaaggtgtgtatatcaggggctgacttgtctcagaaaagacgagagcgagagttcggcgagagtcccccaaaagacgagagcgagagttcggcgagagtcccccaaaagacgagagcgagagttcggcgagaggcgagagtccccaaaaacacgagaggtcccaaaaatggtgagagttgtcccacccctggtatatatatacacaccgtttcaaaaaacgagatgtgtaccaataaatagagagtgccagagaaaaacattatctttttttctctaattttttgtctccttttggcgtactatttaatatttttattattaggaaaaacaacatttatttcgtgacgtttaacttttttcctgcacgttaaatccacaccaaattttgtatatcgatagagaaaaaaataatacattcagtaatacagccattttttggcttatacattatttcatgagttattagaaaaacaaattttcgaagcctcatatcttttttcaaactcatcaaatcgcttagcatttgcttagaaaaagcttctcattatcaagagctttcgaaagataccaagattatccaatttggttggcaaaaaccttcaaaaataattcccaaatatcgtgattttttaatattttgtacaaaaataaatgnnnnttttcttgttgc

SEQ ID NO: 16347 - DNA, 3043 bp, Heterodera glycines
  unsure (1)..(3043): unsure at all n locations
ttttatgtaagaaaatttgcgaatttatgtaaataaaaatatgtataaaaaatgctaaaatatgtatgaaatatgtacaaaaatcctcaaatatgtaggaaaatatgtaaataaaattttttttaatggttattttttggaaaaaaattcttcgtaaaaagtgaaataggcacaaaatgccataaaaatgaccaaaataggcttagatcatcttttaataaatttaaaattaatttttgataaatcattttttgaaaaaatcgattttttagggatacattttcaaaaaatttttttttaatttttacaaaaaatttctataaattctcaaaaatcctcaaaatatgtaaaaaaatgaaaaatatgtacgaaaaattgcgaaatatgtacgaaaaagtccaaaatatgtataaaaatatgcgtgataaatttcttttacccatagaacaacaaagaatatattaaaagctataaaatgaattttattgaaacaatgggatgtataacctaaaaaaatatttgatacgttcgatgcagaatttttttctctatcgatatgcaaaatttggtgtgtatttaacgtgcaggaaaaaagttaaacgtcacgaagtaaatgttgtttttcctaataatgaaaatattagatagtatgccaaaaggagagaaaagttagagaaaaaaagtttctctgcactctctctttattgacacatgtctcgttttttgactcggtgtgtgtgtattaacgaagttaggaaaaagttatgacctaaaaaagcaagaatagtcactgattggacgcgtaaactggaatagagccgattttttgttaaaaacatgaataaagaactgaagggacagcttttagtagagacaggacaagagggtcggtcgaaacggtttcggttaaaaaccgaaaccgacaaaaccgaagaaaaattnttcggttttttcgaatttgtttatttattttccaaaaagcaataaactcagggatggtatccgtccttgaatggcaaggacgtccttgaaaatgagcatttggaaaagtttaaaaaaaatcaaagaaatttgagaaatctttgtaattttcaacaatattttgattaaattatggcattatgtaatttaaaaatgtaatttttgagaatttttgaaattttatggcattaagtcactatttttcttaaaaaattagccaaaaatcgcaaacttggaagccgacattgggcgataccaaccctgaataaaccattcgcgccctttgttgaccttttttaaaattttgaggcgtaggcccaaaacagaaaagtaccctctgcttattcgtagtttttggctaatttaaaaaagccagattaaattaaagaataattttaaaattaaatcacaacttacgacaaaagtgtgctaattgtagaaaaaatgaacagacggtaagcaatttttaaaaaaattaaaattttaatttacccaaatttttttttcatctttcagttggatttgtggcgacgtttggatggacattctgccatcttttgaccgtccccaactcggactcaaaatggcattgctttccgaccgtttcgatgttttggtggacaaacatttcgatggaaaaagcgaattgacaatttggaggatgatcagagttggcaaggacgaaggaccaaaagcgaaactgtctgtacagatcgatgacaaatttgtggattttcctctgccggaccgtccgctgccccacaaaattcgttttaaggatcttcggataaagcaattttatacttttatatgttttaaagcatattttatattttatcaggtatattgaccattccgtcattgaatttatccgtgtcaacaaacaaatttgggacataagtggcaccaatttggggttgtctattgcgtatattcaacaaatttgggatgtttttgtccgagaaatttggcccgtttttgcaacaaacattcgccatttgggctttcgcagtggcaacgatttggacaatttgtgtcgtctcatttcaccgacaattctcaccgatctcaatcatctgaattcaatcggtttcaattatctgttgcccgacgtaattgctgacgatgggccaaatgcaacttctgctggccaagcattgttcaaatggttgcatgcgccgaccaccgatggacggccgaaggaattgaattgtaatggttatttggtttcacaggatctcgaatggatcaacaatttcaaagaggtggtccttgcccggtgctatgtcattataaaaatccatcaaaaagggaatcgcccattttggtgcagaacgacatatcatttttatttaccaaccaaattaaatattttgcaggccaatagaggaagggtaataataccgatgttagcccctttttcgaagaagaaaatttttgaaatttttttcgagaaaaaattatttttgtggttttagggtcggagaatccgaatctatcattaatttcgacccatgtcgaatcctgaactcgggttcgcgcaaaaattcgaattttttatttttggtctaaaatggctggaaacaaactaaaattggacaattcactaataaaaaatcatttaaactttttgtttagtcatttctccgtgccaccacttcggtcagttacaatgtgcgaattactttttataagacaacaacgccaattgagccatttgaattggtgaatgaacggaccaatgagaaactgacatttatgaagaaagatggcggtggtgaattgcttaatgcttggctgttgaaacggtgcccaattattgttggggagagggcggcggcggttcaaaaagacgacaatttggaccatttgaacggagttcacttcagtctttatggtgattgcattgggtgagcagcagcaaagaaggcgccttacttttgtataaaatacggtgctgacgacagtttgctctgtacagtacatactttcccagcaattttggcagggccagcaaaacagacatgaaaagtggggggggggggtaaaccganaatttttg

SEQ ID NO: 16348 - DNA, 1162 bp, Heterodera glycines
  unsure (1)..(1162): unsure at all n locations
cattagcaattcgtttgtgcttactaatgnacgaaaaagaaaaattggcagaaaaatatttgccaaaattcgtattcgcattgaaaatgtgcacaacaaacactgggtaaaaaggcgtgtttcattttttattcattaagaatntaatctaatatataatatatatttatacaaggaaattaaaacaaaaagaaatatttggataaatatttgtaaaatgcacttaattaagttttaccaaattctatttcatcgaatacaaaatcaaaattgcacaacaatctgttaagattaatttaccaaattggaatttgccttataatgtttatatgaaaaatgaaaaggaattaaaaatggataaagctgaaagtaaatttgaaagtatttaatagttcattaatattattttttaatagacaaagagattgtgaaaaaattgagtgaattaatggaattgatcaaactgaaaagggtagagaaaggtaataatcttaaatttaataaaaaattttaaataatattgtttttttttaatagtgaaaggactcaaagaaaaatttgttgaattattggaaaaagatgaaggtaattttgaataaaagtcaacaattttttaaagtattatttttataatagtggaaaagctcatggaaaagctactggaattgaaaaaattgcaagtggaaaaagccatgggtaattttaaattattattatttaattaattaattttataaattatttctctaatagtcgaagagctcttaaaagaattgaagaatgtttataaagtataaaaatgtgaagagaaaggaaaacatcaaggccggaagaaaagcagaaaaaaggaacaaaaacaaaaaagaattttctcccattatccaacatttcttttttcactttatctaaaacgatgtaaaaaattttgcacatttatttttgaaccaaattcttcgtattgttattaggctggacacaaattcgacaaattcatctgttttatgtccatgattttcatgcgtatacaaatttatttcagttctttatccatcaaaaaaaacttcggtttccaaaaactttcatttcgcctactaagcgtaagctcgaacttgagcccgtaggaaatcaagattttcatgagagaatatatgaaaaactccgc

SEQ ID NO: 16349 - DNA, 2476 bp, Heterodera glycines
tctcatgcaaccgttgcaattcggtatgaacggcatgtatgcgccagtcgcttggcctcagcaaccgatgatggcttatccaccaccaaattttcaaatgttttgtccgccaaattttgttccgcaaatgccggttcaaaattttgtgccatttatgaataatttggcaccaaatgcatttcaaccaaaattcctcaaaacgcaattcaaccaatgagagctcagccaacaaatgttgtgcagcaacagcaaaatccgccgccgacaaatcaggcgatggcacaacacaaccctcagcaggaggtgatccggcaaccaacagggctaagtggcattgaatatgctatgatcctggacaggctgcacgacattaaaggaaacgagggaagtgattcgatcctcaactttttcaaaaaattttcacaatatacgagtgaatggccaaacaaaaagctaatcgaatcattagaagccaaattgagtggccgagccgaacgtgcctacaatgctgctttagcgacagagccgttcgcgtacgaaaacatcaaacgaaacattttgcagcagttggaagaaacggattgtagggagatgagtgcttttgacgacctcatgaacggtgtgtacagaaaatcgggggagaacttagacgatttggcaaatcggatttcgaatttggtgcgtagagcgtacccgggattaacccaaaatttgtccgatgattactccataaagcatctgatacggagcttaaacaaccccgagctcgctctaagtttggagttgcatcgccgatccgagatgagcttcgacgagtttgtggctttgacttcacgagccgagacaacacaaagggcagcgaaaagggcaaacacagagcgattcaagccaaataatggaagaattttccaacaaccacaacagagcgggcgtgattttggaagtggttttaagtcaccaattacccaaagccccgtggtttgctataattgcaatgaacctgggcatgtgtcacgtaattgcaataaagcattccacccaaatcgtggcgaatcatcaactcccgcccaacaaaatcaacaatgggcacaaaattctgctgcaaccggtgcaaaccgtgtctttttgaattcaaaaaacggaacatctccagtggttcggtctcaaaattttctgaagcaaaattgcatcagaatggaggaagaagtgagaactgatgctactgttggtggcgtcatgcttgaaaggaaagtaattgatttttttaaaaattaatacagcaaaggccaaacagaaccagagccaacggaggaaaagccgattatggggaaaatggtaacggtggaacttgttattttggagacaccaacaactgcaatgttggacggtggagctcaaatttctttgatcggcggcaaattcttttatgatttggtcacgagtggaaagttaaagactatgaaaagtggttttaaacgcgtttcaacgcggatctctgatgttaatggtaaagagttggagtgctttggagtgattactcttccagtctttagtaaagggtgcattacaacaaacatttgctttcacatcaccagcgcaccatttgggtatgatttgctcattggtacgaatgcgctccgttcattgggcttttgtcttttcgacatccctaacaaggaaatgatcaattttgagtaaattcacccgaaaaaggaaaagtctgttggaattctttatcaaacgactctcaaaccgttatcaatgaaactggtaacattgtccagttgaaaatccaatggaacgaccaagaagtaattgtcacatcgtcgaatgagaaaagtttgcatagatttgagcccaactgttggaaaaataaccgccagggaaaataaccgttcccaattgtgaattcatcaattgaattcgtacaagttggcgaaaaagaaatatttgtcgaattgtttccggcaaatctttttgctgaggcggacgattcgcttgggtcgcccattgttagtgaacaaccttaaattggtatcgaaaatgaatgaagttaagtgccaaagcgtggcaattctcgaatgtttgaaaagtcagccaaaagacatgtctgatcgagagtttttacctctcggacaattgataagcgaatttgacaacattttcgcaattcatgaggaggaattgacacagacggatatggtcgaacattccattgacactggaaatgcaaaaccgattaaggcaaagcgatagacctgtcccgtatgcttaccgagaaaaagtcgccacgatgatcgaagattatctcggaagaggtttgatcgggccatcgttttcaccctgggcatcaccctattgtaatcgtcccgaaaagggatggaactcttcgcttttgcgttgattatagagggctgaattctgtaacggttaaggatgcttttcccttcccaaccatcgatacctcttctgttag

SEQ ID NO: 16350 - DNA, 2495 bp, Heterodera glycines
atcccatttttgagccaattgcgtagggcggactctcatggggcgagcagttaaaattgggtttctctccagggagaagaagttcaaacttggcacgggcaatgtcctcgtggtcggatacgacgccagccatgccccaagggcgaccacggaagaattgtcgatgatgcgcaggaagggcattcaggcgacatcgatggagccggacgtgataggggtcagttacgacaaattaaacaattaaccgggggagtgactgttccggcaatttattttctgtaaaacgcttcccctttcttttctagttttgcgccaattacctgaaggagccgaacaatttctgtggcgattatttctttcagcctgcaaagcaggacatttgccatccggaacatttcaaggcgaaagttctgtggatgctgcgcaagttaaaagccaatcgtgaacgcccgccttcactaatcgtattaaataaaagagggactgattacaaattgcttattaaatttgttttaagttcattattcgcgatggactggacgaaggcaaagtggacaatgtgaggacgggagaaattccccctctttttgtaaatgaaagttgcattttgtattgttttctcacaggcgttgtccagtgagattgggctgtttcgcgaaagctgttctcagatcagccaatcgtggaagccgaaatttgtttattgtttggcggacaaacgacacaacagacgctttttcgaggtcgaggaacggctgccggacgcggcccagccgcgcaatgtgtgcaacccgcaaccgggctccgcggtcgatcgcaagttgacccgttcgggtgttctcaacctctacgttcaagcccatcatcccgtacgcgtaagtgaataaaatggctagaagttgcaaaaaacaatttgtttaggggacagcgaagattcccgagtttattttcccatgtaacgaagtgtgtgctaccaaggaggagttggaggcatttatcaacggactctgtcactcatggcaaattgtgaaggcggcgacgtcactgccggtccccgtttaccaggcccacgaacttgcgaagcgtggaaggtccaattacatggagctgaggaggtattcttcccgaaaaaaccaaattgacccctctcaaaaagaatggcgcccgaacgaattccacggagtgctgacggacaagtgatgtgcgaacaattatccgagttgctctcttacaacgacagtcctctcagtgaaacgcgaacaacggcttaatccaaaaatcagataatgaaactgatggactaatattataaaagcagtaacaattttaaataacaacaacatcgaaaaagaaaaagtaaacggagggacaaatcatttattattggagaattggcagaatttggaaattgaaatacactcatttataagctaaataatttattttgtggtcatctcacgcctcattaccattcccagttcctttcaccattccctttcctttgaccgattctgtcttattgtacctgatccctttgtctttatttatttaacagccaaatgttattctttttttacttgtcatgcgcgtaatgatttcattacacctccaacagtgattgattatctccaacccttcaaactaatcacatcgtttcaccattgtacctttgcagaggccatttactgataaaagtgaaaaggaccagatttgcttgcatattctatcagttaaaaagggggcagcgttctgaaatttggcattgaattaatgagggggtttgttattttggacttatgacgagaggttttgaggcttctgatagcgagcttgacctgaattccaatattcaaattcggacagagtaaattttaaaatttaattttaggaccaaacaattatatgtgtgaaaattcgtcataaaatatacaatttcagggatgggtaatttctagagatcgacctggatccaggtcccgaggagcctggatttttcctggacctggatttttgtccaggtccaggcttttttcaaaatgtcgatctctagtaatttctaatgttgaatataaaagggaaattttaatttcaatttttcggctttatgttcgattcggttcctgggttcggaaaatccattcgtttgccatcgagtaatacgccaattgaccccatcccctcaaattaacgccacaaatttataaagtgaatcaaatatgcaaaatgagatctgtgacagcaatgtgaagagaaaacttctgctggcgaattaagcaagaaaatggtcacgaaggcgtggaaatttgaaaatatcgaatgttccattccaaaggcagaagacatcacgacggtgccgacacagctaaaagaagtctttcaccgcttccaacaactgcccatcgtaagcatccttaaaacgagggattaaaatgtcccaattagtgatcattaatgtttcgaccaatttgaaacaaatgttacgaatgcttcttctg

SEQ ID NO: 16351 - DNA, 1666 bp, Heterodera glycines
caacaattgaatacggtagcatacagtgaagggaggagggggagcacgattttcttttaatttttttgaaaaaactaagaactcttcattaaattttgaaaaaatcgctggaaattttttgaaaaatttttttcattgaattttctaagaaaaattttctaagaaaaatttttctaagagtttttcgtgaaaaatttctgtttgaaaatttttttttaaatttatttcggctgtgttttgtcctgttccggggatgtacttggatacggtcgcatactgtgacgggaagaggagggagcacttttatggaagcagttcattcccccccccccaccttccgccattcctgatttcgatttttgccgaaaattttacgaaattgacccgtaccttccttgtccacctatgacgggggagggagggtaaatataatgcaccatttttatatgataacctacagtgaaagagggagggaaaggggcgtgtaacttgaatacggtagcatacagtgaggcgcgagggcggtgcaaattttttatatttatacaaaaataatttgttgaaggcggtcactcatcagcagcagcagaaccaacaactttatgacgaaacgcttgtcagggagtttggccaaatttttatgtgcccccgggagttggttgaacttcaccggcttggccggtccgcgtttgcccgtgttgcggtcgggctgtacgtcaggcagcacatgggccaatgtgttgagcagatcaagcgcgtgtcgtttggtgccacgccgtacacaatgtacggccaggtgttgaccacggtgctccattttgagcatgcccaccagtgcaccatcaatgcgctgcatttcttcggacagcaaagcaaaattgactttatcaagcggcatctgttcaacaaacacatcaccagcgagcagcagggaaaagcggttcgaatgcgaatttcatatttggttatgaatggaatggctttcccgggtgccgattggcaccgtcgtgaagcatttaaatttttaatttgttgccagaatatgcccacaaaaatgtgccacttttgtttgggacaggaattcatttacattcttccctttaaaatctattttttgaaaatgtcattttgttttttaaagcttgcgcctatgcaaatcaaatttggtccaccaaccgctgattatgtcaggcgcaagagtcagcaattgcgcgacgaactcaaaaagtgaacacaaaaccaattggaaaatggtccaaaactttgctatgagagagacatttttattattcattatcaatttgttgattttattttttcattgttgttccattttatgtgaaataaataaatgtgcctaaatgaaatgtacataaatttttccttttatgggtgtaaggtattccaaaagtcttcaaattcgttaagctaaaggtctcgaaataccctaatatgatgtgaaaaatcattttggaagaaaaattatcaaaataattttatactgtacattaaaatatgacgattcgtgtaaactaaaaccgatgatagaattagcatcatattcttcatacaataatgttaaatttgcaatatattttgaattcgtttgtatgtttacagataatacaaggaaatatttaatcgttttatctttgttatatttaat

SEQ ID NO: 16352 - DNA, 1653 bp, Heterodera glycines
ttgattggaaaaatagggaaaccaataaaattttcaacattttaaaaatgatttaaatggttgtatcagttgcaatcgttctgtttttatccaaaaagtaaatagagtccgcttcacccatcacaataagtgtaattccaccatcgggtactggttttttgaattttatgtttacagctgtacatccctttttgatcagatcgaataaaccgccatgatcgtctccgctgtttgtcatattaaacacataaatacagtgagtgtgcaaaaatgaaaagtaatcaattccatttccatatgtagagttggcaaaaccaagcgcctcctgcatgtcattgtagggacgaacaaatttccaattttcatagtcaatgtcatacggggcctggggataagagcgaccattggccacaacactcaactcccgtacgttaaagtgttgaaagttgaacgggctccttttggtgttccccacataatctgaatttgcgacaagtcccattgttacgcggcgtggaacttggaccatgaacaagtttgcattaaattcatagcgtccagggcttatgaacagtgctttcatcattgtctttcgtacagcataccgtgctggtttcatttccaattttttcgccaactcaagagccaaaccatccataagactgacttttttgcagtaaagtttcaatccaacaagctcaatattatatggctgaccggggggtctaaggtgtcaattaacaaaaaattgtcgtcatggggttgtattgttatgtcaatttcacaatgattaatcaaatattggggtacattgaaaagatcggcatcgatttttgcaatgtattgtgctgttcgacctcccaaataccgttgtcttctgcttttgaatccttcggaatttgagttttgtagattgttagcatcttcacggtcgtatccagcagcagttaaatgcgaaactttagcttcaagtgattgcgaaagttcatgagagagataagttttgtatgccatcagtgaattagagttgaaaatttcacgaccatttattgcaattttcatgtctcgtatgaacgtgtgtccgatcaattgtatcggtacaacctgatcattagtatccaaatgtccccattcaccatttggtggtgtcaattttcgcattcgaaattccgtcaaaaggtaacactttgacaggtcaatgtagttttggctcgagtgtattttaaaatggtaaggtgtgtcggtgagtgggttactcggcaaaatctcgaaaacctttgacgatgatacggtaacatttgtcgggggtatactgaaaaagtcaacagcattggtaattgaatcaatgctgctcgagtcaattttgtgaaatgccattttatcttcttttttttaataaagtccaaatgcgtctgatctgagtcgctttttgcttttaattagtgggttggtaatagtttttccaattaaagtctggtgcgatagaatgggtgatttgttagcttttatacgctttcttcgtcctgtaccaaattgacgttgaaatccacccttctccaaaatgttgtccgcgcctcgtttaccctcagttgtcaatgtttctattgtccccattaaccccggcttttcatcgatcattcgatttataaaacg

SEQ ID NO: 16353 - DNA, 1813 bp, Heterodera glycines
  unsure (1)..(1813): unsure at all n locations
gctggcgtctgttgcgcagggcgatggtcaaccgacacgacgatcaggcacatcgggctaaaaaaaaactcgcgcacaatttaaatatcgatttgtaaattcaacttacggcaatggtgacccaacgcagcacngcatccaatcaagaattgaatgttgtgcgttccatccgcacaaaaaggttcctgaaattgcaaatagcaaaattttaaaaaaatttaaaaaaaaaacaagtaagcaccgccaattgctggtgggacgcgttgacgaggatgggttgcaccaattgcgcaacctttaaaataataaaatattagttttttattttattttttattattgttaatatgacttggccaaagggcggcatttggccgaaaacggttggtagctgttgagccataaaataaaggacaatttgaatttttcgctgtaaaaaaaatagaaaatttgacttttttttaaaatattgcgtagcttttcttttcttaactttaaaaagatttctatttttcctggctttccgctttttttaaagattgcgcagcttttcttttattgactttaaaatttctatttattttttcttggcttttctttgcttttctttttaatattgcgctgcttttcttttcttagctattaaaatttccttaaatttttcattgcttttcgtattgtttttttttaaatattacgcagcttttcttttctgaatttaaaaatttccttaaatttttcaatacttttcgacttgttttttaaaatattgcgcagcttttcttttctgaattaaaaatttctatttattttttcatggcttttcgtttttttaaatattacgcagcttttctcttcttcattttaaaaacttctatttatttttccttggcttttcatttgctttctttttaatattgcgcagctttttcttttcttaactttaaaaatttatatttattttttcattgcttttcatcttttttttttaaatattgctcagcttttcttttcttaattttaaatttctatttatttttcttggcttttcgtttgctttcttttcttttctttgttaaattaattaattaataatttgttagtaagttatgataagcaaaataaatgcacaaatataaaaatattggacagaacaaataaataaaatggacagcaaatcaatataaacggaagaaatggaaatgaaaatgatgggttggtggagaacgggtcgttgcagatgggtgatagataagaatctagcgaatgggaggggtccgcatcgctgtgcacagttaagtgacaacagtggggagggggtaaacatttgaatttttgaagttcagatggattttataggccgtcattgcaacaccccctaagctgaacgacgaaagaatttcatctctagcaccatttcaagcagtactttcccgacgccccgccccctcgcgcacccccgagacttgcgcagcaaaactcgcgcaccccttgtccgattgacttcaaatttcacaggccatctttccagcagcctctaagctgaacgacgaaagaatttcatctctagcaccatttcaagcagtactttcccgacgccccgccccctcgcgcacccccgagacttgcgcagcaaaactcgcgcaccccttgtccgattgacttcaaattttacgggccgtcattccaccaccccctaagctgaacgacgaaagaatttcatctctagcaccatttcaagcagtactttcccgacgccccgccccctcgcgcaccaacgagactgcgcagcaaaactcccgcaacccttgtc

SEQ ID NO: 16354 - DNA, 3186 bp, Heterodera glycines
acgaagtgcaacggacgatgctcgagttggtcaaccaattggacggattcgactcgcgcggggcaattaaggtggccgggggacatgcggaacacgtggggaaaaggcatccaatgcgtgatactcctaggttttgatggccaccaaccgaccggacactctcgacccggcgctcgttcggcccggtcgcattgaccgacgcattgaattttcactggtaaattgttatcagcgtacactgctcattcttgtgaatcatttcagcctgacgtaaaggcgcgtaaaaacattctccaaattcacaccaaacggatgagcatcgagcgaaacattcggtcggtcattattatcattgtcaacacataattatcatagtttggttttcagatacgaattgattgctcggctctgtccgaacacgacaggtgaacatccccaaaatgaatctccatttcaactgacggagcaatgcaacaaattaaccctaaggtcgtttcgctttttaggtgccgatttgcgcagtgtttgcactgaggcggggatgtacgctttgcgtgcacgtcgtaaggttatcacggagcaagactttctcaaagctgttcagaaagttgtacgtttttcctgttttctttactaaaaataatgggaaatttgtaggtgaaaggctatgcaaaattcagttcgacgccgtcctatttgacgcacaattaaaggaattgaaagagggacattatagaaaggaaaattctgaattcatctaattaatgcgtcgatttgtttgttatatttattgtacaatgataggttttattttattttaaatttatttaactataactgtgcacaactgacattattgacaaatgagtacgaaatcgcccaacaaaattcaggcaaaatggcaacaaaggcatattctctggtaaaacgaaaaattgaaaagtgatcacaacagaacgaatgacaaatggaagagtcaagcgaatcataaaacttcggcaccggacaaaaaaagggggcaaccgcctagatcattggtcccgaaaattttttctgaaaattcttataacacgtttctaggggtgttttgaggcactgagcacgaatccggcctccatttcgacctatttgtaacaccggacctgaattcgaacattttttataacttcaaaaatcatgaaaacatgtttccagcagttttttgggtcacgctgatcatgaatacgacttctatttcgcctaattccgaaccccgatctcaaattctaacaaaaattcgaaaattcaagttctttcaaatttcacttttgttcaacctttgtttacacacacggaaacgaactgaaagccatcaccgatacgcattagtggtacaataaaatcgtttaaaccattttagactaaaaatcgaaaaattctaattttcgactctgtccgaattcgggtctggtgttacaaataggtcgaatgattcgtgctcagcgccccggcggggctttcttttttcgaaggatttcttttctgctgatgaaaatgaaatttttccgttcgtcgtcccttcctttgcccccttttgtcatttgatcgaatttaatcacagtttttaagtgtttgtgcacaaaaacggaaatgggcggaatggaatgttctaagaatgaatgagcaatgaaaaggacggcggccttttgcaaatgttttttttcgacttttttgttcatctctgaggcgacgacaaatccaaccattggctgacgatgggtttcaacgggtcgaagttatgcaacggcacttcagcaacaccgaaagtgggcgtactgtgcaaaagaccgtaactgaagggagtaatgaatcagtccaagaaactaattaatgcaaggggaaagggacatcagttagcacagcagcgatatggatggcatttagcaattaaagcattaaaaaagcctactttatgccgtctttcacagccaagtgcagcttgaaattggggaagtcggagcagtgaatgtcaaactcgaagctgaaaatgggagagtttgaacatgagacgattgttttgttttggctttttacttttggttaaattgcgggtccaacgaattgggcaccatttccgtgtgctttctgcccttttgcacttttgtcgtggccgggtggccatttgcggaaggcatcagccgaagtgttacgtatgggtccgcgtggccctctttttctattggactcaaatctctggaagaaaagggagggaaagtccggcatgtgattgattacccggctcactttgccgcaatcactgaaacgatcagtttgaaacggtccccgtcgtatttaagaccgatttgaatacgaccggccgaagaaagcagcgacttccttttctttctgaagggggagcgattagcgaggaatttgcacagggaaattcgaatacttttgactagttagaatgaaataaaggccctcttttgaggggcgttgaaaaatagagctcccggggggttctaattcagtaaatacggtattagtctttttgtcctcactttttggtgtgttttcctccgattaatttcccgagaattccctccgctctgttggacagcagcgaagaattgaccgtcctcagcgaactcttcgacgagtcggactgagtccgccccacggaggacgccaatttgttgccgtgcacatccaagtcgggtgacaagtcgtcattgttcatcgtcgcggatgaattgtgaccatttgccacaattttcgccggctccgtcgccgcggcggccaattgccgattctgaaggagagaaaggaataaaacgcacaaaagaaagaccacgcgaaagttggcattggcatgggtcgaagaaatgcccacctgaatcacttcgttttccaatttcacattgtgtacgttctgctgctgctgtttggccaggtcgtttccgttgtgattcgactggccgtcctcctccgacagcgacgaattcgttcggtcgccccgttcgatatgcaccgctggaaggaaaacggggtttcaggtaagaaaatggcgtttaaatgccgaaaatggaccatttccgtatgtcgaggacaaatcccgggcctcgagcactttacggggcggagtgaagaactgaaagaagaagcaagagtcatgtcattgtgatgactaattagggtcattaa

SEQ ID NO: 16355 - DNA, 1867 bp, Heterodera glycines
gaaaatttattgttaaatactagagaccggcgcaggacaggatcctgcgcaggattttgcaggatcccagtccgcaatcctgcatattttggaaaatacaggatttacaggatttgcaggattaatcctgccggatcctgtcctgtaaaaaattttgaattccaatcctgcaacaggacccgcaaatttgatttttatgcaggattcagcaggatcctgcattgattttttgaaaatttttaaaaatagaatgccaaatattcagaaactttcttttttcaaaaattttttttttaataaaaatttttcgtttaaaaacttatccttattcgaaaaaagtttatacaattgaattttttatgtgttttgctacctaaaaagcgttaataaaatttttttcccactattttcgtgcctattttaggatttttctgcctttttaagtgcctatttcgcgattttttgtgcctaaaaatcccatccctatacataatggattatggctttttttgcaaagaaatttaaataaaaattattttactttaatttaagctattattatgagccacccaatttggcaaatcggtctttttaaaagcattaaagaagattcagtcgattgcttggagtgtaagcaaaaaaacgttattaatttttcatcttcatcatttttttgtttaaaaatatattgaatacttttttatactttgaaagacttttttattaatacataattttttgaaatttcctaaaatccgcaatcctgcgcaggatcctgcagattttaaatgcaggatttgcaggattaatcctgccggatcctgtcctgtaaaaaattttgaattccaatcctgcaacaggatccgcaaatttgaaatttccggtctctaatcaaaacatctgtcttcgcgcttagaaaaatataaaccatacatagcacgcgcgccacacgtcgcagcaaattgtatggacccagcacggtgaatgtggagttgtttcttctattgctctccaactaaaataatgaataaataaatatctcaaaaaaaaaggaaaatgattttcctacttgcaaaacaaccacggctgcgagaagaataatggccattccataccaggccaagtgcggtgagttgttgatgcgcaccatgttttgaacaaacacaatgttgacgagaatttgacgggtctttgcggtaaaggcgagcgaagtgtcggaacaatcgatgttgttccccgttgccaaatccttgtttttgttctttaagtgatttgcaccactacctcaacgttgggttgacgctggtttggtgcacgggacctgacaaaaacaataatgtaagttttggagtcgtcaatttgtaagcttacgttcctcaacggaggcacatcgtagagctttcaaccaaaggtcatttttaaaaataataagtaattaaaggctcgcatgttatatgaaaaaagaactaatttaatatattaatgagaataaaaaagcgtggagtgcggggaagaaacaaacttttgggacggggattccccaagaaatgaccaaaattttggggatagagagacgacacaaacaatacctaattttaaatattcattttttatttgaaaatagcgcaattaatcgacgaccttggcgcatttttgcaccgtttacgcgccggcacatcgaaggacagatacaatgaataatatagcaaaataccaaaagtcgataaaaaccagcccaattcatttgttcagcgaaaccgatcaaaatctttagccggagaaaaggtcattttactttttttattttaatattattattaataaaaagaaaataatttaaattttttatttttttttctaaaaataa

SEQ ID NO: 16356 - DNA, 873 bp, Heterodera glycines
ttggggatccgacatatggggattttaataaaacaaaaaaaatatttaaaattataattttatgtccaaaattagacaaatttacgtctgctttagctgccagagttaattccattgcaagaaaaaacaaaataatattttttaaataactctgtttccggactgagatttgctttgcaagtgagtcacaaaaaattaatttaaagcaccgcagaaagtcactcgaaagataagaaacagaatagaagaaatcggcatttgtggtacgcaattagacagcaaggccgtcttgatctttttgaatgtccttgacgaatttctgttcccgttggcgatgggaaaggcatttttaaaaaaattggtaagagatgtactgtacataaaaatatattgtgatttatctattgtgttgtggttagtatgcgctcaacattatgctacttccttgtggtgagtccggaaacagagttattttaaaaaatattattttgttttttcttgcaatggaattagctctggctatagcagacgtaaatttgtctaagtttggacataaaattattatgtttatttttttgttttattaaaatccctaaatgtcgggtccccaaatgtcgggtccccaagttgcaaatccccaaaagtcgggtagccggcataaggcaaaaattgaaaaaccccgaaccccgaacgatttggcaaccccgaccccgaacctaattaaaaacacataaggcatttaaaatggccaattttcagtgaaaatctgtaaaaatagtcaaaatttcaaatttttccttcggcgcctgacccccaaatagaaatagtggattttattcaaaaaatgcccaaaaatttctgatcaccttatct

SEQ ID NO: 16357 - DNA, 1174 bp, Heterodera glycines
tatcgcatgatttccaagaataattaatgaatttggtgcttctaagtaaagttacgataaaagtttgtcaaattgactttttaactaaatttcattgcgtttaccccaatttcaaaatttaaatgcattaattttaatttttaattttattttagcctccactcacccctcgttttgccttcgttcgccgtcgttcgttgttcgtctttgcctatttgcagatcaatagaatgtttgttttgaccggctgccaatgcatcggccgatgatgaggttggctaaatagtggaatttaattttgaattttattactaattggcttactctgtctatttctctctgctcattttgcccattttttgattgcgtctccgccaccctctctccgctttgggcattttctgtcgaatttgcgctgcttttcctccgcttgttttgcctctcatttccatgccccgccgccgcccattcattagccaaaacaaaaattgttaagaaaacgcgtaaaattttgtcgtttttcatcttaatcacttttgggcagaattttgaaaaaaattggtaaaattatttgtatttttaaaaatatatatttttttatttttgtaattttattataattaataatattaataaagaagagaaatttagatgaattttataaatctttaaagaaatattgttgtcatcataagagacaacactgcaaaaatttttacgtcaatgaaacaaaaaaagagaaaatgatgaaaataaatgtcatgaaatacatatgcattaataaaaatgaaaagtcaaattaataattgtttttttgtaaaataaatctcagagtaaaataaattcattcattatatttcattagccaatttccttccggcggatattcgaaattttacgacaaacaaattttgatatttatattctctcactaacaaaaaatctactttccttgcaaaaaacaaaacgaaaagcatgaaatattttacttttcggttttaattcaaattttaacaaaaatcaaaaattcatctattagcacgcaataaaaacaaaatgcattcaaaaaatcgaccttcaaattacaaaaaccttaatctccattaaaaatgccacaaaattcatttaaatttgaaaaattccaatgatggaattctcgattttaaaactataa

SEQ ID NO: 16358 - DNA, 1064 bp, Heterodera glycines
  unsure (1)..(1064): unsure at all n locations
tcagtctcctgtaagattcatagatgtatcagaagccgcgctacaatataaatcggcagagttatntaatagtgaggcatgctgctttccttaagcaaggattttttagctaacattaagcaggtttaggccttcagccagctcaaatttgaaatgaaaaaattaaattatgaagaaattaaaaacgaattgtaaaatttgtttaaaattaaattcaaatttattgatgtgttcaagaataattggttaaattaattaaaagaataaattgttttattataattaaaaaagaataatgatttggtgttccgttggccgcaaatgtctgaaatattcgtgggataaaaggcaaaaaatttatacaattttgaatttttttaaacatcttgacatttttttgtaaaataaagtaattttgcttttaataaaaaattgaccattctttgcataatttgttaacaaattgaactcttctttttttggatccagaaaatcttaatacaaaaaatcaacataaagttttactaagaaggatatattatggacttgaattgtttactgattttttaaaaatctgtcaaacaaaattttgaattttcatatatcatttgaaagagaaaattttgcctttttattaggccatattataaggcctatttgctgcttatatcgtgtcacattcagtcagatttgtttaaaaaaaatttatatgagtgttcataaactattgattcaaggcccgaaaagtgttcgactggcctaactttctgaataggagaccaattccaaaaaatcatgcgattattatgttcagacctataagctctacacaaagcaaatttttgacatttttcaatacaataggaaagaatttctgaaaatccccttttctcaagaacctctctttttcaggaaattttgttaagacaaataaaaaatttaatgcctcctcaaatgtgagtaatttagcaagaccttggaaaattcacggcgccatattttgtgaattcgtaagtgaaaacactaatgaattggtgaatttaatcacgaaataaattgaaaaa

SEQ ID NO: 16359 - DNA, 2555 bp, Heterodera glycines
ttttcttttcaagtactcatttcttctcctttctctctattgactatcactaatacgtgacggtcctgcaacgccaatatctgaattcagtgatgcctggctagcaacattcacatctgtcaaaaatcttgttcgtttagcataattatgttcagacaaaacatcatctatatcatgttcaaaaatctcggtttcatcttcaataactaaaacatttccattttccaaaaactgttcatttccaactctaatactaagatttatctgaaaaacatggtccaaattcattgctcggataatatggcgtttttaaaatctgtattaaaaaacaaagttaattaacaacacaatattaaaacatataggtaaatttgcaaattgaacaaatgagaaaaaaataaagataaaaatttattaaatgaaattaattgatgaaatgaaaattcaaatgattgaaccgaccttttcattgtaaaacttcttttacatattattaaacacaattaatgtagaaaaattcatttcaatacaaatacttcctctcttacaatgtcacaaatcttttacaatacaaaacaaaatacttttcacatagtaataaatcagcattattaatttttacttttttttattacttaactgagaaacaaaaaacattaatataaacatttttaagaaaaatttacatatatgtataaaccaacctcataacgatatttaaatccacttcgtaataagtaactcctcttgttaatacacacaataaattgcgataaatccatccagttgaacgaaatgtacaatcgaataattgacatccgctttaattacaaacaaacaaaatttccatttcaaagttcaaaacaaattctcgaatcaaaactttttcaatgcaatatcaaaaacaataacatttccattgagcttgacataatcaaaaacaaataatactaacataaatttattcataactaatcaaatcaattttaattcaataaaaaggaattcatttacaaaaacattttctttttctttacaaaagtgttaagagcattcatttccagacgctttttgataataacaaaaacaaaaactttttctcttaagaaatgcaatagaaagcattcattgcgatttcattatcattaataaacatacaaaaactattttgtcattaaaaacgaaaaaaaaaagagaaatttattttaactgtgctttttgcaaaaactaattaaacaaaaatgaaaaaaagcaaaaccaaacatttcttttcaaattcatttttaacgcaaaaattaaacaaaacgccacacaaattcaaacactggacacacacaacagacaccaaactttttatataaggacattccttttgacattcattcattcgcattggatattattaatttatgttcgccttaataaaagcttcttctaaataattatcgactttgtcctaagcgagcagtgacttagcataattgtttgacccctaattgagtaattgcttccctctttacaccaaacctgccgttctctgactgatttcatgaattttccccactatttccttgcaaattggcatacccgtccttggaaacggagcatggatgatgggaaccctggatttatataacattttaatatttgttttatctttttaaatctctccctcaggtgcccaaattttccggtgccgaaatttctggtgcccaaacttcatgtcacctttttggatccactgcgtttcggcgctcacgtttcggcgcgctcgtttcggcgctcacgtttcggcgtcagcatgtttttccactaaaacttttttctttgtcatccaaatccaacattattgatatcattcgaatttttctaagctattgattcgcgattagacaattaccaaaaaagttatacatgaaattcgaaaagtcgaaattatagaagttttttcttaaaaaatttgtcaatattcttgtaagcatcagccaaaatccttttctgattgttctttatccaactcattctgtctccttcaatcttaacatattcatcaacacaatactgttgaaagagctttcctccatataaaatcggattaaattctctttctctaattgccaaactataacacaaatactgtagtcttgtcactcttctgttactgttctctgtttcatttcagggtgtcaaccaagcgtaccacgcggataaacagtgggtaagtcattggagtcaccatcatatcagtactattcaaaatctttaattcctttccacgttctcgaatcacaatcttggcatttggcacttcaccatctgccccaggtacataaacagctgccacttcattcgctcgaggtacgttgtaccccaaacgtctgtccaactgcttcccggtctcaaacaaaagcttgatctcggctggctctctgttttcagttctcgctctttcagcttcttcgtcctcttcttctttcatcatcatatatgcatctgcaaatgggtttacatttcttatcacttcataaacggttctcaacaattgcgggtcaata

SEQ ID NO: 16360 - DNA, 2088 bp, Heterodera glycines
  unsure (1)..(2088): unsure at all n locations
aaataaaggcaaaaagagatagagagagaaagaaaagaagggagagaaaagaggagagagagagaagaaaagagagaaaggggagagagagataaaagagaagagagagagaaaagtgaacagagagagagaaaatgggagagaaaagaggaagagagagattgggagagagagagaaaagtgaagagagagactatgaaagagagagaaaatgggagggagagagaaagcaagttggaagaggtgagaaagaagaaagataattagatacctcaaatgcttattttgtgagccccgctttgtcttcgaaaaatgtttaaataattttttaaatttcgaaaaaatttcacacccgaagcattgcaacacaacattcggcgctgttcacctgcacacattcactttgaagtccacaaccgatggaaaaatgctaaaaattggttaaatgaattaatggattgtttgttgatggccaaatgagtaccaagaatttgacaaattcctctcgactgcagcactcggcatccgcatcaaacacaaactgatcacggcccgtcaaccgctccaaaaattcactgccaaacatgcccttgggggtaggaagaaagaaaaatggaccgatggcatgggatgggaggaaataaaaatggtcaaaaattggtaccatgaaatattcgttgtacgtgcagaggccgtcctttggcacttccgcaacgagtgagccatttgtgtcccgaaatttgagcgttaattggtcagaagttgctaaaatgtttagtgtttgtttttaagtaaatgagtttttctacttgcgcttaattaacgaaaatgtgagaaatttacttttaccaaatgggttgcccgacatttgcggatttctaaaagccgacatttgcggacattttgtgcagtttttaggtcaagttttaaaaataacaaaaaaattctttccaggagcgggaattcccatcctcttcccccttgttatagaagcatgctgttgtttatccaatttactatttttttaattaaaaaccctaaccctcttataacccaccaatcccgaacccccctcaaaaagaattcaccattgttagttggccgaagaagaacacattcggcaggttcaacaaccatttctggcgccgatttgtcgtctttcggcgcctctttttgcccattttcaccgccgaagtcctcaaaaatgtgctgatgatgtttaagcagagcagaaaaagcggacaaaatgtcacagcagagacggccctgaaaatgattttttttttaattaccaaattaattacgaacgaaacaaataatttgataaaaacgcaaaaatactggaatcttgactaaaaataaatttacctctgcactttggtcgtccaaagttcgccgctcaatgactgtttccttgacaagccgtacaacaaattcaagcagtacatcaatgggctgaaatttgtggtgaagacgagtgcgacgttcatccttacgcaacaaaacctgacaaagttttgcaaaaattagtgaaatattaacaaatttttccaagttttcccgtgccaagaaattttttttcttgaaattttatttttgtttgaaaattttgggtttaattattaattaatcaaatatataaattagtgccctaaattaaatttgggtaccaatgccgcggcaagcgaacgcacgcgctcccactcggcgccgcccgcgacggcttcttccaaacgcaagcggagcagcaagtgctcgcccatcgacgagtcggccagcagcgcgtggtcgccaagcaaacggcggccaaagtcgcgtcggaagtcacagcgagtgcacaacggggcaaatctgaaggggcggggagggcggagttcacgatttatacacggtgaataacccgcctcccacccggtcatttgggggacgggacaaaagctcgccgaagaaattacaaaaaaaaatagaaaattttcaaaaaacaaaaatctaaaaaacgctgaaattttttggaattttctttanaaaaaaatttcgaaggcgaggggaaggggacgacggaggcaggcgatctaggggggggggggg

SEQ ID NO: 16361 - DNA, 2998 bp, Heterodera glycines
attttaattataattttatgaattttgaaatttatcaccatttgtttcactgaattttttttagcttttcgtcagaaataattaaaaatgtaagtgttttttagtttgaaaatgcataaatgtgagggttccatttggaccagggtgtcccgtatttttctagataaaaaaacaaaacaaatcacggtccatgcctggatccaaatccgggtcaaactctacaaattttttcaatccaaatccaccgaaaagtgtggcatgctgcacaaaaagagtaccaaaagaaaatttttatttttatttattttaaatattttttcactttaaaaaagtggctcacttacattttcgctgatcaacacaatgctttggcgttcgtccaagtgggaaaaggtggtgatcagcgtgagcaatgcgtccacaattttggcacgaattttcatcacttttttgcgctcggccaacgcttttccatcggccgacgacgacgatggcccatcagaagtaacagaagcagaggcatttgaatggtcagcaaattcttcaatgtccgactcgtcctcctcctcctccatgatggtcttccgctccaaaaaggaggacggatcttcaaatttaaaggggccaatcaatgcatgaaatgggacgtttcggcgcagtccaaatttttggactataacttcgtttattttcaaccaaatcaaacaatcttgatatcattcaaaagcctttcacatgctctagttgccttacaaaaagggaaaatgattttctagcatgtaaaaaaagttattaaaaaaaaattaaatttatttggttttttgtttcgaattactaaaaaatgcaaaaaattttatttttttgatgtttagttttagaaaaatgaagagtagctcaaagactttaaacaattataacaaaaaaaatttgaaagacaatggaaaatgctcataaactttaccgtccgtttccaattcttcgggtgccgcgtcttcttgcaatggcggagacatggccttcgttttgagtccttcgaccaaatagtcgtccaactgttgaaaatgtatttgaaaatatgaaacgaaaaaaaacgcttttttttacccaaaattggccatgatcagacggaggcgaggcggacggactaagcgaaaattgggggtccgtggaaggcgacatcgacggcgaccaggcaacatttccactaaacagtaaatacaataaaacataggaaaatcgggtcgtaatttagagttatatttggtaattacggatagatgaattgggttttgttatcatgaaaatgggaccagaatttagacatggaaaatacgggctttttgttccggtgaatgatcaagtcatgtcatgggcctgttcgggaacggtatttttgaattatttttcatattttttccaaaaactttcttttgagttaagattaaaatcccgatcccgaccattgtcagtaccaaaattccgggctttagttatcttttcgataaaaaaaaactcaaaatttaataataaatttcaaaaaaaagtaagtcgagccccgtgtaaccgagttgacggaggagaagcggccggcgaatgcgaaggccaggcacttgtggaagcagaaaaatccttgcaaagaggctgaaaatgggaaaacaacggattttcgtcaagttttccatggcacaaaaaccaaaatttgcctcgtctgtgccgtgccgtttccgattgccatcacttttctggtccaccatttgttcctcgtgctgaacatttgcatctgacgactcgtgctgattgtgagcatcgccaacagtttcacactccaccaaattttcttccaaaaagcgattaatttgcgcaatggcagtcggcaaaaagtttgggtgctaaaaaaaaagtaaacatttttattcaaaaatgcatggagagtgtggaatctcaatagaaacccctagatcttttgtccattcttttaaaatttcaattcagtgggaaaataggaaatctttagccaatttttgtcaaatttggccattttggaatcaaattttgcaaataaataaataatggaatgattgcgactcggcggtgccattaggcaccatttttttaagaaataaaaaaatttaataatttcccattttactggaaaaaattttaatttttcattacggggggggggggggaacacgaaaatattcacccacatttatggtcagcagcagcgcgtggtcgtgcaaaattgacttcaaatcggtcacaatgaattgttggagtcgcagcaaatccctgcggtcgtcgcactgttccgcggtcgcaagacggcacagaatgcggtccaatccgccgctttcgcgaagccacgcccgaccatggacatccttttttgaacaggaaacagtaaagaaaataaatcggatgaaaagaaaaaaattttttgtttccaaattgcaagcagaaaaaaaaatttacgacttattttgcaaaaaaagatttaagacaacaaaaaggcaacggtgaacaacggaattgttatgccaaaggctcagatttcaataaatggccaaatattttctacttttttggcgacgaattaattaattgtcccatggctacggaatttggctcaaaatgattgattaccttcaagaagcagcagagaaaacgacagtgcacatcagagagagttgtcttgaaaacagaaacttttattactgttttaaaaattttttttataaatatttaaaaaaaaagcccagacgaccacaaaaaattccgaaaatcgaaatcccgtccatatatacctcgtcacttttcaaaatcgttgtgatggcgtcatgtccaagttggtagcgcattgtgtgcgaactgtgcacacagcggaggaacagttccgtcaaatggtgcgcgcgtttggcattttgttgccgatgccggggatggtcaagcaaaaattggaggaacagctcaacacattcggcactggaagaaaaga

SEQ ID NO: 16362 - DNA, 1418 bp, Heterodera glycines
  unsure (1)..(1418): unsure at all n locations
caaagtgttcagccagcagaccaacggctcntcaaggacggtgccttgaatgaagatgatgctcgtttatgaaagcagggaaaatggcatataaaaggctaactcacagaaggcttttgccattcactgtgccaattcggtcgtccctgccaaaattgcgtgctccgatccgatgcatttccatggacaattcctccgcaactccgtccaatcctttgctaaagaattttcagtaaatctgcacatttttagtggacgaacgacaaacaccttttgaaaacagtttgatgtcgagcatagccacctttataataacaaaaataataataaataataataataataaatttccaacgaaaaatagatttaaaaagagcgaaaaaatcttttttcattaaaagatttaagtgattttatttgaatgcaccgagttgttcatcagagccggagccaaccaaagcaaattgagaagggcaaaggctaaacgaaggctaatagacgaagaattaatgcataatttaaaaaattcacatttgttgcccagtttcgaaatcgatgcctttcattcgcgaagcgaaccacaaaacacagccaatggagtcgtccaacacctaaaatttaaaaatatgagaattatcatcaaatatattcgcacagtttttgaaggcgcaatggcatcggcaatatgcttatgacggcactctatcagctcctccttgcaaacattgaccaagccgagggaaaaggcattgaaacctaaggcaaaaatcaaaaaaatgactaaagagacgataaaaaggagttaatttaatgagtttaatttcaacggaatttaaaaaatagtaatttatttcgtgagtgattttgctccaaaaatgccatcattcccgtaattacgtgcagccgtagtttgatttgaacaatgtaaatcttttaaatattcaaagtagccacaaagtcgccttaggcaaaaaaattgatcaaattaatcattaaaagtatatagaaaataatcgtttgaatcgcactaaaataccgtataattaggcaacacataccgtatttctctgtgctgcggcttttcagatactcaaaggcggcgatgctttgtgcccgatcggatgcttcgttgaaattgtcctacacacaaaaaaatggtgtagtaaaatttttcgggcactatttataatatttatctccactatatttctccgctttctgccgagccaaaaaagcatcattttaattttttgaattcatttgcttttaattattttttgtcaatgtttccagcgcgaccttcgctttgtccccgaaggcgacactgaacaaacgaatggnccaactctttggccattgtttggcttggtcatncatcggaggggaggaagcagaagaaagcacttcagcagccatca

SEQ ID NO: 16363 - DNA, 1707 bp, Heterodera glycines
caaattgcccagtgatttccccaatttgagcatggtccagcagcagttgctgttgctcatcagcaagtgcagcaaaaggctgaaagtgacacagaagaaagtcatttatgattatgattagtgatcactaattattgaatctgtgaaatcaggattagatgggatttatttaatggacggaatggcatatgatacatgccactgctcaagagcatatggtacttcccgtaccacttttttttgcagttagctttttgagtctcgaaaatcatttcagtctcgagagtgccaatatatatatatatagagagagagagagagagagagagagaagcatagaaagacatcgtgctgcttactctcaataaaatttgctgtgccccttccgctgttgtgaaattggcaccgcctttgaacgcgttgaagagggcattttggccgacagattcatgtgggtaataagtgtgggcgcatatcgtttgggccacaaatgcgctgagtgatggcaaatggcattgaaagtcgcgcagtgccgagggcattttggcattgggaaagagcttaaaattaaagaaaaaagtctattatctataatttagcaccacccactttgaactgggaaaatggaggcaatgaaagacaaacgatgtttcccggcggcacttcgtgccatccgtcagccattcccttaatggacaacaaaacagtatcctccaccatactcttcacatttattttagcatttacttcgctttcttcatttgtggcatttcgccccgggaggacggacaattggaaagtgccaccgtcatcagatttgacattgtcggcataggcactttgtccaattcgcatccgccaacacaatgatttgcgtccaaaaacgtcacggccaaagatcaatcgtcgccgggaggcatcctccgctccggcgggggatcgctgtaaaagtcacacaaattttaaattggtcagaaaggcaatgcatctctcgccgtttgctgctgtaccaaaacggcacagaattcgccatgttgccaatcgaagcgatgttgctgaacatcgccgagttcggcatgggcgtcgggcggaaaagtcaaattcaattcattgaacaaagcattgttatcctggggaaagccggggaaaaattttaattttgatcatttgacgattatttaaaagttgtacccgggaaagtgcaaaaaatgtcgccatctccgctgaataatgtattgaaatagtattcatttttattaacaaaattaaaaacagttaaaggctaaccaaagggaggcccaaaattagagcaaaatcaaaattattatatgaagcgattttagcgcaaaaatactttatttattttgaataaattgaattaaaaaacaaaaatttgtgaagagatcggcaagaaataattgagcgagcaccaacaattaacaaattggacatcattaagggccattcttcaaacgtagcgaaagcacttttggtgattgtgcggcactcgcgttttgaacagcacggagtcggcacggaattgggagaacaccaaagggttgtagccgtacacgcgggcgaagaagcgaatgcactgatgacgctccacaaaatgggactgatccttggacaacatttcggagcaagtgggacaactgaaagcaacaatttcaaatttttgaagctttttggtactgtaattaccgt

SEQ ID NO: 16364 - DNA, 2841 bp, Heterodera glycines
  unsure (1)..(2841): unsure at all n locations
agaganattgaggacgacataatgtttttaataaggaaaaacgatgaatgaataagtcatccaccgatcgaagaagcgcccccgggggaggcgggggagaagaagccaaggccaagttgggcgagggaacggaaggaaaaggtgaataattgcccccccccccccaatcatcccttcccctcccctgctgtcctccctcttttccagcagggcaccgctttaagcgtgtaaaattgttttttattcaattatgaaacggtattttgtcttacagtatcctgctaatttcgtcatttgaggaaaaatggggagaaaccaatcggagatttattaaagaattaacaaatttcaaaaaaatctaaaatttcaaaaaaggcgaaaaattaagaaatagacaaagtgagcatgaattaattagaaaaagattttgactggtcattttgaattcttaaaataaaaattgatacatagaaatcatgaatttttccctgatttggttgaaatttaaaatttgttaagctcttacataaaactgatcagcaagaatgggtctgatcacatttgtcaataatattggattattattgtttgatcactcttgcatttcaaatatttaattcatcattattcacccgagttaattaatttttgtgaattttggaaaatgaaacccatcatttgtgatggatgtgtcacataccgccgatcacattgctcgtcggcagtgccatcgtcagcacgtcgaacgcggcgccgccgccaatgcatcggtgcccaggcaacgcacggctcagcgcagcaccgccttaccctgaggaaccatggtgttaattttaagagtattaagtgataattaaaatacactaattatatttgtttgagggggggggggggaagtcatttcggccatgtggaatggaaaaataaaaacttatgtatataatttgaatttccagcagatgggaattctaaacttttctgggcacgtatttgaaaaaaacgcatttcggacttgtaaatttgcattttcgctaattaaaaagggggataacacccgtaaaattagcctaaattgattattaaatcaattattaaactgaaaaacaattaaaatattttcaaaaagagagaaaaaaaattaggcaaaaagagttaatcagggaaagacttcgattgatcattttgtaaaaatatgttttttaaaattaaatgtatttgttttaattaaatattaaatctttaaataaaagcgatattttgaaactcaaaagtccaatcttcaaaattaaaatgatggtaccaaagagcaaaagaaatcatttttcaaacataaatttttggttggacttaaaaatttatgtttaaatcttttactattattatttaaaagaaattgacagaaaaccttaaataaaattatcataaataatgggtccgatcactttcaaatcaatccaattatattaattgatcagaaaagcggtgtttaattggtcagctactaatctaatcatttatcaccaaaaaaatatgaacgatgaaaaaaaggattgggctgaatatttttttgtaacatattcaattccttcacctcttacagaaaactgatcagaaagaatgtccctaatatgagttattgtctgttcacttgcactcaatatttattcaatattatttcaccgtttaattattttttgtgaattttggaaaatgaaacccagcatttgtgatggttacataccgccgatcacattgctcatcggcagtgccatcgtccgcacgtcgcatgcggcgccgccaacgcaccgacgtaagcgcggcaccacttcaccttatttgttaggggaattacataggtatatgaaaatatgtattttgaaatgtataaataaataaatgtatgaaggggcggggggggggggggtggttcggccttgaggcacggaaaaagcaaattaaaaagtatatgcattcgtggcacggatcatccccaactcaatccatatccattcataattcatccaccgcttgcggtccgcggttttttttcgggttatcttccttttaatttttcccccatttcgatttttttcgattttaatccaaattcgattttaccccgtcagtgccgtcatccgcacgtcgcacgcggcgccgccgccaatgcatcggtgccaggcgacgcacggctcagcgcagcaccgccttaccctgatgaggagccatggtgttaattttaagagtattaagtgataattaaaaagcactaatggggggggggagggcggaacaagacaaaatttcacaccgaattttttatttatttttaaacttagaaatcatataagaatccaaaattttataggtaaattccataaaaatttctaaaaaagttttgaaaaattgatgactaatttttttttaaaactttgtttaattagtaagtttttttgaaaatttttccaaaaatctcttaaaaatttttaaaaaaatttttaaattcagcagccgaattttggggtgcacccggcgagggtgcagttcgtttcggccataaggcaaaaaaaggaaaatgaaaaatttcggagttccaaatttgcagtttcatcatttaaaaaagtggggatacgacacgactcccaaacgattagccgcaatttttttacactttaagtttgattttgttgaaatgagaaaagattttttacaacatttcggtggcaagtggccgtaggggggagggagacgttttgctaattgttttcattcatcccctacggggacaaaaagttgaaaaatggtggaagaatgaaaaacggaatgaatgcaaatgttggcatt

SEQ ID NO: 16365 - DNA, 3721 bp, Heterodera glycines
  unsure (1)..(3721): unsure at all n locations
cagggtttccagatcaaaattttcaaaagcctcatttgacaggcaaaaaagcttcattttgggtcaaaaagcctcatttttacaaaatttattcaaaacacgtttaaaatgttcaaatattatatttctgattgtccatcatcaaatggagaaattttttgttatgtagaaatagataagcattttgtgaaattctaagtatggaaaaccgaagttgattttttgcggcgctttttcaaaaaacttttgggaaacaagggggccggcggtgccgataagcgctgccgggaaaaattaaggattttgactatatttttagctgattttcattgaaaattcttaattttgtgaattttcggaaaaagacaaaaagtcatgggacgcgtaaaaccgattagaaccaaagaaattttaatcattgcctacagtttatattagtagggcttccttttttaggcacaaaaaatcgcgaaataggcacctaaagaggcataaaaaccctcaaataagcacaaaaataggcaaaaaaattttttattaacgtttttagaaaattcccggncgggaacgggattcccgcgggaaaatacgggaatcccgttcccgtttcccgtcttttttgcctgacgggatttttacgggaacgggaaaaatgacgggaatcccgttcgggaatcccgccccgttctttttcgttttcccgttcccgttcccgtaaattttttctcaaaaacgggaataaaagtacactgctaagaatgggggtctgagtgaaaaattttgaaggaaattggtggtaaaagagagatttttttgtgaaaaaaataaatataaattcattttaattcattagcgtacatatttatgtagcctaatggttaatacttctggtctttcattatttgtctcctgagttcaattccccattaggataggttatttttcatattttctttaaattattttatttgaaatttaattaataagaaagtttgtctaactttaaaaaatattttttaaatagccataagcccacaaattaatcatttttaagacaaaatttgttaacaaatttcactaaaaatttcaaaattttccccggcggcgcctatcggcaccgcttgacccctccctgtaccacaaaggattttgtaaaaggcgctcacaaaaagaagagattttaaccaaaaaaagattttgtaaataagttgaaaacatagaaaaaaattctctacgaatattttggaattttaaaaataatagacaattttaatgaaaattattgtacatatataaaaaatcagaaatggcctcaacaagcaaatcttttggtatttttaaaggatttttcttattacacatacaaaatttaaagtgcaaaccgaatcgacatttgacgaagaattcaaaaaatattgttcgggcgatttgattgggcaggaattggaccctttggattggtggaaaattaacgaaggattttgaacaaatcaattccgaaaattctattttattaaattttttgttatttttgtccatttaattttaaaaaatactcaatcatttacacagagaaattttttaaaccgtttaaattataatattttcacttgaaaaataattaaagtaaaaaatttttaaaaaatcaaaatttttcattaaaaaaattttttcccgtttcccggcgggattcccgttaaaattgacgggatttttacgggaacgggaaaaagccgggaatcccgttccagtttcccgtcccgctctttatcgattcccgtttcccgttccccgttcccggaattttttttttaccggactctaatgaacagtatttcccaaagctcacttttccttcagtaaacataacattcgtttttggatttgttatttgtgttttcggttttttcctctttatttatttataattttttcttgattgccgacccgtctatttattgtaatcaataatttttagtttcttcggctccagtaaaaatggaatagattggacaatctgatagcgaataaaaactttaaaaataacgttttttaaagcgattacacatagaatttcaaaaaaattttgttattattcataggcgatttggtccatttggctttagaattcaaaaatattttaatttattttattcataaatacttttttcgggaatgtatttgttggtgtggtaaactatttggcgcttcatttttgctcaattctttgctgaaaattatgtcgctatttggacttttggtcattatttgtcactatttttgaattttttaggccctaaatatatccctgattaatctctgccgagcatattttaaatgagttaagaaaatctttttataaggttagtttatgtggttttatttaaaaaaaagaaaagtgcagggatagccctcccccacaacaatttacctcaataataaccatattttcggggaacttcatttccgctgtccgcctggcctcgttcattcaaagcgttggcattttcctgctattcctttttcacattcatcaggcggaccttttgaaaccctagaaaagcatagaaattactttttagattttaagaacaaaagggacagaaattttttgaaatttttcataaatttattaacaaaagcacgtaacgcagagaaaaatccggtttttagacaattttggccgtcgcatctcttcttgaaaagcggtcttttcttcttcttggtacccgcctctggacatttagcagttaggaatgcttcaccggcactatgggtacgccccactgtgcagagaaaagcctagtactatctcgtcgtttctctttttctttgtaatttatctctgtttggcgtactatctctttattttttaattgaaaaaacagaattcaatctgatgctaatatcttttcttcaatgctaccaatccttttcaaattttgcaaatcgatagagaaaaaaattctacatagtttaatactgattttattagtaattatgctaacaataaaaaagttattagaatagactaaaaattgtttctttttctctcgttttggagtactattttctgtctctaacacatgaaaaaacatcaaattcgtaaatgctaacaattttggttataaggatacaaaatcactttgtacaggcattttccagtgtaaattttgaattaacgcgcaaaaatttacgctaaatgcgctatttggcgttaagagcaattttgtctgacactggcgcgtacccagagtacaccggcgctgattacggcatcaaattttgttaatgcatataaatgaactcggctccgctgtttgagaacctagcccgagggtggtcggtgctaaacagcgatgccgggctcgcccccccccctccaatcactgcccctcatcttcacacccatcaaatcctcctcttcctcctaatccttcagcttcatttctttctctgctcctcccgctgatgttgctcttccccctcaatgatttcaattatgaacattcaaaacgaaccctctctccttcttaattcgacttatgctgctgcggctgcccccgtccgcgggtggccctctgcggctgtggttggtttgatggacggtaacgacggaaggcattgtactataaagtaaaaatgtaaaaagcatttatcataatacagctgtaaaccttacaaaccaggcaacctcctcctcttcctcctgcacctcttg

SEQ ID NO: 16366 - DNA, 2831 bp, Heterodera glycines
  unsure (1)..(2831): unsure at all n locations
catcggaatttcggccaacatccaatccttccagtcggcttctgtccatttcggtcctcaatttacctgggggcttggcctcgcttttggtgtttatatttcggcacaaatttcgggttcgctaaattggcattctatagcaatcaattcccttccatatcaggtggtcatttaaacccggccatttctttggttcagttggccaacgggtccatctctctggtccgttttgccctgtatatttttgcccaattgtttgccgcttttctgggcagtgctgtggcatttcttggccatttcggtaaaactaaaattaaattttgcactaattttatttcagagaattgcatgcaaattcaaacacgaaatggcaatcaagaattctgtaatgcgttctcactcatttgtttaatacatttccgatcacttaacagcacaacttttcgccacttttccaagtcctaatttaagcatttggggcagtgttgctgatcaggtcatttccatttccattttcgttttctttctttttttgacaccatctaaagcttgaccactatcttttcctggattaatttaaaattccctctttaagctgatcggtactgcaattttggccttttgtataagtctgatcatggacaaacgcaatcgcgtccccattggactggcgcctctgctggcgggcctttccctgacaatggtctgttccttatttatgcatcaccgatgttccttttttcaatcgaaagatcgcgttgactttcggcacaaatggcggctttgccataaatcccgcaagagatttggggcctcggctttttatgctttgtctgggactcggctgggaagtgttcaggtgggcgctgattagtgaaagtctccgcctacccatcgctgccttttccgttttccatgtgatcgatcatccattcgttcagcaacaacaatttctacttttgggttcccctagccgtgccttttgtcggggctttggtcggtcattggctctacaaaatactgatcggagtccacggcctccaggaactgatcgaaatcagcggagccaaatacccacgggacgaccgaggctataaggcaatggggaagaatggaaaagaatgaacgagtctttaaggagtacaattcgaacccggcctcaattggaatgtctgaacaattggtgggcttcagcagcagaaaagagatgttgagatgagaaaatggaaaatgagagaaacaaaatgccaaaaattgaagcaaaatgtttaaagtcgaaagaaagcgctattttaatttgtcgaaatcgcattaaacccgaattaatttattaaaatttgacttcactcacattattaatgcaatttgggcacacaaaagaaatgaaatgcttttggcttttagttgcccagggaaacggcaaaagtaagggccaataatggccaaatagtcgtgccattggctctgctcgttgttttgcccttttcgaatagcgttagtccaaagagcagtatgagtgccgaaggagtggcgaggggcggtggacgcaaatgaaagtcggcactttttaaaacggcggaaattcgcagtgaattttcaaaaggcattaaatggtcctttctcgcgcatcttttcactcgaatttttctaagtatcacatttttgacttatgtgataacagaaagagacttaaactcaaaaatgcatttgcttattcatttgctcaaccttttggcaaatgcaaaagatggatcggtttagcatcgacacatccagggccaaaaggtgggttaattaattgtttaattgtaagaggcgccgagcattgcttctgacggataatagctccaaaatgacagcaattcccaagtggtgtcattttgtgcccaacaacttggcattcgagaatttcctgagccaaaaagggatggacaangctgtgacatttactggcatagcgtggtttaccaagacatgaaagacacagtgaaagaggggggacgcgtcaacaaattccctggttaatgctcaagttcccctaattaggcaattaagctaatttagggatgagcgaattggccaaaaaggtttctttgactgtggcgatccaatcaatgcgcgaattgttccccgacgaatatgccttttacccccaaagttgggtacttcccgcccaattggacaaattcaaaaatcactgcacggatcaaagggacgccgacaaaggccaatgttttattgtgaaaccggacgaaggtcaattctgatgtggaaaaagagagatgggggagagaacgaaagctgctttaggtgcccaggggacgggcatttatctgatcaattcgcatgatcagctgaagagcaccacgacacggcaattggtccaggagtacgtcaccgacccctatctgttgccggatgacctcaaatttgaccttcgggtgtatgcggtgattaaaagcatcaacccactttccatttacgtggccagagaaggcgctcactttttattttttgtttatcttgatttataaccttttatctaaaaggataggaatggcacgattttgtacggaaaaatatgtgaggccgtgccctgagaatttcgacaaattttacgctcatttgaccaattactcactgaacaaagagaacaatgcgtacatgcacagcaattccctgagagaacagctgagaggtgaatttggcattttgccaaaaaaaaaataaatgaatcgcaggaagcaagcgactgctgtcgacggtgttccatcagatggagcgaaaaggcgtcagaacacggcgattgtggaaggacgtgaagctgatca

SEQ ID NO: 16367 - DNA, 1222 bp, Heterodera glycines
  unsure (1)..(1222): unsure at all n locations
cagccccgtcgcttacggttgagcacagtctgagcaaaagtacggctaagtctgcggggactgaagctgaaacttctgccgccgaccagcccaacttccaagttcgctccatcgtcgacgaagttttgttctttggcataattanaattggtcgggtttgccactcgctgaacagatgataaaagtgccattggtcagggactgtcttttgcttgtgcttgacaaattgcagcatttttatggggcaaaagaaagcgaaaaggaaaatgaaaggcgcgaaaagtgaggacggacgggagaaggcgaaaagcaaattaaggttaagaaaagcggaaaggaacagcgaaatgtcggcggaagaagcgccacgaaattgggaggctttgtcggtgaattcgaaagggaccgaaggaactgccgcaaaagcggagggagagaaggacgaagaggaaaagcggaggaaggcacggagaccgcacctttccgaggcatgtcacgcagtgccaacaaaagcaaaagcatttgccaagaaggctttttacggtcaaaagccccgctgtttctgctgctgtttcaggtgttcccgctccgttatggccaagtgagcatgcatttgctggtgttggacagggccgtctatttgttcctccaatttgtgtccattcgccactctctttcaatttctctgctggcccttaaaatttttctcaggcattttttgccaaacatttgaatttttctcaccttttgctctgttaagaaagtgtctgctgatcgatgtaatgtctttgccagaattggagaagcaattcgataaaatcaattcgtatttcaacagcaccggcaaaagcgtcccctcgggggcacccgcgttgcctttccatggctttttgcaggtgctacgatttatttggtcaaagctccgtcctttcgaacttcatccctttttagcttttctttcatatcgcaaaactcaaatttcccacaaatgaaaacggagagcaaaataacactttggcctccgttgtgcgtctttttgcccattgcgacgcgacccttcgcttttacggagtgcggtcgacgcggctgagacgcgcggaagtcaaagggcggcacgagcagcggacggatgggtacgcaaaacgcatgaaaacagagggggcggggaaagggaaaggcattgaatggacaacgcattttggtcacattccaaattcgagaa

SEQ ID NO: 16368 - DNA, 1369 bp, Heterodera glycines
ttccgttatcaacgataggtaacaacggttgcggtttccttttaagacatcgcttccgttatcacccatgtaacaatgggtcctcagtttttaaataaaacatcggttcctttatcacacagaggtaacaacggttccggtttttatataagaatcggtcctttatcacacagaggtaacaacggttccggtttttaaataaaacatcgttccgttatcacccagaggtaacaacggtcggttcctttatcaaccataggtaacaacggttccggtttttaaaaaaacatcgcttccgttatcacccagaggtaacaacggtcggttccgttatcaaccataggtaacaacggttccggtttttaaaaaaacatcgcttccgttatcacccagaggtaacaacggtcggtttcgttatcaaccataggtaacaacggttccagtttttaaataaaacatcgcttccgttatcacccataggtaacaacggttccggtttttatataagacatcgcttccgttatcacccatgtaacaacggttccggtttttaaataaaacatcgcttccgttatcaaccataggtaacaacggttccggtttttaaaaaaacatcgcatccgttatcacccaccagaggtaacaacggtcggtttcgttatcaaccataggtaacaacggttccggtttttaaataaaacatcggttacgttatcacccagaggtaacaacggttccggtttttaaataagacatcggttccgttatcaacgataggtaacaacggttccggtttttaaataaaacatcgcatccgttatcacccaccagaggtaacaacggtcggtttcgttatcaaccataggtaacaacggttccggtttttaaaaaaacatcgcatccgttatcacccaccagaggtaacaacggatggtttcgttatcaaccataggtaacaacggttccggtttttaaataagacatcggttccgttatcacccataggtaacaacggttccggtttttatataagacatcgcttccgttatcacccatgtaacaacggttccggtttttaaataagacatcggttccgttatcaaccataggtaacaacggttccggtttttaaaaaaacatcgcatccgttatcacccaccagaggtaacaacggtcggtttcgttatcaaccataggtaacaacggttccggtttttaaataagacatcggttccgttatcaaccataggtaacaacggttccggtttttaaaaaaacatcgcatccgttatcacccaccagaggtaacaacggtcggtttcgttatcaacggaaggtaacaacggttccggttttaaataagacatcg

SEQ ID NO: 16369 - DNA, 1163 bp, Heterodera glycines
aaaaaccatcgcatcggttatcacccaccagaggtaccaacggtcggtttcgttatcacccataggtaacaacggttccggtttttaaataagacatcggttccgttatcacccataggtaacaacggttccggtttttatataagacatcgcttccgttatcacccatgtaacaacggttccggtttttaaataagacatcggttccgttatcaaccataggtaacaacggttccggtttttaaaaaaacatcgcatccgttatcacccaccagaggtaacaacggtcggtttcgttatcaaccataggtaacaacggttccggtttttaaataagacatcggttccgttatcaaccataggtaacaacggttccggtttttaaaaaaacatcgcatccgttatcacccaccagagttaacaaacatcggttcctttatcacacagaggtaacaacggttccggtttttaaataagacatcggttcctttatcacccataggtaacaacggttccggtttttaaataaaacatcgcttccgttatcaaccataggtaacaacggttccagtttttaaataaaacatcggttcctttatcacacagaggtaacaacggttccggtttttaaataagacatcggttccgttatcacccatgtaacaacggttccagtttttaaataaaacatcgcttccgttatcacacagaggtaacaacggttccggtttttatataagacatcgcttccgttatcacccatgtaacaacggttctggtttttaaataaaacatcgcttccgttatcaaccataggtaacaacggttccagtttttaaataaaacatcgcttccgttatcacccataggtaacaacggttccggtttttatataagacatcgcttccgttatcacccctgtaacaacggttccggtttttaaaaaaacatcgttccgttatcacccagaggtaacaacggtcggttccgttatcaaccataggtaacaacggttccggtttttaaaaaaacatcgcttccgttatcacccagaggtaacaacggtcggtttcgttatcaaccataggtaacaacggttccggtttttaaataaaacatcgcttccgttatcacccatgtaacaacggttccagttttaaata

SEQ ID NO: 16370 - DNA, 2702 bp, Heterodera glycines
  unsure (1)..(2702): unsure at all n locations
ggggaacggggagagcggggatgaccctcctcaacggggtcccattcgcaaatcggggaacggggacacctaaattcgaattttattgaagaaaatatttaggacgactagaaaattataccaattgagtagatttttcgaaatccaattaatttttaaatgtacgcacccaaatgcaacggttgctgtgcccgcggaggcaaatccgcgctggcgaacgcgatggccttcaggtaggcaaactccatgttggacagcttcagctggcgcgttttttgcgcaaacaaatgcaacagcgcaatctgtcggcacaactcctcgtaccgttcccatttcagttgaccgtaacggcaccgtatgccaaggtgggcgctgacggtgcgcaacatgtgcgccaagttcagttcatgcgcacgctggacaagcccgagcaggaatagatcacaccactttcccttcatggtcgactcgatcagtgcatgtctgaaaaatgtttgttcaaaagatttaaaaaattgagacccaaagaactagaataaattaatagacaaaaaatgatgggtttaaaggattaaaaattgttgacatttgaaatcaaattaatgaaaggattttgccaatgaattcctaaagttagtttggctaaatttttgatccccaaaaaccgaaatacaacaacaaaggttaggaaatcttctacttaacctgtcttggcaaatatttatattgattagctgctatctttcaatggcataaaatagcaaaatgccattaattaattaatttgccaagattttgtgacattatgccaaggaaggggggatggatagttcaaaaactcactggtcacccaacgcgtggatgcccttcacccaatggacggacataaacagaaggcgcgacacgctttcgcagatcacgcggaagtccacgccgttcatctgctgttgaggattttgttgctgctgctgttgttgctgtaggtgctggtgatggtccaacatcggtggcattgacagttcaaatttggcattttgtgcactgatcaccggcgattggagcgatgccggtgctggcggggaattgcttaggccgaccccacaaccaccgccgacgccatgcgacgatggcatggcaccgccgtcaacggagaaagcggtggacgagccgcgcgaggaggcggtcggcgaatcgtctaactcgaggaaaagtaacggatcagcaccagcagcagatgatgccttaaaaggatgggcaaaattgttaaaatggcaaagttagaactgacatttggaaaaagccttgacctggattgcatgtagaagtggacttggatttcccggacaaaaatccaggaaaatcaaggtccaggaaaaatccaggcttgtcatgtttctggacctggatttttttcatattgtatttgacctggccctcgatttgattgactaaaattcagaaaacccaggtgtccgaaaaatggcctggaccaggatcaggaaaaatccaggcctgggtccaagtccaggtcgagctctagataaaacaaatcagtttgggggttccaaattatcgagagcctaagcgaactcggatttggtgagcagttccttgctcttgggcgccgctttcccacgcacttaagaccaatgcggtctcgacgagtgctttagtgccactctcgattccaagtctcgagagtcatgagaatcatcaaatgccatctcaatcactgaccaagtgatgactgttttccaataatggtgctccgtcctgctggtgttggttgtggctgttgaatgcaaaatcgcgcttcaacagttgggccagcagtgacgggccgtcggcgaggccacaggcggcagtgccggtgccatcgccacacgatccgccgatgactgtgccacctccgctgccagtggtcagcacagcgcttggcggtgacggcgactgtgacgtggtcggcgggctcagactgcctcgaagcggcccaattggtggactggcgccggcccggctcacaggggcagcactgagactgtcaattagcggcttcagcagcgaaggcgagccgtgttgttggaatgtgccgggaccgatggtgccacaaatgtcaacctgaggagagggggcgggtgaaagctttctttgaaatttggtagttttttttatcatatttcattaaaatttcaaaaatttccccggcggcgcatatcggcaccgcgggaccccattttaccaacaaaatcctgcttttctaccgggcgccgaaaattttgaaaaagaatttacaattttttattgtttttatttttttgaaattcaaaatcaaataaggaatagaaattttcggtaaaaattttattggtttagttttgacacattggctctaaagatatgtcaaaatttaaaatataattaacaatttattcaacaaatcaattttgctttcgccgcgttaaccatcgctgacgacgaagcggcatcatccgagcatgaatggggggggggaatgagcaccgcttgttgttggccagcggtgcgtaccgactcgtgcccgagatgggtgtgccgccgcggcagcagccgcttcgctgctagcaccgccgctttccttcccctgacgatgtcgtatcacanaattcggggtgatggtggtggttattgatgttgttgtgttgggactccgccggcaaccgatg

SEQ ID NO: 16371 - DNA, 2804 bp, Heterodera glycines
  unsure (1)..(2804): unsure at all n locations
attgaatttttaatggaatttttcggaaaaaacgccaaaaaaggcaccaaaacggcaaaatgccaaaaaaggcatttaaggcacgaaaaccccaaaaagacataataaaagtctaatttttcttaattttcaagcgcaccttgggttatttaagaataaaatcgcagcgtaattttgtttttgtttttttatatgcacataatcgcaaaatatgcgcataaaattaagcaccataaattcatttacatataaatagtgaaaatatgcaaataactttttccaaatgagggcaaaattttgcataaatatacaaatggaaatatgtaatagaagcttcatatcaagctaacatggttttagtgtgttttttgataaatatactgtttgggagtttggctgggctgataacggcacactctattggcaacgtcaatgttaaatgatcgtaaacataattttgataatggaacgtgaatttgtagcaaatttttaattgctcaaatattaattttcccttgtaaaaatagaagagccgatctcgagttaaaaacataactttcataaaataaacagggatccgatagagggggtcaaaatatgggcctatgcaaaatttcaagaaaatctgaccctaggaaaaaatttttgacccaggacaaagttttttctttttctctcatttgggcatactatttccatgtctctgacatataaaataacacatggttcatttttttgccaataaacaattttttaaacttttgactaattaagaaatattcttcagaattttcccttcaaaatgagcacaaaatggttttgtttggtctattattggccaagttataagctaaaaaaatttcataaaatcaagggtaaaatatagtgtgtaccttttactgtttgtatttgttcttttggcgttctgtatttattattattttatttatttgctttaaaaaattgaaatttatacacaaacacaaagaggatttgaacctgagaccccctttttgttgactaactcacagaccactaagacaaaaaaaccaacttatttgcgcttggagcccaaaattgactcgccgtgtacatatttcgggatttaacatttttttgtactttttagcattttttcctacattttttgcatttcccgtttttgttcgcaatgtttgagcttgcggaccagtctgacggtaccagcggcataaagcagttgtgggctttgatagacccaatttggaaatttgaccgtgccgaattggtcgactgcatggcaaaacgggtcatctacgagactggtaatagccccattttttaaataaaatttgatgggagcgggtaaaggaaaacatttaaaatccgacaataaacggcacaaatacttgttccataattttcgtatatataaaagacagaaaaattttctgctccctctgcaatttttcgctctttaaggcaattgagggccaagtgtccaccttttcgaaaatctcaaaatttgaaaaagagttgatgaaacacattttagggattatcggggtcgttaatcttgaatctcacattcaattccgaccaattctgcgcccctaattggattcaaatgataagccgaaaaattcgaagagtataactgttcatgtgaaattaaatcgagcccgaaaatccctaaaatgtattatgaacttttgtaaagtttaatttatatttttttcgaaaaagtgggagggggtaccacctagaatggccatgatttttaaaaaacgttcgggatttgtatttgcgttttatttatttgattttttttttgactttcagatgaccttatcgcactggacaaaccattccaaatggcattttcgtcgggcccggatgaccagccccaacttgacaggattttacaggttacccccattttaccatatttttgaaaaaatgtggaccaaaatgacaaaaatagtcattttttggcgaaaaacggcttcaatttatgcaaaattcttgctattcgggatttctaaaaaagaaaatacaccctcctccccctaaataatcaaattttttatttacccccccccccccaaatccaagggtcaggctatggccttgaaactctgacacctcggaaaattgaaccctttcatcgggtattctaacaagaaaatctattaaattttcacaggacttaaagaagcacattgcgcccaaaattgaccggctgtttctcgtcagttcgttggacaaaaactgcagtggcgtcatcgttttcgccaagtgagtcgacagacatttgaccctgaacatcaaatgcaagtttggttttgttttttgacaatcaaaatttagttgttttttttaaattactcacaaaaaaacgaaaaaaacttttttcaaatgcatattttttcacgaaaaaaacaaaaacaaatttaatgtcactgagaagtgacggagcggggggggggggggtgaaaattcgaataatttttgggtctacaccaaaaaaccaggagccaggtcaagcagttggagatgaaggcccaactgcagaacgacgccctccttttccgttaccgagccatttgcaagggcgttccgaagttggccaaggcgcgcatttcaatcccattnngatcaaggttgtgttttttcaaatttaaaaaattanaagcaccgaaggcggaaaattttgcatttgttttttagcgggtgtattcgttttccaccgtcccctgaaatttttanaacagaaacatttgcaaaaacaaaacctaggatttttaacagttttctctaagaaa

SEQ ID NO: 16372 - DNA, 1389 bp, Heterodera glycines
tttttcttgaaaaatttctatgttagcaaattttttttaaaaaatttctcggggggggggggaacgagctgctcccaattatttcccctaaaaaattgcttacaactaaatgccactgtttagccgggccaaatttacgtgtactgttgccgctggcaccaatgcgatttccaatttgactgccaagagggcctcaccgagcacatttggacatcgcacaccaaccaaagtcagtttttctgtcggacgtattttttgaatattttggctcaatttaaaaaaaaacaatttgtttttagtggacggcagtgaaaatcctttcgtttgcctgtgggcctcgtgcctgaaattccggcgcgagacgaagcccttcccggcactgcaaaggctgaagcggcacctgagggaacggcatttgaacactgcgggacgtgtcatttgcccaaagcagaggacaaagttggtggaggggccaaaaatttaaattcaaaaattcgctatacaatcggtcccattgaaaaaatgtgacaaaagcgggcaaaaacttcaaaaattagggtttttttttttaaaaaaattccatttgagtaccatggtagggcgaattgttccccaaaaaagcgcaaattcaaaatgaacagcttttggcaatgcatttttgctctaaaatttcatttcccacacattccgtttcattgacgtcagtgcgacagaatttaccattcctttcccccctttttacccaaaaaaaaaattcttttttttcggctaaaaccacggatctcggcaattttcggttagctcggcgctttgagaccccctgttttttcggttatttcgttagtttcggttgtccaaccgccccgcccattccattttcggtctttgttcattaattgccccccccccccccacttttgccaggaactttttcgtctatttgccgcctccgctccccggcgccacgaatggcactggtccgtccacctcctccgcctcgacggcactgtcctccatcattgccgcctcctcctcctccgctaaggggagccatcacagcaatttgctgaccggtgtcgaggccggcggtcgctttgtgcaccatccgttcggcaagccaccgccaaatccggtgccgtccaaagtggcgtcaccaaacgatggcggcggcacagcgggcggtgacgggcgcacaacaccatcgtccaccaacagcggcaccaccggtggtacgccaatttttcagtttttacaaaatttttccgtgccgctggggcaacaactcggcaaagatcgaacagtttgtttctttgttgaaaaatgtagatatattattccaattgtttgcaaaaatgcaaatgattcgtaaaaatacggcaaaatcgtttt

SEQ ID NO: 16373 - DNA, 1379 bp, Heterodera glycines
cccccccccccccaaacggggcgggtgcccattttgcccagcgcccagttcataatatgaaaggagagttggtcaaccaaaattttgtgaacgggggggggatcagcggcccaaaacaatttttggaaaattttaggtataattttgggcgccggcccgagaaattgtttggaaaaattttatgaacttttgttaagaaatatattcaaaatttcaatataacgaaacatttttgtatgatttccctgtcttcggttaaaggtttcttcacctcgtccactccgctggtggccgccctctcacagccatccatttcctcctcgcccgcctcgacacgttatggggtgaacacgccgaaatcgtcgtcggctgcgtcctcctcgacctacggcacgacgcaaaactatggcggcggcgctgctgccgcactgtgcaacggcggcggtggcggaccgttgccgagtccggcgggaacaccgggcggaggaggttcacggcaacagcagcagcaacaacatcactatgtggtgcagcaacagaccaatgctggaggagcagggtgtgacggaaacggaagataccatccacagcaacaggttgggtggcgatcggaattaattcgttatacacaacggcccaattttgggctctcagtgcaaataggtttattatttatttagtaatcagaacgccaaaactttgcaaaacttaaaatttttttggaattttcccttgtaaaattagaagagccgatctcgagttaaaaactagacagctaaaaaataaactgtgattcgatagagggggacaaaatatgggcctatacaaaatttcaaaaaaagttacccacaggaaaaaattttttcccagggcaaaaatttcaataattttaattcttttttagccaagtccacaatttaaggccaaaccaaataaaatttacaatattctccagaattttcccttcaaaatgagcataaaatggttttatttgctttagtattcaccaagttataagctaaaaaaatttcataaaattgtcgatgttgtacctaaccaacgctttttgaatatgattttttattgccccgaaaacttttattaaagaaaaaataattctcgcctagtcaggcccgtatccagcaggagggaggacccgtgccccccccccccccccaaaaaaaaatttcaagaaaaatgagtaaatttttttcaaaattttcataatggacggcgcctattggcccaactgccgggtcctatttttatgcccctccaagaccttccccacccaaaattttccaaaaactttttttttgaaaaaagtttaaggaataaaaattgggacaatactgtcccaatttattacaggagagtcg

SEQ ID NO: 16374 - DNA, 2157 bp, Heterodera glycines
atagatacgaaagagagacgcgtgtagcaaatgggagacgtgctgctgaaccaccttccaatcatcctacttacccacccaacagagagcacacacattgttaaacagattgaaaaaatttgcgtttgtaaaaatgaaaaacgacacttgggtgggggttagggagggggagggtcgaagtgaataccggtaagtcaggaggggggggggggtgtcaaggattgcaaaattcttatgaagtttcatttgaatgccttttgattgtcctttctctattcgttcacctttccatcaatgttcatatttcacacataaaaactaatatattctgctggtatatttggtcacattggcccctctttcgatatttttcccacttaaaatgcccttcctacagttataaaagcgtgcctattccgctttgttgttgttgctgtcccgcgtcattcggtgatttttgtgccgtcctttccccttccttttcctgctcttctcctcccttcgttgtgttatcgttgttttgtttgtattcagttgcgaatttgggtagggtcaccagcggaacatcgccagttggcgccgctcttccaacattaatctcccaatcagtcaaagaaggcccttcttcatccatctgttggttattttgtgccgcatttctaatccctttgcttttccgtgggtcgcttggttttggcatgccttcaatgttgttaagcagaatcaagattgggtgtttcttctgcgctcctttcgccgccgaggtcgtgccgctgttcggtgattccggcacatctgtggcttcggcattctctggtgcctccgtctccccccttggcattcccttctgcttccgaaattgttcatctaccgcgctctcttcgttcgtctccgtgtcgctgcgaagactgcgcacagctcctccattccctccattttcatcaaattcggacggcagtgtcatatccgagtggtcgttggccccctcttcctctctgtccgtcccttcaattggctccaccatttcttcctccgtcacttcgtcaaccaattccaattgctcagctgcactgccattcagaatgctctgcagattttcatcctctgctgctatggatgttcgccgttcgttctccccttgcccaattattgggttgcaaattattcggttgttcaatcgaagcggaatgggacagttccgcaacagactgtcgggaagtgcagcagacgcgccgcccggcgcagaaaagaaattcgagggaagcgacggggaattttgtgttgaatttgttggcgttgtcatacgcaaaagaatggacaaaacgaaaatacaaacactttttcagttgtctttgattttggtgagcggtgtgaaagccgacggacagaaagcgaatggggcaaaaagagaaacattttgaaaatgctcaatgctttttgatcgccgcatttttaattgtatacgttggacctgcaatggcaatttgaagtgtgaaaagcgacgggaagagaaaaagcggcatgggaatgccaagcgaataaaattgtttttattttcactttcaccaaaaaagcacactatttgatagcatttctatgggctttcgaatgataatgcaagataaaatttggtgccataaaaaaaattcataaaaggctcagaagattcaaaaatttggaaaatcgacacaaaaaaaaaatgatcgtgtcaaaaaaaaccgttttttattcaaaaataaattatatgaaaactgtcgacagtttatttaatttcaatttcaatgtaaataaataaaataatgaccaataagttgcaactttaaagagcgccgaattatccgaaatgaagaaatattggattaatggtaattgaccagaagaaatggggaaagaagggagaggagcagacgaacggacagacggcgaataagggggaaatggcgaaaacggaggacgaccgccagacagacgaagggggagagggggcagagaggatggggggaggaagaaaatattaaattagttttatatgctattttgactggtaggcgagacgtccggtggacagtgtgccagtagacgcgatgtttatttggccatatgtcaggtaataaaacttggatattagtcgctgatgtgaacaatttatggattcta

SEQ ID NO: 16375 - DNA, 1518 bp, Heterodera glycines
tagcaaaagcataaaattgagaaaaaaagtggaagtgaggaaaaagattctaacgagtgaaatggggaaagagcaaaaaccttgagatgaaatacataatgtggggaggggattagggaaagttagcgagataattgaagattttaatatgcatttttatttgactttgtcctacttttttgggaatttttacagaatttttctattttttaaattgaattattcgtgcataagtgtttggggcattacgttgtccaactaggaaatgagtgcatttagtttcatttttttcttgaacgaatgtgctacaagggagcattccgaactgtgactgctctgatcactaaaactacttttatcgtatagagtggcagatttgctatagccaattttcggcttttttggctaaggagcccaaaaatatcagaaaaaatcgattaaagttccgaaaaatcggcaaaatggtcaattttttaaaaattcaaaaaaattcaaaattgtgctagagccataaatcttttttaaaaatgatcagagaaagtttctctatcaatgtttaatttggttgagtttgacaaaagttatgacgatttttgtgctgaaaaaaaggtacgagtcggggcagtacgagtggcctagtacaagttgagtttcgttccacagaatcaacttaatgggctgactgaattaacagataaacaaagtgccacaacccaaccaaaaaacaatccgccatttgtttttacaataaaatgcaatgggtatttttgacactaatcctactttttcacctcttttgcacaatttgcgtttgtttatttagaggccataaaatttgcttgccttttcctaaaatacatacttattgtgtttccagcagacttcttaagatcgctgatcaaaaatataacatcaattagaaattctgtgaaagtcaaaaatagggggaggggagggcaaaccaaccgaacagttgaaacaggcaaaaacatttgttagcaacggcaccgaaggaggcgaactggcggttcccggctgtcacatgcttttcgcatgcgtgtgaacaatacaaaactaacgtattcgacgttctttggctctgggctttgggaaggaaataaaatgagggaattccttccccggttttccctttgcatttgccccggcaatcgataagacataaataaactggccaaaaaccaaatgttacacaaatgtgtgccaaaaatatcattttcattaatgaaatcctaattcagctgcgcgtaaaattaaccgcttacaaattaggagcactaaattaattttattaataaaaccgctgctcgtcaaaatgtttccaagctaaaaataattaaaatattctcctccaaaaaattaattaacttatgttaaaaatgaaatttatatttgccaataaaaaataaaaccgatggggaagatttgacaaattttattaacaaaaaaaaggaaacaaaagtaatgaaatgaacaattggaaaattttttcatggaaga

SEQ ID NO: 16376 - DNA, 2931 bp, Heterodera glycines
  unsure (1)..(2931): unsure at all n locations
aataantttgttgaatttatatttataaaattgtcgttccctttttataaaataaaattgcgaaattctgaccagacaattctccacatattctattagcccatcaatttcaaacttttgttcatttagtacaataaaattggtaatgagaaggaattaaattttgaaataaatgagaagaacaattggtcccataaaaaaatacatgagggaattcaaattttaaaaggacaaacggacattgtaagaattcggaaagaatttgacgccattttcttaaaaaaattttgatttgtccacaaaatccgtgccctttcctgatcaaatcatttgctttgttcctgtttatttaagggcattccaatggcatagggagtaaagaaaaaacaaaaaaaaacagccaatttgttttgaaatgcaaattatgtctctaaaatattaggtcattaatactgatcgcgaatctgaaattctaatcgttgttgccctttcccacgtattattgatctgattgtgaaggaagaggtttgacagcaaccgagttttgctgtgtcatcgctgaggacggcctgcatttgtttattatctaggcgataataaacaactttttgttggacctgctaacagtttgacactgttagtagtgagaaattttgcgccgctgattttgtgtcttggcgacacatttcagttcatccacgcgcatccactctgtttagtagcttggcgctgctaacaattgagtggcgaacgacacgtcatttaaaacgagtactctcgagctgaagggaaagtccacgagctgtggttaagatgggcgacgcaatccaacaactcactgcggcaatccagcaattattggcaaatcaaaatggtgcgccagccgcaaatgcgcatgcttttgccaacgcttctgaccatcgactgttttgagccatcggacgatagaagcatttctgattggttggaacgcttcaactttgccatcgactgtgcggcaccgcagctggcagaccaggcgaaggtcaagctgctcatgacgaagctgagtgaagtggctttcagccagttcagcaaatcatgtctgccgaagaaagtcatcgattttgactacagccaaacagaggagcgcctaaagattgccttcagccggccacaatccatttggattgatcgctatgaatgtatgagggcctcgaaaagcgaagatgaaagctttcgtccttttatcaacagacatatgcgactcttgcgtgattctcagtttgaaaagctcaacgaagagcaattttcttgcctcatgcttttgacggcactgaaatcaccgaaggatgccgagctgagaaaacgaattctttcgaagcttgcagcgaatggtgacctggtcgagtatgatggagtcgtcgaatacctccaaatgtaccagtcaaccatcgctgaagcaaaggtcgtcgaacaacaaccgatgggctcacgaaaaacttgatggcgaacaaattgaaggcaaaaaagaaacgaacgaactcggatcattcgtcgaatgagagcagcatttcgacaggaacgcgcagcagcaatcgatcgcaacgcgtatgttggcgatgcggtttgagacattcgtcgagcaattgtcgacatgaaacaaccgtttgtcgaaagtgcaagaagagtggccacttggaaaggatgtgtgccaagcaccaggcatggttaaagaagaatggaggaaagaaggaaaaagcggtgaacaacgtccgcgttggaggagttttcctggttaaatctgagaacgagacgaagaaaggaataatcgatgttccgattgatgtgaatggaataaaagtggacttcattgctgatttcggcaccgagagaactgttctttgtgaggacacggtgcgccaaatcggaactttgaaattgagccgttgtcaagaacccgctcagtatggcaagaggtataagaacgccgaccgaggatgcggatgatggacggaggcctggcactttttaagggggggggggggagatgttagggttgggacccaatgactggtacccatttggccttttactttatttgtttctcccattttcccttcgtatgtcacgcccctttttccgcccataaatacccgcgttgttgacccttcctacgtatttcgtttatttcatttatttgttcccttcgttccccaatcaatatctgaccccgttcgccctgtctttcttttctttttgaataaatatttcttttattcctcttcggacttttgggcgtaatatgaattaacccccgaagtgcccagttttctttaagatatgcttctatcttctttttccattttacaatttctttttcgatttgatattatttttcatttctccgaacaatttcataaatacactatgttttagcacatatttcagcatgagcccaaggggcgaaatagtccctcttatcccttcctcctccccttcaaactcagtctaagaaatcgaaaaaaacgaaaaatgccgatggtttgtgaaaaaaatatattatccagtttgaaaatgtaaaaggattgactcccgaagatgaaactgtcaacgacgatttgttgagttttgagtcccctgcctttttaaattgattataattttatattaattccaactaattttatgtggaaatagtttttatgaattcaaatattgccaaaatattattttttgctgaattaactcaaacttgttcttttgtgaagtatgctcttaggattaagctttgcttgcaattatttatttgatttcatgttttgttttttattaacattgcttttatcgaccttaaatctaatttgaaatataatttattttaatgttcatttgaaattgtttttttcttactaaagtatcatttatctaattcaaggcgaaaataaattt

SEQ ID NO: 16377 - DNA, 3017 bp, Heterodera glycines
gtccaggtccaggccatttttcggcaacctggatttttcctggacctggattttcctggatttttgtccaggaaatccaggtccaggtctaattgaaaaaacccaggtttaggtccaggcaaaacacgaaaaaacctggattttcctgaacaaaattttagaatttgttattttaattgaccgatatttttttcaagttttcaaaaaatgattaaataacttagaaacacatcattattattatttagatatttttagaggtttataagcaattaattgattttttcaaacatttttttgatttttaaaatgagtttcaaaaaatccaggtccaggcctggatccaggtcccgaggagcctggatttttctggacctggattttcctggatttttgtccaggaaatacaggtccaggtccaacttggaatccaggtccaggcttttttcaaaatgtcgatctctacatatttggtctctgaacaaaaaaaaaattgtataaaaatgcaaaaatgaaaaattttgaaagatttcaccggagcaaaaaacttacaatttttcttcagagaatcgaaaaaataaataataaatttttattttttattttgcaaaatactgaattaaaatttattttttgacaaaaaattgttgtaatttatgataaaataattttttataaaatttttgaaaatctttttttttggttgatttattataaccaattagattatttagcaccaccaaaatcattattcgaataaattctgaagtccgaatttagccaaaaatgcctgaactaggattttggttgcaccctcggaatactgccaattgttctatattttttttgtgaaaatctctagaatcgtttgaaaatttggctactttaaatcaaaaattctcgcctttttgagtttctctccgttctcgcaaatatgggaggagcaaagttcctattttagtacacattttggcaaatcataagttaattaatatacaaaaaggaattatttttattcctcataaatttgttatattttattttgggtattttttagtaatattgtagaataaaatttactcttaattatgaaaatttgcacatttatcgcttctcatttaataatttacaaattacacacccaaatcaccaatcgtttgtacttcagtttcaatatatcctcaataacagcagcacatcggatccatttttaaagcattacaaatcccacacagaaaaggatgtagaaaacagcggccaaaaaaatggtcacccatccaattaaattgcctttttgaatggacaaataaacggccaatttcagcgcatgccaccaataaagcatgccaacaatgatgaagatgacgaggatgccggtggtcatcgacgcgccaatgttcagcttgccaagcatgatcgggtggccaatgtgcagccaatggaagtgcaggccgggcattggggaggtcaaactccagtccatcactttggcatcaacaagcagggcgctaacggtcgaagagccttgctttcctaaacaaaattaattaatgattaaatttacatgaaaaattaaccacaaaaatataattctgcataggttacagaattaaataaaatgttttataaaatattaatatatttgacggcaattcagtcaaatttaataatatgatatattttttaatgcaaataataataattttttaaagaaaattcaatatcagtcggatttgattgacaaagaaaaattaatttgaagggttttatgttttcgattttaatcataatattttttggatataatttttaattaatgaaaaagatgaataaaaaagggatataagcttttatccctgtataaacttgcaaatttgccattttcatgcctagaaatctcatcctttatgatgacaatggtctgactgattttaaacgaaatgttaagaaaacttcaagaaaatttggaaaacttttcataattcaatattttacccgcttcaatgtaagcatttatgccagctcccaactcaatgccgcgctttcggcgtctccgattgctcttttttgtgtttgtattttctccactctaaaataattcattttaaatttttttattttattttaaaaatgtttagtcaaaaataacacccacactgttctgggcatttccgacactcttttcaatttcgttctgtacctttttcaggccaaagttaatgaaaaggtccttcaacatttgtgccacctttttgaacgctttttcattactgttcgctttctttttttccacaatatttgacattttcttaattgttgtgcccaaattttcattcaatgattcctcaaaattcggcacattaattgatggctcaatttccgacaaatcagtgattggcacttttcctattataaaacacattaaaaatggttaattaaaatttattaaaaggttttgaataatttttattgcatttattagcaccatcgttcgctttttgcttcattttttcatcaccatcattcaagacaaaattcgctgtcgagaaaagtttcaatatccatgcgcggaaccaatctttgggctgcaccaaaatttttttgaacgcaaattttactccctttttcattggcaagtaaaatggaataacaagctgaaaaaataaataaaattctggataattcgtaactttgtaaaaaacaattaatcatcgataaaggtcaatccgtcagaatttattttttaaatgtatgttttgttgctttattaatttttacatttttgtttaaaatgtaagctaaaactgtccatttaaatattaataatttacggatgacggtttgacagtcaccaattatgaattttccttttatggcctttctgttgacagattatcatagtttttttatataatttatttttaaaaataatattttttaattaaataaatattcaattgtgtatatgcctcaaaatgtgaatgagttttaaaatttaaaacggaaaacttttttta

SEQ ID NO: 16378 - DNA, 1607 bp, Heterodera glycines
  unsure (1)..(1607): unsure at all n locations
atcaagccaaaattttttgtttcaccagtattattttacaaaattttcagcaccgggcaaaaaagcaggaaatttttgcagttttcgccaaaaaaagagatcaaaatttaaaaaaataatgacacaatggggcagggcgctgctgataggcgcctgtctcggcaatcagtctcgagtcaaccggtatgtttttaaaataaataagcaatatttttttaattttacaaaaatatttgtaaggctaaatgcatttttttctccaaggctacctaatttagaaaaaggcacagtgaaaatttttgaaacgaaaaaatggtctgcatgtaaattctcttgaatttcagttaaggaactgatgattacagtacagccaacccatgcttaccatccgtttcattgatccaccaaagccgaagccgtactgtactcggtccttgtcactgctgatgtgttggatggggaagcgatgggcacatgtgcaccgggccgtctcgcgtgcaatttcctcgtggatacgttccgtctccgtcttgggctcgtaccgacgctaccgagggggggggggggattttgtgttactgtatttacttcatacactgtagcaatttaaatagtaagtaaaatgcgtggaattagagacggatgggaaatgaatatttaaaaaaaagaaaaacacaggctttcagaatatttcctttaaaaggggtaaggcaatggagaacagtatgaaagaattacagtagacataattacagtatgccagacagaatgtagtaatgtacgggtttttaaataagattaccatctttttggggtcgaatcggagtgcgttcatgaattctctggagacgatcaggccatcccccttatcaaactcgtccgccacccgggccatctccagcgcagaggtcggaaattctggaaaaaaacacatggaacagaacagagataaaattgaaaaattaaaaatgatagtaatttcataatactgtacttgaagcgaggattccgtcgatgaacaacttgcgcggcaccatgccggtgcccgacttgtcaatgcgccggaacagatcagacacgcgtgccttgccgtgatcgttccacgccaaataccgttcccgccaatcgtcaaaggtgaagcccttaaggcgttccaattcctggcaataaatcaagcaattagttaattaagaaaatcaaataattcattattcattaaatgatttagatgaaataaatgaacagcataatatctttctttttaaaatttttattatgacctcattaaatttaagaaattagaaacgttgatgaatttgatgagattttacaaaatattattgcctttaagccacctatttaattttgcattttagtcacctaatttttttaaaagataaaggaatcaaaaaattatgaatatgtattaaccatccctaatgaaatgaccacctgcaaatgagctttgcgctcgttcagcttctgttcatactgtaccaagtcggtccacaaccgtttccaattgtcgtgcagcgtgtcgctttttcgccgtgtacgtttcttgtcaatggncgtaccaagcgaagagcgcaagggtactgtaccag

SEQ ID NO: 16379 - DNA, 2343 bp, Heterodera glycines
cagctcgctttgtcggcgacaacggttgttgctgctgcaagtgactgtcgcgtctcttagcgctcgccttcgcggcaccgctcgctgtcatgccctcatcgccagcagcaaaagcggcagcgtcaacaattgccggatcctcggacgcttcgcggatcaacgacagtcgcttgttggccatcctcaacaggtcgtccagctccgtctgtcgctggtgcaggtccgccttgaacatctgctgttcgtccatcaaactgaagaatttgggcattacaatcaagtaaaaatagaaatattttttagagaaataaataaaattaattaaaagaaaaaataaattaaaattttaataaaatttcagaggcggagaagagagtgggtcaaatgcgcacaaattatttattgatgtttttttgttatttctctgataatttgaaactaccgtatccctaaaagggggaagggtctatattttataatccaaacgagggacgggagggatctccttttgtaaaatacgttatttagttgaaattaacaattttagaaaagaaaatccttttgcatccgaataataccgtaaattaattgggataaattccgtaaatcggctacattaatgaaagtaatacattttcttccgatcactcacgtgctcaatcggctcagctgtccctcatcactgcagtcgcgcatcagctccaactgtccctgcttttcttcaacaaaacccatcaattcgtccaacatttgctcatgttgtcgaatttcttccaaccgctaaaaataaaaaaataaaattattttgatcagtaaacaaaaaaaacttgtaacaaattcttcaaaaatttaagaaaaatgtaaacgaataaaaaatcaaaagtaaaaaattttgattggattttttaatgagaattctgaaaaaaagctataagataattcactattgagttaatttcacccgtagactctctgaaaaacaaaaattaaaatcctgatcagctaaacaacaaaaaattaaagcaatactgatcaattaatcaacaataaaaaattcgtccctcattccgatcaatcagaagcaatagtgcacttacatgtcgcaacttctccgcccggtcattgatcagctgatcaagcagttcccagcgagtgctcatgccacagatcagctcgcgcatcggagcctccgcgcgcggatgcgcgttgcgctgcaattccttggccaactccatcaccttctcgaactctggcaatttggccataaattcgtcccgcaaatggtccagctttgtctgttcggctagcaccgatttttcgtcccaagacagcgccggacggcgcagtcgcgcttcaatgtcttgcaatgatgtgcccaaatcgtgcctaaacagcatgacgattcgtaattaaaatgattaattatggcaattaagcattatggcactaattaaaattatttaattaaatgtaaaaataccaacattaattctgacaagtctacagccttcttcaatgagctggtgagcagcgtttccttaatattatgatattctcattgtaaaaaagagactggagcattaataaatttaaaaagtattaataaaaaaaagtctaattcataagtcagcaaaattttttaataaaaaaaacaagaaaaatttttaaataatttaaaatttaaaaaaaacataaaataaattgagtttataattcgaaaggagggggaggggggaaatggtttatgaactaaaggtaccaataaaaaaacccattaaatctttaattaatcttcaaaatttttcacgccaatttgaatgttaggcaaattttagtcccaagcatctgttgaaattgagcaccattacagtatgccgatttactcaccctttgcgtggtaccgtcgttcagccgatcccattgatcgttcagaatgatcaattttctttccaattcagccaattcatgggcatctccaacatttgtgtcgaggatctttcgtgcccgttcgcgcacctttaaaaacaaataatcaaaaaatacaaataattattttttgaaaaaaattttaatggtaattaatttactctttaattaattaattactctgatcattaatgatcattgatcactcaccttctcaacattttccctgcgcgtgttcgcctgctccatcagctcatgatgttccttcaccaaagtgtgcaatgtgtcaacatcgcctaattggaaaaaaagtattgtttctcgtgcataaatctgttagagagacgtgtgtgatcgaacggatatactacggtaaaaagaagagacatgtgtgatcaatagggaccggattttaat

SEQ ID NO: 16380 - DNA, 1653 bp, Heterodera glycines
ttttcgaaaaatcattaacaaaaatgcaataaaaacgaaaaatacacccctaagaaatgacacgaaattttttttttagaaaatagcatctaaaaattgaaaaaatttcccaaaaatttctccctaaatttttttttcttgatacaaattttttctttaaaaacttgtccttattcaaaaaaagctaaaatatttagtaatttcatttacaattgaagttttaaatttttacatattttactacctaaaaagggttaataaaatttttatttgcctatttgaggatttttgtgcctatttaatgcctattttgctatttttcggcctttttagtgcctatttcgcgatgcaaaaaacgaagcactaataattaactttgatgtaataccaaaagatacaggtgtatcactctctttttatgagaagcaaaattttattataatttgccggataatttcgaaaattttcagcgtccaaaagtcgttgccaattattttcctaatatgggaacaattggtgcgattcgacgggcccagtagtgcaaattttggccagcacgggaggaaaaacgcggtcaaaattcgggtccaatatatttgaaatgtaagtgagaaattggcgatgtttggcgcccgtgttgaacacacattcgatcagtcccatcagttccatgtaccgtagggcacccggcgcggcaccgtaatttaactgaaacggtaggaatagttctcagtgatcattacattttcgaatcatttttgtgacgtgctttggcacacaatccccaactgatcgaaagtaaatgtttaagtttccgaacaaaaacatttttcaaatgatcatctgttatatgtttttttggtcgaaaaatcgacaacttttttttaattggatagattataaatagctaaattcaatatttctatgaaacacttttgcaaaatttggaaattagaaaatttggtccaaaaaatggtaacattatagatggtacgccctttttttcggaaaatattttttatttttaaaagtcgtgaaagcatgtttccgagagttttcggggacactgatcacgaatccgacattcatttcgaccaatttctaatcccaaaccgaattcgaataaaagttcgaaaattcttgaattctcattttttgtttaaaatggtttaaaaaagaacggcacctgcaaaacactcattagcagtgaagaatatttctccgcttcggtgaacaacaatttctgtgcctggtcactaagccccggagaaactgaattaacttttttaatcaagtaattttggcatttcattaattagctgacccatatgagagaaaatgattgcccgaatgagtacaaattcttcggtgctcagttttaaacggctgaatggtttcacggctttacaaagcaatttgtcagccatttccatgacacttaaattccaatacatttattaaagtaaaattaaattatttttcttttttatttttgcatactttgtgttgtatttaaaattcgattttgtgaaggcataaatgagtggcatatcagctggagtacaaagaacgtcaaaactttgttggactgagtagaaactgttgcataacacatacaatggcatcgcaatattactgcacagggcaatcttt

SEQ ID NO: 16381 - DNA, 1817 bp, Heterodera glycines
  unsure (1)..(1817): unsure at all n locations
aaaatgttcttatttttgaccctaaaatcttattttttggctttatccttattttgaaaattttgaaatagaaaccctggatttagacaaaaacacccataaaaattgactattctacataatttataatccttaaatttggtcatttttagacaatatctatgcaattataccaaaaaagaattgaatcgaggcgaacatcgaataaaggaatgtggagccaaacacatcattcaaaaaaaatttttgagattttttggagctaattaaaaacaaacccccgcccccgtccccgggggcgagaattttctacccccgcccccgcccccgcgactctgacccccgcaatcccccgcccccgcgaaaagccacccccggggtccgaaccctattttaatacattgtaataaaataaaattaattaattaaatatttttattcattgcaccttgtcactgatgttcaactgttcaaagaattgaaaggttttaccaatttcaaatacaaataaaaaatccatgaccatatgcgatggcctattgccaaaaggaccaattcgacgtattatttctaaaatctcttctgaagaatgaagcggtggttttgtctgagattcaaaaaaaaattattttatttaattaaattcttttaatttgcttacagaaaatttatcggccaattcgagcaaatttaatttccgcccaaaaattgactcaaatgaatcgcattgttcataaaataattctggaatcgttgtctgtgagtagcgaattcggcgtactttctgctcaatctccagcaaatggttcagcacaatgaaacccaaaaaatctttttttaccaattgctaaaatcagagcttttgcatttaatagaatttgctaaaaaatcctacaaataatattcacaagcttatgaagaaacagagtaagttattcatgccaattttcttagcaaccagttcaaaaaccagttttggatttctctctacctcaagaatatttttcttgttaaggcgtttggcattaaaaaatcagttacagagctaatcttcttaattttgtctttatctgtccatgattagtgataaccgagtttggtatgtgacatttcaatggtccattggtggcgctggtttctgtcgataattccatgccaatttctgccgaacttggtgctattgctgctgctgaatttgttgatgtcattagccgtttgattcgttgtatatatgccaatatttgctcattattgacattgttgacgcaaactcttcgaggattcattccgacagtaaagcatttcttcagacggcaccgcttacacgttgaatctttgtagaaaaaattcttagattttttaaatttattttaaattcttttcatttgccattttaaagactgatggataagtgtaattttaaatcacaaaaaaaggatcatttaaatttataattgcattttctgccttttttaacgtcgcactctccggcacttttgcaataatattccttcatcgacgaaattgagcgacgaaaaaaatgtttgcaagctgaattattaatatttaattaaagttaaaaatacaaatattattttattttaattatttcattatttttagagctttaacctttgttctttttttaatatttttataaaaacaccttcacaacatttgacgccagaatgaaatttgcatttttcactacaaacgnaacatttgaccgggacagattcggcagaatcaggctcaatcatgctcttaatacgggcaagaattttgaaaataattctccaaagtttttcacactaaaa

SEQ ID NO: 16382 - DNA, 3067 bp, Heterodera glycines
tttaatcccaattctttaatccattcataaattttccttcgatttgtcaccaatttcttcgctattttcgaattaattttatcccattcttttgctgaatattttcttccgttttgctttattttctcttttattttataatattttccaattatttctctttttttctgttcatttcgtttttcatcttctttttctcccattttctccaaatatttcttcaaatgacttttggttcaactttttgtttggcattatgttatctcgatgctcccttttgcgtaaatgaaagtttttttattatttctttggtactgaagtgattaattttactgggactaaattgttctgtttgacttaattcttaggtttttaggcgtaactcatcaagtgcttttgaatgaccccaaatttgtccatgtttgacctttttaaaatgttaggagggccctattttgcttattttcccgcatttttaaccggttcaaaaaccggtttaaacgcgttgccgcagactttttttgatcgttctatcgtattcagcacctaagaaaacctataagtgtttttgtgagtttttggctctgggccgtcaaatacatatttaccgatttgataaataaaattttttttaaactgtaaaatcaattaaagatgctttttctaatttgttaaaccttaatatcaatatgaaaaaaaatatttagaaaaatcatttacacgaaaatggttttcattaaaagcattttcattttccactttatattatttttatttattaaaagaataatttttaaaatataaaattgtaaaataaatttattcatattattctttttgaatgttatttaattttttatcagaaaaattgatcagatgaatcagctaatgaaaaattagaacagaaaacatttgacgaaatatttggagaaaaatgggaagaaaaagaagaagaaaaacgaaatgaactcaaaaaaaagagaaataattggaaaatattataaaataaaagaaaaaattaagcaaaaaggaaaaaataccaaaaaaatgaatggaagaaaattgaaagaaattagcgagaaaatcgaaaatgagtgacaaggaaattgcaaaaacattgaaaattagtcggaatagcatttttaattggaagaaactagggttgagcggtaccggtaccggtaccggtactggccggtaattaccggttttttttggtaccggtaccggtaccggtttttcaaaaatgaaattaccgttaccggtttgtctagtaccggtaccgccggtaaaaatttgctctggtaagaatgggggtctggtcgagaaaagagtaggaaattggtgaagaaggagaaatttttgagaaaaaattaaattttatttcgtttagtcatgggattacagacatgcacatgtggtgtagtggttaaactttctacctttcataatttttcgcctgggttcaaatccccacttggatagaatattcctcacattttctttaccattattttaattaaaattttaattttaaaaaatattccaacttttttctttcatgttaagcatcctaaaaacccaaaaattaatcaattggtcattttttttacaaattctgttaacaaatcgcattaaaaattacaaaatttttcccggcggcgcctatcgcaccgccggccctccttgtcccccaaaagtcttggaaaaaacgtgccgcgtaaaaagcggtgttgaaagcaaaaaaaggtcattgatttacattaatttacatggccggagaccccttcgcaaaattggaaaattggctgctgaccccttgttttgcaataatctgaattttgaggtctacatctgaattttagtgttctttatcctgaatttgaaaaaaaaaacttggtcaacctgaatatacatatacttctgaacaattctaatgctaaaaaacaggtactcgcgcgaaaactgaataaaaattttgtatttggaaaattttgtccaaaaatttttatgttctaaaattaccggtttttaccggtaccggtaccggtttaaaaagttggtaccggtaccggtaccggtttttgcagtaccggtcagtaccggtaccggtttttttgcaattaccgattaccgctcaactctagaagaaaccaatagagaaagcattgatttggcttgcgtgaaaatttgttcaaaagtccatgatgtccatgaaaaagaaaattcaagaattattgtttttgttttggaaatttgtgccaaattgactatcgtttttaatgcattttttaaatagcaaagaagcacctgctaaggatgatggcatggctcatctgttaaaagccttggataatcaactaatttgtaagggaccccggcggttcgacgacttcacttctcaccctttcttggctataaatttgacactcaaaattagctaacttaattatgtttttaattgtaaaaattgaatcagaaaagaataaactgcaacaaaagtcatttgacgaaatatttggagaaaattgggaagaaaaagaagaagaaaaacgaaatgaactcaaaaaaagagaaataattggaaaatattataaaataaaagaaaaaattaagcaaaaaggaagaaaatattcagcaaaagaatgggataaaattaattcgaaaatagcaaagaaattgggaacaaatgataattatattaaaaaatggattaaagaatttggtcatcaaaaacaaaaaatttgcgtcgtaattagaaaaaaaaatcaaatttagtaaatcattttaattacaaatttattcattttcgattttgtgtatttatatgtagataaaattgttaatttcaattaatcaaactgtaaatttttttacactaaaaatagtaaataattacatatctttttaatcgacaaatttatttaaacttataatttctattatcaaataccagtttctgcgtgatacctttgtttgtctaaaattaaattaatttgtaaagattattaaattacctaatctgatattgtgttaaattgaatattttgacctctctctgcttaat

SEQ ID NO: 16383 - DNA, 3442 bp, Heterodera glycines
atcgtcaagatacgcgaatacacctgggataccggcacatatttggtccatcagatgttgaaatattgccggtgccgatttgactccgaatggcaggcgttggcattggaagagtccgcgatgcgtgttgatggcgcacaattgcttggatttgtcatccatttccatttgcaaatatgcatcgcgcaaatccaaatttgagaaaaatttcgcgccattcagtgaagcgtagatgtcgtccggccttggcagtgggtgccggttcaattccaatgcattgttgaggccagttgagaagtcgatgcagactctcgtcttgccgtttttcttttttacggccaagatcggtgcggcccaatgactgaaatcgattggcttaattgcgccaatttgaagaagacggtccaattcggcattcacagcttccatggcgccatgtggaattgggcgagctcggcaaaatacaggctttgcatcagaccgcaaaatgagatgcgcctttgcctttgagcagtgtcccagtccttcttcaaagacttccgggaaatctttttggagtgccgcttttagcgttgacacatcattgatcgttttgtttggcggcttcactgccgaaaaattttcaatcattgtcgcctgatcagccgatttgctggacggaaataaaatttggcggggaatgatctccaaagcttcgatccacggcaatcccaataaattgtgtccgacttctccgctcacataagcgatcagagtttgcggtgttttgtcggaaaattggacggtgcagatgaatttgccaagcaaggcgaatggctggtcattgcagtttttggcatcgatgtcggatggagtcagttccggttctcccaactctcgccatgtttgcaatgaaataattgtggcctgagcgccggtgtcgccattcatggaagtttgccttccatttatcaaaatgatcaatttccaccatcggccttgagttgtgccaacatgtaggcaatgtgtgtccactttgactgtgtggaatgaccggtggctgttcggtggggcctttgtcttgttttgtcggcagactgtcgaaatgtgcccttttttgttgcacttaaggcaagtggcgtctttgaatgtgcagtcggagcgccagtggtcggatttgccacatgatccacaaggaagtgttggacgaccacgtgttggctttccacttgtattggcatttttatgttgccgttgatttgtgccgctttgtctttgtgctgggtcggtccattgccgcggccttgtgttaatggcgttggtgacaattggcgggttgaccagcgacagggcgctttccttcacaatttggattgcccgtaattcctcctcaattttcttgagcgaaatgttggtgccatttttctgagcgtcctccaacattttcaatgctttttgtcgcaaatcatgatgttcatcgctgagcgcgatgactaaaataatacacttgagttgttcctttgtcaggctcaaatctgcgttttcacatgacgcgttgatctgcgcaataagtgacgacacgtcctgtcctggttgctgtcgaattttgaagcattcgtagcggcggacgaacagcgaacgtgtctcggcaaaaagctgtttgaggtgcgaaatggtgtcattccaattcacttggtccggctgggttgggctgatcgtgtcacgatatttgctgtactcctcctctccgagtttgccgaggagaagtcgcacttttgaggtctccggcagtgtgcttccgtcgtcctcgatcaatttcccaaaccgtttgaaccaactttcaaatgtggtgccgacctccggattgtaatggaatgctgaaagccgagcatcaatagagcttgccaaattggcattgctcaaattttctggtgcggcgttttgcggtgcggcatttgtgaccatttgttgcagtgcattaagcaattgttgaagttgctgcgggtccatggccaattgaagaaaaactgcacacggcagactttaatttgccgaaatcggagaaatgatgtgccgtaaaattggcttgaaatagacgataaccgtgcctcgagatttggcaaaaatcggttcttgtcgaagatgaaaccgtgccttgagatacggcaaagattcggtttatgtcgcacaaattgttgataaaccgtgccgtaagatatggcaaagatgcggtttagttgcacagattgttgataaaccgtgccgtaaaatatggcaaagatcggtttatgatgaatcaccacaagcaatatcagcacgagataaagcttggaaaataaacgctgtcgttgagctgctgactgcgccaaaatttgttatgtccgaagataacaaattaaataagtttatttgccgaagaaaataaaataataaataaatgcagagaatataaattgggaggtcaaaatcggtgggcacaataacaactgaatgaggggaatgggagggggaagatggcgaagtggcgtggggtcatacacctaatcaataattacttccttctctaacaataaactaaaaatgaaaagcataaaaactaatttttatgcccaacattgtttcattggtggcgccaactcggggccgaaatgccgttgtcgctgcattcaccgtctgcgaccggtcgccacaatcgccgtcagtcgtggcgacggcgtcgatcgccgatgtgccattgtcgacgctgtgcgatgacagacgaatcgccgatgccgctgaacagtcaaacagcagcgatcggcgagcggtcgccgatggctgcttttgttgccgctgccgcggagatccgtcgatcagtgccgggaaagcggtgcgcggggagtccaatggcacagccgtgccgacgtacgcttcgtacatggacacaccggcgctgctggggacgtttgctgcaaaagcagggaatgagtggagctgtggaaggagttttaccgtatggctatcgtatcgacattaaaaatgcgttaccgtgtggtaccggtttctctctctaacagcaattttagtcctaccgtattctaccgtgtttccttaaccgttacttattagggaagaagagctaccgtacccgccaatttataccgtaactatcacgtcgtaaacgagaaattgcaaaaacaatcccttgaatagcaaatttaaaataatcaagattaaatttagtccaagaataatttcctgcaaccggagaaattttacgaaattgcaaaaaaaaaaaaaaactcaaaatttctcaaatatttatttttccaaatttcataaattttacgaaattacaaaaaaaaaattaaattaattttcacattacaaaaattggcacttttattaggttcatagggcacttttagaaattactatcataaactaaaaatgaaaagcataaaaactaattttttatattttt

SEQ ID NO: 16384 - DNA, 1048 bp, Heterodera glycines
tccatacctcacatatactcaaacggcccgaaaatcatttttagagcataacaactgatgacagccactgtcattgtttccaaagagatttctattaccagattgccaaaaaaagagatagccatttttttggaccgtccatacctcacatatactcaaacggcccgaaaatcatttttagagcataacaactgatgacagccactgtcattgtttccaaagagatttctattaccagattgccaaaaaaagagatagccatttttttggaccgtccatacctcacatatactcaaacggcccgaaaatcatttttagagcataacaactgatgacagccactgtcattgtttccaaagagatttctattaccagattgccaaaaaaagagatagccatttttttggaccgtccatacctcacatatactcaaacggcccgaaaatcatttttagagcataacaactgatgacagccactgtcattgtttccaaagagatttctattaccagattgccaaaaaaagagatagccatttttttggaccgtccatacctcacatatactcaaacggcccgaaaatcatttttagagcataacaactgatgacagccactgtcattgtttccaaagagatttctattaccagattgccaaaaaaagagatagccatttttttggaccgtccatacctcacatatactcaaacggcccgaaaatcatttttagagcataacaactgatgacagccactgtcattgtttccaaagagatttctattaccagattgccaaaaaaagagatagccatttttttggaccgtccatacctcacatatactcaaacggcccgaaaatcatttttagagcataacaactgatgacagccactgtcattgtttccaaagagatttctattaccagattgccaaaaaaagagatagccatttttttggaccgtccatacctcacatatactcaaacggcccgaaaatcatttttagagcataacaactgatgacagccactgtcattgtttccaaagagat

SEQ ID NO: 16385 - DNA, 702 bp, Heterodera glycines
tcccatcgcaatgattggcaccaaaaacaatgcctgccttcgagctttggcaacacattcaatgtcctttcgcatggaatcaaattccctatcggaatatgagaaatcgcccgcgcggggtctgaccatggcgaacaccggcacagaaccgttgagagagcgagccaattcaattaggcctttaattagtcaattagagagaaaattacatatttttatttaatgcaattgatttggatttaatttatgttttacccggcgtcggtgtcaatccgccaacctcaagcgcagaacaaagttcgactcggtcggcaccgccccgaatcgctgccaaaagtccgtccgcgtcatcgacacaaacctccaacaaaatttcggtcattttcataagaaaaaaaaataagtggtgaaaaaaatcgtctgtttattctcttttgttggaacagaatgacaataattaattcaataaaaatttaaagaaacttttccgaaatattaattagcaaattaattaagtaaaatatttatttaaaaatgataaatttggtaggttaatcatctgtttattaaagaataaattcaataatttttttgcattgagaagtattgcagagaaatgtccaaaattggcattgccttaggcaaaaccggcatttccccattttaaaccgatttcattaatggtagaaaattgggtacttg

SEQ ID NO: 16386 - DNA, 3384 bp, Heterodera glycines
  unsure (1)..(3384): unsure at all n locations
gattaatgacgacattctttcttctctctgttaaacctttcatacatgcatcattgaatacaatcacaatacacacattttatcagtggtttcctaaattaaaatttaattattgcaaaaataatttttaatttcaattaatttaatttttgtagcaaaaatttgagttttttttttaaattaaatgaaacaataaattgccaagaataattatatgtctgctgtttaatagtttatatttgtcattgttttaaacccaaaacaattttttgtccgttctcacgacaaaaaccaataaaaattaaaataatgacactcattagtgaattgggcacttcataaacatttggtacttaatatttgtctccgttttcatcgtcaacacattctttttccttgttccgtcatcgcattttatgtcgccatatgactgcgaattgctcagcaacaaaaaactttaaaattaatttgaaatattttaacggtaattaaaaatgagcggtaaaaagggcgccgattggtacgacgaatcggaccgtgacaaaatgaacatgttggacgcatgtgccagtggaatggtggcagaggtggagcggtaccttaatgggggcgtggacatggaggaggaggacgacgacggagtgacgggtgggcggggggaggacggggaacggcacaacacactcggcacacctgctgggggcgaatttcatttaaaaaaaatcaaaaatgaatttagcccttcaaattgctgccgcnaaaggacatcggagcctggtcagtggctttattacatattagtgtcctataattagcaacaattaatatttccaataggttgagttactgctgcggaagggtgcccaagtcgatcgagcaaattatgccggaatggttggcaatgccattcattacnttaataacaacagttaatttgatgttcatgctttgctttcctttatagactccttttctccacgcgtgccgcgaaggtcatcaggacgtgatcactgtgctggccaaccatggggcgaacactaatacgaccacgtattcatttggaaatttgtttatcatgggatgttgcattcaaaatttgttaattattattttttatttcaaatttctgtcactttatctcccagtggtctcggcgtgtcagcgatggcattggcatgcgccggtcggcacattggcgcagtgcggactctccgcggactgaactcgccggtaaattcggtgccttcaaatcggatggctcatcaggtggcgccaagcccatatatggtcgcttttttccaaatggacattgaaatttgcggctttttgaaaaaaaagtactgtggttatcaatttttttaaataattaactgaatttattgaataaaagcgacgcgaatgtttggcaccaaatccgctggatggatggaatggacgtgcacaaaatgggcgaaacgctcaaatttccgccaattttgatgagcctaaactacgcggagaacagcttaaaggcgccaaagagtgcaagtaaaaaaaaattgggttcaaaatgctgaaaaagttttgccaaaatggcagaagactttcgagcggtgatccaagcgggcgacgaggccgaactgtgccaatgggtgcgcgaggggcgagtgccaagcgcaattggagacggagtcactccgctgatgtacgccgcagtccacggccaacagcgcatcgtagggaaagcggaaaactgattcataattagcagcaattaatgaatgattaattgattccaatttcaatgaatcatcgattataatttgcttaggccgaacatttgttgagaaatgttgcgaattcggcgattgatgcccaagaaaacgttctcggactgagtgcgctaatgtttgccattgtcgccggggacaattcgatggtgcaactgatgctgcgccatggggccaacccgcgcctttcctccaccacaaaagagccattcactgcgattgaactgtcccattttgcgggtaattaaataaagcaaataaataaataaacgcatttcacattaaaatttaaaaaaagaaattgtttaggtctcagccatgacacgcttgtcaagctgtacaaacaatttttgatgagtggaaaaggcatggacaatctgaagaaggaattggctaacaaaagggagacgggcgaaattggcggcggaaaagcgccattgggcgagcggaaaagctcagcgggcattgccctggcaaaattagtcctaaacgatagcggaaacggaggcggcggaatgccatcgcccgcgtccgtcgccgggggcggcgtaagttttaccaaatggcaaattttaaaaagaaatgaagcgcaaatggtccaattgaattctcagagtcataagcgacttcgtcgagtgatcgaaagcatcggcagaaatatcatcggacttaccggcgacctaagcggacaaatcggtgccggcgcgtgcggcgcaagtgacgcgttcccaatggcgcatctgtcgcccagcggacgcgcgcgtttcgacgcgcttgtggacacggcacatttgaacggggcggacgcaccgcgatttgtgctggcggaacagattctacgcggcgacgcacgtgcgcccgcaacgacactcgcgcggacgaaaacaatgcaattggacgcacgcattttgttggcccgacagacggcgattgtaagtagagacagagaaacataaacacaagaatgcattgattacagtatcggccaatttgttactgtaatttggtctgacatggatttgggcgtttgcttcacttttttacctttgattttaaagatttttatataaaattagttaatcaattcgattaattagagattggaggggagggaggacgctggacgagtcttacgaggcttcttctggttttaaaatttgttctgtatagagttggatggtccgaggcgacactttgaggccaatgatattcggagacaatgtgccacattcgaaaagtgccgaagagtcagccgaagttaatggcctttacatggcagcccaatggaacgcagaaaaactgtttaaaaatgtataaataaaagtataattcgaattgtcaacaagaaattaaggccccaatgaaaaggcaccgccgcaaaacggacccatcccatgggaatggggcggaggcaattccgaacgtgcgagtgcccttaacaccgcaattaattgtcagaacggctaacagtcgcgggcacgaacaactgcaaaaatgttgaattaaaattcaaaaatatttcataatttattttttcaaatgcctttttcagcgccttcctcggtgtcgcgccataaaattttgccgagccatggcgagcggactactgtccgga

SEQ ID NO: 16387 - DNA, 2491 bp, Heterodera glycines
actagagttgagcgggaccgggaaatttgacaaaaaccgggaccgggacttgccgggactagaaaagtcgggaccgggacctcgattttcgtccgggaccgggaccgcgaaaaaacccgggaccgggaccaaccgggacttttcccaagtgaaaattttttttgaaaaaaattgaaaatttaagtgcactttgttacgaaaattgccaacattcaaaaatgtacccataaaattttgtatttacgttttgggggacgagttcgaggaaaatttttaaaaattttgttttcagggggggttcttggaattttctgagtcccaaaattctgtatttttttaaataaacttacaattttttaattttttgcttttaaatcgctgtttttgtggcaatgttttttcaaaaaactttcattcagcagccttacttcatcaattcgtctgtaaaatttcagaaaaataggcattaaatttcaaaaaaaaatggcaaaaatattccgaaattttttttaacctgaaaatttataattttctccatccttcaattggattttcggggggaagtggtacgaagtgcactcaacatgggtttgatatggttgtccattttatgcgggttttacataaaatcgctttcccctcccccgcaggaatatgttcggtttctgttcgacaaggtcgacaacgcgttcggcagctgcagcagttccgccgacgctggcgctgcccaaaatcccgtcgatgcgtttcgctttcggctggtcacgcgtttccgggacgaactttcgcaatgcgttcgctacaccccgcgcactgacaccattttgttgctgccaattcccatgcatttgtgcactgaggtggggggccttgggtcgaaaatccgaaaaattctttaacttacaaggaaaggaaggttgctaggatgcatttctcatttcccccgtgtcatttcccggccgaaattttaaattttgaaaagtttttcaattttttcttgaaattttcttttcaaaattttttgtttttaaaaaatagttggaaattttaaaagacaattcgactggcgggaaacgagctttttcaacctcctcgtagactggggtttattggagattgggggataaatagagcaaatacggtatcattgaataaaaatctaaacgatttgaagattttggcgcctcccacggtgccgtgccggtgaaatatttttgcgaacttttttagtactacatgggttgcttcaaaagtctcaaaaaaaaattttttttttttccaacgatatttacataaattaatgaatttttgtcatttttcaattagtccgacactgtggtgaatgggctgactgtgagccgaaagtgtgtgccgttggagcagtgtttggccgccgcatttggcgaggaaatcatcgacgattatttgtcgcccgttttgaagcgcaaaggccgggccacggagcagcaacggatggccactttccccgactttttgctgttgcaacttcgggtgaataataaatgtcaaagcgattcgcgaagggaaaaaaattaatttgaagtttttagcgatttttcaaaaaatcaaaaatttctaaaacaaaaacaatttttttttttgagtttttaagaaagacgcaattttttctgaataagcccaaaaaattttgatgatttttttttcaaattgtttaaaccaaagaatccttgaaaatctatcaaattttcaatttattggattttcaaactttcattttttttgcttattgatagattgaaaagtctaaattttctcgtgggaacgatttgctccggttttacaatttgtaagatttcaagaagatcgggcacagattattgaaaaaacccattaaactggatgggacttgagttttgcaggaccatgaatttttcaatttgaaaaatttttcaaaaaatattgcccctgccaattaatgtttaattaattgtttaatctctgctgcagaggtttacctttgacggtgttcgcggcatacacaaattggacgtggacgtgcacatcccggacgagttggacatgtgcgccttcttctcaaccggcgaattgcagccgggcgaacaggcacaaatttaaaaaaaaacaatgagggttgaattgacaaggatgggcacctttttatattgttcctccagtggggaccgaacccgcgacgttcccttgtgaggcataaaaaaaattttttaaatttgtatttggcggcgcctgtcattatcgccgaactgcaaatccaataatctcctttttattcaaaatttaaatcaaaaatactcaaaaaaacggtaatttttgggcactgctctgccaataataaatatgcgccactttttgtgaggcccctggtggatgggttggaccaacccaagtttgtttctccgtacgcaattaaaaaaaatggttaaatttgggagaattgttttttttttttttgtaccaaacaacatcacaa

SEQ ID NO: 16388 - DNA, 1219 bp, Heterodera glycines
ctgccaaaaatatgcacgaaaagtggccaaaatatgcgcataaatatgcaaataaaattgccaaatatgcatcaaatatgcacaaaaatcgcaaaatatgcaccaaatatgcacaaaaaaacttgaaaacgcgcaaaaaattacgccaattatcatatttggcattatgaacaattttgtctaacactgggcttagggttgggttcgttttcctatgaccatttccctatgaccgtttccctatggcccatttccctatgggccgtttccccatgaccgtttccctatggccagttccctattcacgtatttaggctattttcatatcaaactatgaatataaataaacacttaattaaaacaagcaagaaaattaacaaacattttatctgtttcaaatcacggtctcatttcataatttcgagaaattccgatcaaaaaggtaatgataaaatgatgattgaaaggctgatgaattgggaaaatgttagtgtctacgttgttaagtggcaaataattttgaaccatcgtgagaattcggcggtctgcttcgcgatatttctttgctgaaacgccaaatcgatggatgtgaacaggcaaatgagcactgcaggcgtctgttcgcggcttctgaatggttattcgtccggtcatcgccttgcattgttcgagtgtaaacgctccaatttgggtcaaatcgcgggcgtgttcggcttccatcatgcttaagacgacccgtgtagttcatgatgaacctaataaataaagaacagtaaatagtaaacaatttgtgagattgtcaatttaccagtcaaggacgggattaagttcgtcgggaagagccatgtccagagcaatgattccaggggtcaaatctccaattgggagaaacgcgagcgacgtgacacatcgtgcttggttcacattggtggctgccaacttcacgtaaagcgttgttgttgaggtcagtgtgaaggcgccctttgcaacggatgtcttttgcgtgatgatgttcacacgaccaaaagcgaacttcaccgtcagcactcaccttgtgaaacatgtatgaatgcccgttgtgttgaagcttggcacgcttcctctctgctagaattgtgtccattttcttatctgtaagattacaaaattaggtcagttttcttcctatttcatgcataagcatcctatccgctttaaattccccttatgtatattgcaa

SEQ ID NO: 16389 - DNA, 1995 bp, Heterodera glycines
gggttgggttcgtttccctatgaccgtttccctatggcccatttccctatgggccgtttccctatgaccgtttccctatgcccagttccctattcacgtatttaggctattttcatatcaaactatgaatataaataaacacttaattaaaacaagcaagaaaattaacaaacattttatctgtttcaaatcacggtctcatttcataatttcgagaaattccgatcaaaaaggtaatgataaaatgatgattgaaaggctgatgaattaggaaaatgttggtgtctccgttgttaagtggcaaataattttgaaccatcgtgagaattcggcggtctgcgtcgcgatatttctttgccttttgcggtgggtcttgtccagttgaacacttcgcgaagtcatcatctgataacttttgatcctttcgcagaaggtcaatgaaatgccaaatcgatggatgtgaacaggcaaatgagcactgcaggcgtctgttcgcggcttccgaatggttattcgtccggtcatcgacttgcattgttcgagtgtaaacgctccaagtgtttgggtcaaatcgcgggcgtgttcggcttccatcattcttaagacgacccgtgtagttcatgatgaacctaatatataattaaagaacaataaatagtaaacaatttgtgagattgtcaatttaccagtcaaggacgggagtaagttcgtcgggaagagccatgtccagagcaatgattccaggggtcaaatctccaattgggagaaacgcgagcgacgtgacacatcgtgccatttctgcgaatgtcgggtcattttgatagcgctaaaattttcgaaaattcgattttttttttgtcatgaattcaacctgtttcagcccaaattcagaaatttttttgtgaaaattttggacgaggtggaacagacatccgcgcacttcagtgaatgggaagactacattcagcgcagtaatcgccgctgtctcgaagtccatcgacacgctgtccgggttgaagtctggccacacagcaacgagcatacgaaacatacgctcgtatgtagtgtgcgttttgttggacagcatgcaatagcacactgggatgacccagcgattccgacttaaataataagttcaaaattgttaactgtttatttcgtaccgcgccaaaattgcgtacacttgttggaaaggcatcggtgtgatgctgaaggtgccgtcggcgaagcactctttcatttcatgcgcccaccgaccattcgattcacgtccaaatatcagtattctaaattgcgtttaaataattaaaaagtgggcatgtatattacctctgttccctcccgttttcttggtaaacacccgaatcggctaacaaaaattgctcgctttgttcgtccgtacgagaatacattttgtatgcgtctgggatgattaagtctgtgagcgtgttcggaaccggtggcggtgcgtcaatttcacgacgtacacgcctgattatctaaatatacaaatatttgaggaaacataaaaattatcacttgttttgtcgcctgtttggtagggagttgcgcaaggactggcgtgaccacattctgcagtgccaaagagcgaattgtcgctggtggttccatggtttgtaccgcccggcgtttgattccagtgatcactcgttgtgcttccattcgagctgcacttggttcacattggtggctgccaacttcacgtaaagcgttgttgttgaggtcagtgtgaaggcgccctttgcaacggatgtcttttgtgtgatggtgttcacacgaccaaaagcgaacttcaccgtcagcactcagcatgtgaaaaatgtatgaatagacgttgtgttgaagcttggcacggttcctttttgttagaattgtgtccattttcttatctgtaacattagaaattaagtcaattttcttctaattcatgataagcaccaaccgcttaaattccccattgatgtatattgcaat

SEQ ID NO: 16390 - DNA, 2082 bp, Heterodera glycines
ctttcttttttgtgtttgcgaataaaagttcgggccttttatttacatatttttatatatttcgagattttatacataattcacatattttagggattttatgcatatttggtacatattttggactttttaagcacttttcctgttcaggaaaattttattaaatgtcccataaaacccaaaatttcgcaattattcatacctatttatatttttctagaattttggagaatttaaaaaatttcttgtgaaaaatttaaaaaattttttaatgtacccccaaaaattttttgaaagcgctaaaagatgattctaagcctatttggtcattttttggcattttgtgcctattttacccgttacgaagaattattttccaaaaaacatattaaaaattttatttcatatttagtacatatttaattttttttatacatatttcggtattttgtttaaaatttatgtacatattttgaccattttttgtacatatttttcatccctaaaaattaaattttttcttttttgtgaaagcgagaaatcaaattgcatttgtctcctcgggataaaaaaacatatccatttacaaaagcaaaaataattcccataaattccattagaacaatgctttagagaggagttttaagcaaaattaatgattttcacaaatgctcgctctttagtttgaaatttttttataaattttgtacaattaataaaatttataataaaaaattctctgaattttaaatattaaaaagtaaaaattgtggaaaaaataattaaaagtgtgataacgtgttaattcataaatactaattaaatagatcagaataaatgcggtaattaaaggttcgcatcttggcactcaaagctggcattagttagcatgagtttcccacgcggttcgagaatcaaatctaggagatttgttgtatttttgagtgcagtccaatgctgatggttgtatagaatagaacaaatcgttgcgttagagttctcctttttcagctgcgcaataaccgtgttcagcgacctcgaaaactcctaaaaatatgttttccttttaatttatgaatttcgaatttttgttcgaattagggtttgggattaggaaaatttgaaaaacaaaagtcatattcgtgaacagcgccacaaattaccctagaaaaattatttcaaatgccttttgagtgctttttatagtgcggtcacttgagtcccagctgagtttggcactccatttccgccactttctcagcctgaaaaagggcaagcgcgcccctaattctttttttccaacccatttcaaacctttttacatcgattctgaccgtttttaagcatttttgagtttggggcctatgatcaatatttaccaagttctacattaagtcaagtcggaagcccgttttgggatcattaattcgcctgatcagcatcagaacggcaaagatcagtacaccggttgggttagatcactctataatacatttgttctactaagatgatcagaaaaatgatttggctgatcaaacccctctaagaattgatcggcattgtctgctgattagtcgggttcatccctcatcccatgagaagtgcctttcgatgtctctgctcagaaatggattctccccgatgatcggttcggctttcggtttggccgcgctgacatcgatgccgacattgaacactttgatgggcaattggaccaactgaaaacaattatgtaaggacaaaatttaaaaaaacagaagcactcgaaaatgcaacagaaaatacggacaaaaaggaacaaattgaagccgatcaatgctcgagagtcttgacgagcgattggttaagtttttcgggacataaatcctttttgggtatcaaccagaggaaactatgccaatttgtggtccattgtttctgcacacatttttaactcatcacaaccactaactttgatcggagcgtccacctgttgggtggccaccgaaacgtaccaatggtatttggcaaagtatccctgaaaaacaatgagaaaagagattcatgttgaagattggggaaaacgtcggtttcttgatacat

SEQ ID NO: 16391 - DNA, 687 bp, Heterodera glycines
aagaaatagtgtgtgtttggtgagagagacattttctcttctcaattcttcgcttataaagagaaataaatccccagcctccgccgagggtcgtggcgggcccttgtgacccagcgagtagggggcgaaggcgggcggggggcgggcgtgcgccgattgggtgtcgcgaccaagggccgcgtcgacaggggcggcccgggggagcccgggctgtgccggtcgcacaatgaggagagcaacggctcaggcccgcaagggagcaggcaaaatctcccgcgcggtcacagtggctccgaccgcacccgagagcatcgccatccaaacgcccaccgccaagctttttgccgcgctgcacaccaggggtgtgacttgtctcagaaaagacgagagcgagagtttggcgagaggcgagagtccccaaaaagacgagagcgagagtttggcgagaggcgagagtccccaaaaacacgagagttggcgagaggcgagaggacgagaggcgagagtttttcaattttttctgtagccttatttttaatttgaaaaacttcaaaatcgtatattaaattaggggtacgggcctgggtatttgggcaaataccgggtcagggtattgccgggtacagaaagccgggtcagagtcctaggaggaaaccgagtccaagtcatgaaaaatccaaacaaaaa

SEQ ID NO: 16392 - DNA, 1404 bp, Heterodera glycines
tgttttacataattcttaaagtgattttcagttaatttccccctacaaaaaaataaaaaattcaaaaaccaattaaaaacacttgagaattcttttaattggttttgctttataaatatatatttctaataatattaaaaataaaatattttaatgtcacaaaattctcgtgtttttcccgagtataaattccaatgttcgttctcataaaactgaatttgtttcactcatcattttaagcgaggcttttcccgctaaatttcatttggccaaatgacaaaaaatgtccattttaaaagtgactcgatttagaaaaaaaattgcgctaaattttattaccaaaaaagggaaaattgaatttaacaaagaacaatttaaattgggcataaaattttaaattaaaatttttttgaaaatccagtcttttaacagttcaacttttgcaacgcgttacagcaccggtggtcgctgtttttcaacgattccatcaacgacaagcaaattggcttaatggaaaggaaacaaaatttattaattatttttttaaaaattgaattaacttttaaataattgaattaaattataataattttccccaaatttctcttgagaattgttaaaaaaaagattttccaacattcgaagatttcttaagaaaattaagtatttgtcaatcaatttgatatgttttgtccgaaagaaaaatctgagaattttcgcaaaattttatggatttaaaaaaaattgaaattaaatattatatgttcatttaaatttctttagcttcaggtttttctaaagtttaaaatttacttttttcaaatttattccttgaatttattcaaaatttatatttttttagtcaatggaaattttcatttttacgaataattaggttttttaaattaggaaattataaatttctaaaaattttcgcacctttccacggcttccatactgttcaaaccatttgacatattgttgcacatagtctccacaccattgtgggtctgtgccaaaatcgcatttttctggcacataaaaattttgtgccgacgccggcggctccattaggggaggctttaaaaattgtaattttagaaaaaaacaaaattatttttaacttctccagccgatcctgacggcgatgatagcatcataacttcaccatgtccaatcatttgctattttcggaatttaggaatttgaaattctattttaatggccaataaaggtgaatccaagctcaatgttgtggaaaatttgataacatacatttcgtataatttttaggttttttttcatttaaaatcggaatgattttttcttgaaaaaaaaactaaaaaatttatgctaatttttcaaatttatttcaattaaaaaaatataattcgctttttaaaa

SEQ ID NO: 16393 - DNA, 2083 bp, Heterodera glycines
  unsure (1)..(2083): unsure at all n locations
catacgcagtgcccttcagtgttgagcgtgtttcatgcgcgaaatcgtcaaacactgaattaattcacccgacatananattgaaattaaaaaaaataataatttaataaattacaaaaaaaaaattatttgtttccatcataatatttgtgaaaaggatcagaaatggcgtaccaaatttgaaaccgtatatgtatgcaaaataagaagctacaagaatttttaaaaattttttggaacattaattattattttttgaattttttttttcgctaactcttcaaaaagtgataaattttccctttttttaattaattaatgctcataaataattctatattttatttttatggcacactttgtccagtggcttgacgcttgaggcgattttctgtgaaatcctgtacagtagacgatggcttcgttaccgtacctaaaatgtattcattttacaactcgctaatttaatggcatattttttgcacattggaaccatatgacacatacaattcgttgttttaggcgctacagtaaccattggtgagttttccggttgattagtcgaattagccgattcaattttagatgaattttttgacaaattcactgctgcgatggcgaccacaaatagaagctgctgttgatttggaaatggttcttaatgaaatttggtgtactactgtattgactagccaattcctacagtaggttcaaggaaaagtttatttaaaaaaaattatctttaaattttaaatatttaattaatgaaggaagatatctttttaattatcgtaagcaaatgatggaacggaatttgaatagttaattaattgttaaagattaattattaatttccttgagttaattaaaatcaaattatatttttaaaaactaaaacatacattaaagtacaaaaacgatttattagtgattaatatttgtgatacaataacattacactaggaaaatgttatcattatgaagaatatcggtgtttgagggtctgtgtaaaatgttatggtaaggaatggtcaaaaatatacggtataaaattgccaatttcggtgaatttaaaagctttttggcaccaaaaattttcctaaattttcttaagtttattctaaaagcatccgcttcttcgttgttttggctttcaacgggctcagaaagccaccccaataggcggtggaataaggattctgtgacgcggagtactgtaattgtgccgcggctccgcccattgggtactgtagtgctggactctgtggccagtacgctgcgtacggtagcgatggtgctgcaccgtagccattgttatagtacattccgtaagggttgttgaatccgctgacgccaatgccggctgcccatcaatatgttacagtaatccgcagtaaacgagaattgttaaatttaaattaccgtaccatatcctctgttatacggcccgtaaccgtatcctccgccaccacctagtctgccggcgtccatcatcataagcggattagtgtagccaccgtaaccgagtgaaggcccaaatttgttaccgtaaccacccatcactgtgcaggtgggttttttgtaaattaaaattattaatttaatgaacttgttaaaagcaaaattaaattcaattcttagttaggtaggtggttattgtttgtaattaatagtttaattagtattttaaaaataaaattttaattaaaaattaaaaaaaagaaaatattaattaaattaatatttcattcattcgcttgatttgataagattaatagtattaaacaaaatttaataatttttatatatttaattttttgtaagaaatatttatataaatttcccatttttacttcctcgattcattgtgccaacatcgttcatcattgtcattggcaatgtcgggtcttgtggactgcccgtgccgatgaagtccatcagtcctacggggccgctaaatccgtcgccgactgtttttaaatttggaaaaaattaaaattaaaattttggcgcctaatcgcgctaatacatgcaacagagcgcttctgctgctttgtcaatgcttcttctttaccgggcgaac

SEQ ID NO: 16394 - DNA, 1295 bp, Heterodera glycines
  unsure (1)..(1295): unsure at all n locations
gagtatatgtgaggtatggacggtccaaaaaaatggctatctcttttttggcatctgggtaatagaaatctcttgggaaacaatgacagtggctgtcatcagttgttatgctctaanaatgattttcgggccgtttgagtatatgtgaggtatggacggtccaaaaaaataattttggcatctggtaatagaatctctttggacaatgacagtggctgtcatcagttgtatgctctaaaaatgatttcgggccgtttgagtatatgtgaggtatggacggtcaaaaaaatggctatctctttttttggcaatctggtaatagaaatctctttggaaacaatgacagtggctgtcatcagttgttatgctctaaaaatgattttcgggccgtttgagtatatgtgaggtatggacggtccaaaaaaatggctatctctttttttggcaatctggtaatagaaatctctttggaaacaatgacagtggctgtcatcagttgttatgctctaaaaatgattttcgggccgtttgagtatatgtgaggtatggacggtccaaaaaaatggctatctctttttttggcaatctggtaatagaaatctctttggaaacaatgacagtggctgtcatcagttgttatgctctaaaaatgattttcgggccgtttgagtatatgtgaggtatggacggtccaaaaaaatggctatctctttttttggcaatctggtaatagaaatctctttggaaacaatgacagtggctgtcatcagttgttatgctctaaaaatgattttcgggccgtttgagtatatgtgaggtatggacggtccaaaaaaatggctatctctttttttggcaatctggtaatagaaatctctttggaaacaatgacagtggctgtcatcagttgttatgctctaaaaatgattttcgggccgtttgagtatatgtgaggtatggacggtccaaaaaaatggctatctctttttttggcaatctggtaatagaaatctctttggaaacaatgacagtggctgtcatcagttgttatgctctaaaaatgattttcgggccgtttgagtatatgtgaggtatggacggtccaaaaaaatggctatctctttttttggcaatctggtaatagaaatctctttggaaacaatgacagtggctgtcatcagttgttatgctctaaaaatgattttcgggccgtttgagtatatgtgaggtatggacggtccaaaaaatggctatctctttttttggcaatctggtaataaaatctctttggaaac

SEQ ID NO: 16395 - DNA, 2636 bp, Heterodera glycines
aagtaaaattcaaacaaaccttcagcatacaatcggaataaatattcatataaaatgtccaaatattttcgatatttttggcattcttcccgttcatattctttcaactcctctccaatttcggcacattgccaattttcacgcatcaaatacacaaggccaagaaaggcttcatatttatgcgtcatatgctcgtgcaatttttcgatttcaaatataccaaaatttgcgtattcttttaccatcttaaaaaaattctcaaattttgtcgtcagtcctttgacaaattctgaaactaaagcatcttcactctaaattttgaatttatttattaattttcattgggtgttaaatctccaggtggaatggtatgacgttagtcaataaaccattgaatcacaaacatttggttttttgtaaaaattaatcgctaaaatagggttgtacgggactggaaatttttgccaaaaccgggacctcggttttcgtccgggaacctagaccaaccgggaaatctccatgaatttattttaaattcaataaattttaatttaattattttataaggaaaaaaaatcaaataaaaaataaaaatcgtttgaatctttaatgaaaaaaaaagtaaaaaacggaacaaaatgtcagaataagaaatatcggaagtgaattttttttcaaaaattatttgttttcctgaaaagcatttaatttttggaagatctgctaaaaaaatttctaaaagtctgggacctgggcttttaaaatttccgggaccgggacctcggaacttcttattggaattcccgtaactctagtaaaacaaaaaaattaaaaaatctactggttttttggtgaacgtcccagcactagagcccggtgctggacggaatcccgcgcgtgatcttgctgggtcccagtccgtaatcccgcatttttgggaatttcaggatttgcgggattactccgtgggatcccggcctgcaaaaattttgagttccaatcccgcaacgggatctgcactaatttccgcgctctacccagcaccagggttgttccgggttacccgaaacccgaaacccggcctttttcccgacccgaaacccaacccgatgattttgggtcgggtttcgggtcgaaataagcactggtaagaagggggtctgggtgaaaattagataaggaaattgagaatttttttttgaaacgattgtgttcaaatggaatcgaaaattttgtatttgtttttgttcattattatcctttttctaaagatattttgtatgaatttcttgaatttaagcaaagcaaatggctgaaaaacctgattccatttggttttatttccatcgtcctataaatggcgcaattcgctgcaaatattgcagtgccatccgcacccatgcaccagggttgttccgggttacccgaaacccgatacccgaaacccggcctttttctcgacccgaaacccgacccgatgatttttcggccgacccgacccgaaacccgatatttttctcgacccggaacaaccctgcccagcaccatctctcacccatgcccatttatcatcgaatttcgaatccacaattattttatgtttgtcatcatttatttcatagattttccatgcgctaaacatttcctccaaattttcttcaaattttttgttcatttttggttggattattccatctaaactttcatttatttcccattcatttgctgtgtcaattgccaattgcaaaatgatttcattaattggcatttttggttgattttcaaattttactccataattcaatttctcctcattcaacaattttggctcaaattgaacaccgaaaaattcatttaatttatattccccaaaattaggccatggaataaaataaaatcgcgaaattctgacaagacaattcatcgcataaattattgggccttcaatttcaattccatatttaaatacaaattttggcctaactgtgggaattccggcgtattctctaaacaaatattcgtataaaatgtccaaatatttgcgatatttttggcattctgcccgttcatgctcttcaaattcattcgcaattttgtcacattgccaattcttccgcataaaatacacaatgccaaggtgtgcctcatatttttgctttgaatattcactgatttgcatttgccggtcatttctcacaaacgcaattagcatttggtcatctccctaattaaaaatgattagacaaatcaactaccttgattaattaactcactgatgggaatgcatttgaaatatgaattaaaaaatgatgaattataatataaacagggattggagataaagaaaaataacacattatgtttttcttcataataaattaattatcaaatgagaattaaaagcacattaattattattattatggtactagtcgggtttgggtcccccttttgggtcgaaatttttaaatattttttttttttgctttaaaagatcctagaaacaaatatccggggcttttcgagcttgctgatcacgactatgacaattattttggccaattccgaaccccgaatccaaattcgaaccaaaactcgaaaatttgaatttttgaaaatttgcttttatgttagaa

SEQ ID NO: 16396 - DNA, 1220 bp, Heterodera glycines
acaaaaaggggaagaaaatttcagaaaaagcgacatccgaaaatgaaacggaagaaaacggtagagattttatggatgattaaattttttgcaaaattttaataaaataccaaaattttaaatgataggatatgaaaagggatgttcttgcccaccatattatgggcccacatacaaagtcaaataggcaagaaagttgatcgcacaagaaatggtaagtcgtgcccaattttactggaataatatataataatttaattaattaattttatttaatttttttaatatattaattaatgcaaaattgataaatattaaactaataaaagggttcccatcggctaaaattgttttaagggaccaattaggtgacttcatggaggacataaaggaaaagttttgcgaatttatgtgatgatagacgtcgtggggaaatttttgaaattttaattgggttaaatgaacagatttaactcaaaaatggaaaatttacaagatttttaaggatattttttgaagatttttatagttagttagttcgccaaaggaaattttgaaaaaatttaatgagattttaacagactttgaccaaaactttttttgcaaatcgggaaataaattaaattttagggaaaaagaaaactctttttccattggattttttatatccgtgtgtaaaataccacagctttccaagaacatcaggaaaaagggatatctgcaattttcatggcgtaatgcccaaatccaaggatgttctttgaatccaaggacggatgggatcctgaaaaataataaataagaaatttttttattttgaaacagttgtttttttattagttcattaattttcaggtagcggcatcataaatagtagaaaatggtagaatgatcgtgcaaaaattatcttagattattggatttagattttttatatacctcttatattatataccttaaattttccgcgtataaatgggatttcgatgaaaattaatttaaattaaattaaattaacattttaagaggagatattcaggtatcagtattccaacaaactttttgatttattaactatatcgaaaagtagcggttttgagtctaaaaattcttttcaatttatttattaagattgtataatgtatgaagataaaaaatgtgtcctgaagcattgtgatgtatttacacgcccttaaaaccatgggtaatataatttaaaa

SEQ ID NO: 16397 - DNA, 981 bp, Heterodera glycines
aacacttagacctatctaatgatatcaagaattaaaaatttagatgcttttgaacaaagttataacaaaaaatattttcatttgatggtttttgactaacgtcatagcaccactattcacttcagtttcgcaaaaaggccgaattcgggttaaactgcagcattgcgacaaaaataacggaaaagtaaattcaaaaatccctctccctttacatttcgctcagataaatgaatatataatttttttttcttattccaaatttatgaggataaatttaaatttcatatgattatttaagcattttctactcatttcttaattgcttttaacaaattatatcctaatggaacaatttcaccgtttcttgaagataaatatttttcataaagggaatctaattaattaattaccaccaaattgcctaactatttttcaactccagttaaatcaaagacaatgtgcttgagacagaagaaagaaaagagggataaggattaaaagaatgttagaaagaaaggatttgcgaagtaaatgggaaagggagaaaggggatagagaaagaaagagcaactgggaagagtgagggagagagatttagagagagagagaggagaaaaaagagaaagaagttgaaatgaaataggtattgaatgagagagtgagagagagagagagagccagagagagcgaaagagagagagagaggagaaaaaagagaaagaagtggaaatgaaataggtattgaatgagagagtgagagagatttagagagagagagaggagaaaaaagagaaagaagttgaaatgaaataggtattgaataagagagtgagagagagagagagcgagaaagagcgagagagagagagagagcagaggataaaaaagagaaagaagttgaaatgaaataggtattgaatgagagagtgagagagagagagagagagagagtgagagagatttagagagagagagagagag

SEQ ID NO: 16398 - DNA, 2682 bp, Heterodera glycines
  unsure (1)..(2682): unsure at all n locations
gagctatcgagcaaatccgagaatgttcttaatttcacgccggtttttctcacgcagtcaatcacagatgctgatcacggagaagaaggtggagctggtgttgaagcagctgaaccgggagaagtggaacaaactgtgctacgacgggggcgaggacggcgccatttgcgacggcggagacgacgacggcgcatttctgttggacccggcggacgaagcggcggaggacgacgaataggcgaagcggaacggacgggcgaagcgaagggcgaaagtgccatcattcgatgagaaatgccatattgttatcactagggcggcgaaaaaagaaattcgcgaaatacggacatagaaaatccatcctagaggcttccaaataagctaattgtaaggatattggttttcatataattagctgccctaagtgtcacacacacaaatacatacatctcttgttaatgttggaaaactttgtaaatttgatcagttaaaacatatttgttgttatgtgaatttccatcaaattttcagcccctccattttctgtgggttaggcccaaggccagaaaaaaaggcaaacaaattttttttttctattcgccacaaagcctttaaaagggcatgaattttgtaatttttgttgattggttttaactgattaacctctggccggccgatcattgaggccaatttttaaaaacggaaagagtttagaatactttaaaatttgttttgccatttccttaaatttgaagtaattaaatttgattttcggaaacccaattaattacctaatttgttttcgcttccatttaaaagccattgataaatttcctctcaaaattaaattgcgcaaaaaatcgaccgccctggcggtaaaagagtgagtgacctctaaattcacgaaatgcacttcttcgcccgattttacagcaaaaaccacggaaatgaaaccatttggaaggaaaggaattgacggacattgacccaaattcggcgaaattttcttacctttttgtttatatactcatttcgaaagaaaaagcctaaaattcaaccgaaaaaaaattaaaaattttgccaaaattaaaaaaaattggccatgggacattgatcatctgatcacgactgatcagtccaatgttttgactgctgctaaatccctaatacgataaaatgccaaaatccgttggtccgtcccataatttactaattttaatcaatttataaagctattagttgctaattatgtctttgtttgtgttgaccctaattttcgcaattattcactcccttttaaatccgccgccggtggcaattgcattggaaccagcggaaaatgagaataaaagtaaggaatgggcttctaaaaaaatcattggccttatcgtagtctaattgatcacaatgctcacaaaaataagcgagaaatttggggcactgggccctcggcttcctcgatcagctgggcctaatcacagagactgctggcctaggggtgctcgccggccggcacgatactgatcagaatgccaaacaaacaaagtggccgtaaaacaagccatgatcatgtaggcaaacccatgcaaactggataaaaatttggcaaaatgctttgatgactatggggcccagcagtcggccatggcacggatttgtgccatatgtcttatcattaagggcacatgacattgccaaacaacagtattactgtaaatagaaacacctgtttaaataattgcacaggaacgcggctcttccgtctgtacagtaaccgtgggacattggacagatgggcaaacggtggcacatttgtccaatttgacggaccaatgcgaatcggcagcgaaatcgcgcaggcaaattggagaacaaaatgccatgccaattaaaaaaattttaaatctgtggctctaacttaaatgcaatacggtggtaccgtaaacccaattgacagggaagtactgtatcggtgacgctggctgagccgttcttcctgcgcccattctttcgcgttgttcccattgccgcgtccaattctaccgtatccccaccgtcccctatcggcggttcgtcttccgcctctaccgtacttctccgaccgggccaggcattcaaagtatactgtaaaatattaattttttaaaaattcaatttgttttaagttggctctgacgcgtgacgcttctgaacttcctgtaaagcattgggacaatgatgggagcacaacactgaacatcacactcatggcacaagtgatgccgccatcaccggctgatgctgttaatgcgattagtgaaaatgtgcgcgaattttttcgcattttaaaatatttaaaaaatataatatttatgaaaaagggttttactgatcaccacttccttcctctgatcaacagttatctccatcattaagcttagatcattccggtcactgaaattgctctgatcactgaaaattgccaatacatacccaatttctgatcacttatatagttctgatctcagtaattccgagtatttacccaactcgtgatcattaatctgatcataataattcagattattttaacctgacaattaccctcactnntctcatttctgatcactttaatanatctagtttcgctaatcccgatcatttagctcacttttgatcattccctctgactgatcgatcatc

SEQ ID NO: 16399 - DNA, 1054 bp, Heterodera glycines
  unsure (1)..(1054): unsure at all n locations
gatcattagctcaactttngatcattccctctgactgatcgatcatcaatattcaatgtttgtnttgttcagttttcgcatttctccgtgcatccaattgaagaacaacacattgttgtacaaatgatcagcagcaaaaagtcgtggctaaatgttcccggcgatcagtcgcgccaatttgtcaccgtttcgtcccaagcagtgcgcgacccgaacaattgctccattttaagagtgaaagtgagtcacaatcatttttataaatgattaaaaaatttagcgaaatttactttaaaatttttaaattggtatttatatatcaccggtctcgagattagagttgagaaaagtcttgggcttttttggggtcttcttcagtctcgggaagtttttagtctcgagcagcacttgtcaataatgtaattatttttaattaaattaaacatcaccaaattaaagcttttctagtgaatttatgaatataaatatttacaatttctttttttttcattttataattaattttctttggtgcatttgaatttggcaaaaatttttttactaattaattttaattccatgatttttgaattataaancaattttccantttaaaaattnaccacctaaattatttcctatccatttaattantacctncnctnaacantnaatttaaaaaaatataattaaaaattatacatttaatttaantttctctttnattntnccnccctcatttaacaataatanccacaataataataattcatncacaacaaaancttctacaactaatcatnatnatnatnatactaataatttnttaatttttcaccaaaactatncnacaaatntnnaanaaaaanaatactttttcaaacctaccatatcaccactatcattcctactntacatnnatttatctnaaatatactntnaatnactccatnattattnncactattaaataaggattaaaatcaattttctncatcntaattttttccctaggagaattttttaatttatttatttaagtataaaataatat

SEQ ID NO: 16400 - DNA, 2256 bp, Heterodera glycines
catcgatgggattgtgtacgttatcgatcctgcctctgtgaagcagtcttcctacgatgcgcgtggcggtattgaccatttgaatgtggtcaccatttcgaaggcgtctgccaaccaaagggccggaagagcgggtcggactggcccggggaagtgtttccgtttgtacacagcctgggcctaccaacacgaattggaggagcaaccgatacccgagattcagaggaccaatctgggcaatgttgtgcttatgctactcaggtctcaatttattctcaaattttctataattgtaaacttttgtcggattattcgttgtcattgtttagccttggcatcactgacctcgtccattttgactttttggatccgccaccttacgaagcactggctgccgcattagaacatttgtacgctctcggtgctttaaaccacaaagggatgttgactaaacttggacgacggatggccgaatttccttgtgatccggcaatgtccaaaatgataatttcctcagaaaagtccttaatttctgttttacccggtcatctactttttttaaagatacgaatgttctgaagagattatcactatttccgcgatgctttccgtaaatgcggcggtgttttaccgcccgaaagcgatggtaatccatgcggacacagcgcggaaaggattttggtcgtccagcggcgaccatctgactcttctgaatgtgtacaacaaatggagagaaaccaacttttcgatgcagtggtaaatccagtgtctaaaataactcaaaatatagaagtaattagttgaatttaatttttatttaggtgtatcgaaaattttgtccaacatcgtacaatgaaacgggcaagggatattcgggatcagttggaaggactgctcgaacgagtggagattgagccggttttcttttattttaagctggatttaatttaatattgcatctttccgactttctttccatttaattaattctttaagaaatcttcttccgacacaatggccattttaaagacaatcactgctggatatttccacaacttggccactttggacaagggcggtcaatacaaaactgtcaaacaccgccacactgtccaagtccacccaaattcttgtttgtttgaagaccgacttcgttgggtgatttactacgaattggtattcacttccaaagagttcatgcgagaagtaagtcataaacaaactctcattttttaactaaacaaatgtacctacagataattgaatgtgacccgaaatggatttcggaagtggcaccgcattactaccaacaaacccaattggaagattctgtcaacaaaaaaatgccgaaacaaatgggaaaagcaaaaagtgaactcgtcgggagttgattcacgaatttcagttctcttacagtgtaaattcgacttttgttttttttagtttgccaaattttaatttaaatggattttccgtgtttcttattttaaatgttatcacattttttaaaatatctttacataacttcatcaagctgatttttgactgttcttacaattagacggataaaataagtaaatggcttaccacgtcgacctttctgttcgcccaaatagggcttttatgcaatttggtggaattcaatttaagtgtttcaacccttcggaagtgccaaaaattagtgttttggaggtcactcagacgaacacttttgacgaagtacttgcaaatgttcagtctcgttccctgttcattttcctcgttcttaggccggtttccccgttagaggtgggttgtacgacccgcttctcggcacctccgaaaataaccattgtgagacgtgcgggatgcaggggacgcactgtcccggccatttcgggcacattcggctcactgtgccggtgttcaaccctcttttctactcattcactctcaatgtgtgttttggactcatttggttttttgtatgttctttccattaagatgatgaaagggacttgcatccattgccaccgtttcacctgcaactccaattcggttgcagccaaagtcgtcattgccaaactccgggcctttcgttttggggtgccggaagtcttggacagggtcgagagtgggttgaaggcgaaattcgagaaaagagacgaactgctcactgaacgcattgatttgatcggagagagtgtctttttacgggaaattaatgcgttcatcgcagagctgaaaggcgtgtccaacgctgaccaactgcagaaa

SEQ ID NO: 16401 - DNA, 2771 bp, Heterodera glycines
cttttcgtctgatcacttttagtgactcaaaaacaactcgcttgatttgatatgcgttatttacaagcaaattatctcaggtcaatttaatgcaaatgttgggaaaatgtgtcagtgattaatattaaaaagcggattttgtgaagttgcgttgggctcggacggcagcatcaaatatggcaacatttggatggacaaaaacaacccaagcgatggacgcgacgcggacgcactcgcggcgacacggcacgtgatcatcgtaagagggaaaagccgaaaatcaaaagacaaagcgcaaatgatcagatcgacttggaaaatcagtccagtggccaaattgacgaattcagcagaaatctgaccgccaaatttggcacttatccctttttctgcaatggcacttgcatgggcgacccatcggaacgatcggtgggcaaacccttcggcattttatcattggccttgttaagccttcgcaatatgcccgagcattgttcgacacaacttacgtgtattttcgtgcacttaaccaatcaatggaacaatcgaaggaagcttcaaaggatttgttccgaaacggaacaaatatgaacggagaaacggccggatcatttcagggtaggagagagaaagacaggggaggggagaggcggagggggaggagagacagacagacagagtgatggagaaagagaggggcatagagcagacagacgaagcgtgagagaaaaaaggaccagacagcagacaaacagagagaggagagagagagggggagacaaagagattagactgatctgtcgccaaaggtgagaccggactaatcactttcgactcggacggcaaccgccagccgacctttttcgtcactatgctaaacgcagcgaatgtgccgacagtgacaatgacagtgaacatcagcaaaggagtgcttgtaagcagaggaggaggagggcattttgccaatttttccaacattttgtgccaatgttcagaatttggaccgcctttacaccagcgaagcgtccctttgggtcaattggggcggcgttcggccgctgaccacgccgttgtgcggctacaacggcacgcaatgtggccaaaatgcgactgtgtacattctgatcggaagtgccgtcattttgatgctgctgattgtggccatgctcggcatcggatacgcactgaggtaggggggaaaaaccatgccaagcgtagtcattcagtttttgcttttcaacaaacagcctttgtgccgttttcagggagaaaatgcgcgagaaagagcggctgatgcgcgagtgtctgattccgtttggggagctgcgcaatttgaaggagctgcaaagcacggaagaactgaagaaggagacggagaaaagcatgcggagcatgcaaagcagtcattcgggtgagaaaaacggtcataccgtaaccaaatgtacggtaacgaaagtacggtaatcaactggactactgttgaggaagcacaaaacttacggtgggcagccacaaagtgttggagacggccaatttcgcactgtttgtgtacaaccgggagattgtgctcgccatcaaataccatgccagagtgcgcattttgggcgacgatttaaacttccttcgtaaggtgaaagacgaaaagtaaccggggaattgcctacggtacttttgaccggggaattggttacagtactttttctgggatacggtccaagcggaacttgaacaaagttctaagtgtaataaacgacgttatatttaaatacttgtctaattatcttattaagcatttgcttttggtcattcccaaaatcgcaatacagtaatctctcatcgtttctttacggtaacagctccgccagtttgaccacgacaatttgaacaaattttacggcgtttgcacagatgggcctcttttgtacggaatatggaaacactgccaacgcgggacattaaaagttggcaattaactaattggcggtaattacgctaattgatgaacaaattaggagctgatcgccaaggagcaatatgtgggcgacaatttcgtaatgttcgctttgatgcgcgacattgcaagtgtaaattttgaacattttacaaaataacaattgatcaatggataagtctgtttgatcatttcacgccttcttcactttaaatgtcccaatttctcagtctgatcattcaaatcccccagtctcttagatcaccactgataactcatgactcatcatctcatccatttcccttctccattaacttttcagggtctgatcgccattcaccaatcattcatcggtgcccacggccttttgtcctccgaaaattgtctgatcaacgaccgatggcaagtgaaaatcagcgactatggactgaacatgatcagagagagtcagccgatgccgaagaaaagttggcattttggcaccattttaattaacgccaattcaaaggccttttgtggacggcgcccgaacttttgcgagaaaacaatcggacgggcacaaaagagggcgatgtgttcagttttgcaattatttgtgtggagatggtgaacagagagacggtttggaatgggacggagagggacgacgacgtggacggtgggcaatggcattttagggacaattggggggggggacatgggtgattggcacttgagaggggattatgggggggacgacggtggatggtgggcaatggcattttagggacaattgggggggacatgggtgattgcacttgagaggggattatgggggggg

SEQ ID NO: 16402 - DNA, 1177 bp, Heterodera glycines
aaatttaagatataattaaaaagaaattaaagatttacctcacccccagatggaagcaaatctcaaattttgattttatttgcatttccgtcgtttttcagcctaaacgccatcccaattcccatccaattgatgcgtttgcttgcctcgttgaaggaccattcgaaggcgcacaaagaattgtattggagatcgttgaaggtgtgtgtgcaacttgttgtgtaaacaccatttaaataccattttttctgagggagtgggggttggaatatacggtaattatacaattttgccttggaaaaaataaaaaatttcggttgatccaacacccccccccccccaagacccccccgggtccaaaaatttcaaggaaaattttctgattattttttttttttgcttcctcattttaacaataatgactttataactgacgaacacgttgcaaaatatgtttttgaaaatcaaaacataacgccaaataatattttttattataatgaaatgttttcgtcttcatccatctcttccgctgatgcaaaaaataatttatgcaccttttatttttctctttcaactgtctgcgtacaaattttttgctggggaatagaaaaaaaaaaaaaaggtcgttcaagcgaaaaattctcaaaaatacacccctaagaattgacttttttgatttggtacaccaatatcctgggaacgtccctgccatagtccatgaaatttttattgtaaaatttaaaggaccatcgactgctcccattcatggcctacgcaattgcgcgcggcaacagcacaattgtctacgacgcgtttgtgctgttcacgcactgtgcccaattgcatgattttccattgaaaaagtgcgtaaaaataaacggctttctaaaaaagtgtgccctgccaaatttttgctatttccccaccctcctccattggcacagattgagcattctgaccgcaaaatgtgcttcgatgaaaaatggtggtgccgccatggcgagtcgaggcggcggcgccggcacatcagcagcgttcaatggccaacagtcgtcaaggtatgcatgttcaccagcaggggatgggtggagagttccgtggttctaaaaaaattttttttttttttggaagtcccaattatgagacaaaaaatgttttgagttttcgggaatcg

SEQ ID NO: 16403 - DNA, 2500 bp, Heterodera glycines
ttttaaatttttgtgctaacttttttttgattggaattctttttttttgagccatagaatttccgcattttcgtctgggattttttttgaaattacatttttgaccgcactgtttgtttgtgctgtttaacaattacttaataatcacaaaacagactccccccacccctcccatttattcacgcttgcataatttatttttgttccgccatttttgtttattgattagcggagcttttttgggttaaattcctattaataattttttttcattccgttttactttttttcaccgaaattgaccttttttatagtaggcacagtttttcaaaaaatttactgaatttaatttcgccattacaattttcattactcaaaccaattatcttttttttgaagaatttgtttaaaaatgtcaaaaattgagagtgtataggcaggcccgtaaccagttaggggccggagtaggacaaaacgtcgtcagccgaaacgtcgtcgaacgaatttttcgaccataacttttttctttctcaaccaaattaaacattcttggtattattcgaaagcattcgaaaaatgctattagcctgcaaattttcaaaaatttttatttatgcacaaaaaaatcagagcaaaaaaagttcgaattactgggtttttgagttcattctggccataacttttttgaaacttaacgaaaatttttgagattttgcaaattaataataaacacatagagctatcgaacaacaccaacaattcttaatttgattgacattgaacaaagttatggttcaaaaagtcttccgacgacgtttcggccgacgacgttttggggtgcaccggttaggggcaactaaacgccgctggatgccaattttccatatgttttcaaaaatcaggtctcaaaatggccaaaatttcctttttttttccagtcgccgccgaaaatttaggtcaaaattacactggaaaaatttttggaccgaagagccaaaaaaaagccacatcacaagctgttttgcaagaaaattgtatcaatttgaatgcttttttgcatggttttgctgtttttgggccccttttacattgctaaactgcagcagcaacgaaacatccggcgtttcgtcgccgagttggagcagcgcctggtggagagtgaggcggagattgcggcgctctgctccgagaagcgtgagttggccaaacgcgttggacacatggccaacaaattggacacggaacgcgtccaaaatgcgtcggcgatggaaagcgtgcggagggaccggcaattgttggtggaggaaaacgagcgggaacgcgcactgcacgcggtgatgcgcgacaaatttgacgagttgaagcgcaaatttgacacgtgagggagcggggagggcaagggaaagggcaccacggcctgttttttgaaaactagcagaaattttcaaaaaatgtagaaattttttaaaaaaaagtcaggaaaaaattaaaaattttttttagtgatttgcaaatttttttttgaaaaaacgtacttattcattaaaaattctgcgggaaatgcactgcattagcctttaaaaaatttcaaaaaattttatttctaaaaagttatggaaaaaactgtttctaaaactaacaataaacgaactttttggtttaagatttctatttgaatgagtatatacagaaaaggacggatagtatttttaatccgacgaatatttgttattttttgtttaaaaaaataccgaataaaaattttaatttaaaaataataattataaggctcttatccatccaaaaataccaaaacgtatactcaaaattttcagcattgccaaaacggtgttggacaaacagtccgagttggagcaaatgaccaaaatgaacacggagttgagccaacagcttcatgaacaagcggaagcattggaaaggcaccgtaccgagttggaaacggcaacaaaaatggtgatgtcaattaaaaaaaaataaaattaaacaaatttgtttaaaaattgtcacaggtcgccgaacgggacaccgaacttaaaggaagcgaatgcgagttggccaagtgcagggaggagaacaccaagttggacgagctcaggcaacaaatggtccatttgctggaagaatttggtgccaatttgggcaaataaatcatttttatgtgtggcggagaacagatgcaattacaatacaatgtataaaattattttttatttttatacaaataaaacgggtatttttagtgaaaaaactaattgtaagaaaatttagaaattttttctttttccaattaccggtagtcaattaattataaacaaaacaggataaaatttgtcaaatatgaaaacataaaaatgcatgaaattctcagtcaattttgcgttcaacagtatcctacaaaagcatcgacggccagcgtcaccgtgttcttccgttcaggggagaggttgcatcaaatcctcaaaacatgaaattcaatttt

SEQ ID NO: 16404 - DNA, 2378 bp, Heterodera glycines
ttaattcttaaccaagtaaaaggtattcacaaatgtttttatgtatattcgcttgaaaaaattattcaattattttatcaatctttttttgtcatttttcattattttagaacatttttgggaaaaggagtgactatttacacgttttttacagcgcgattttttcaaaaactttttgggaacttggaggagagtacggcggtgccgataggcgccgccggaaaaatttcacaaattttgaatgaaatttgcgatgaaaaatgtgttaactttacttaaatttattatttaaaaatattaggcattctgtcttagaaaaattttcaaaaaaatcaataaaatcccgcataatcccaattttttatatttataaaataagactttttaggtgtaaaaataatcaaaaaccatattttaatatttcgtaattcataattccaaaaatgcaactcatttcaactgacatcttcataaccctgtcgttagttgccgctttttctcattctgctccaataactcaagggaaacgtaagttttcggaaataattaataaaaataattgaatttcattaagcaaattcttccacgaatggaagaaagaccaaagagaatccaccaacttctgctggggttgtctcgtcggtcgcaaaagttgtcaccggtgtattggcagtgactgccgccggactgccgggtgccgactgtgcacgacgaccgattgggtatggcaaacaagcggagacggcggtgaattatgttgcttctgccgttgatcccccgttggctcaaccagcatcagcaccaactcaaagcttttcgacagatgattttaagacactggtcggtgccacttaaagtgataaaaagagccgggttttcacgcatttatttttaatgagtatttaatttcgattaattcgaattttattttctgctttaattatttaaatttaacaattaattgttttttcagcaaccatgtacaaaattgaaccttagctttctttttttagttttttggtttttaatggaaaattaataaatattttattagacgccacctggtcaacaaaaaatgcgtcgtagaatagaaatgaacaaacccatcactgctgttcagcatcgtggtggtggtggtggcggccatggtggcggtggtggccatggtggcggtggtggccgtgctggtggtggtggccgtgctggtggaggtggttaccgttcaggtcgtacgtacggtacttatggcgcaggcgcacatggttctagcaaaaactgcaaatcaaactcgaattgcaccgaaaaagatgtaaatcttttttaaattttatctttgattgattattttaaaatgttattttatgctggtttctgatgattcgggactttttacttgggttgaaactttccaaaaatctgtacaaaaatgcaaaaaattgaaaatgtaccctaataatgctactcatggagtggactttattattcaacattaatattttcaaaacccaacaataatgagaattaattgaaaactctatttaagcctgactgttgttcctgattgattggctgctcgagtttgattgttttttcgatgaatttggaagaatgggccagacgtggataaagaaagagattgctataaatttttggggtctatttaatcggtcgttttcctaaagtaacttcatcaacgtaaccttcctcacctttcctttttttaaaatttatttgtctgagtaaagcattactatgcaacttggtttttaattacaaattcaaagtactttaaattattttctggcttcattgtaaagcaaattttttgaaaaatttgaaaatttaaggggtgaaaattcttgataaattaaatgattaatgtggattattaaattgagggcaaattaagaaattgattaatattttgtaaaagcacgaattgcttttaaattaagtttttgttttatctcgttttgataaaacaaaattatgtcaacagaattaacgaatttgcaatcatagttattatgatagacttttagaacatttaagcaacaatagagattaaatatttttcatttttcattagctttcattttgattagagaaaatttgaaatttacaacaaatatttttactcgacttcaagcgttatttttgtgattctatttttaattttgtctctaattaatacgatttgaacaattgttctgcattttgaacattttaaattttaagatgggcccacattaaaacggacaatgagtgcgcttgaagttgcggctttgacacttggagcagtaccaagtgttgaagctggacgaccacttggaacaataatggtataaatcatggtcgaaaatatttcatttttaaaa

SEQ ID NO: 16405 - DNA, 864 bp, Heterodera glycines
gcgccgccaccgccggatggattagtgatcaccggttatccctctgctaatccggatgactattttggaaaaaatgctaatggacacgaggtaaatttagccggaaagggaaccgtttagtatcatttccatactctgctaattgtgaaccgatttttaaaaagcgccaaaatagctgcctttttcggaaattttagaaatatttaaataaatccatctatttttagcattgtcgtcgcgatgtttgtacttgccattgttgtgttgtcacttgtgcttggtgtcatgaaaattgttgcccaccagaaaactaattaggctgtttccagagaatcttatcgagagtgagtgaagcatacgaatgatgaggcgaaaaaaagaaaaatttaaacattttactatttataattcgaaaaagcaaatgacagcgggaaacggcgtcagccgagcggaccacgccaattgccctcagggcatctcattttatatacagcgaaatttatctccaaagttcgttgggttgaaaaagggggaaaggcaaaatgaaaataatgcccattatttcgcagtcactctcgtttcttttccggtctctcaatttgttaaaaatttcggctttttcggaggaacaactgacttctgctgatgagttgaaggattattcaattccaggttttaaaaattaattggttttataaaaaaaaatatatggaattttaaaagttcaaaatttatttaaaatggaggaaaattttgcataaaaacaacttcaaaatttgtttagtttgaaaaatgattgctgtcaaaaaattgggaaaatatccaaaatcactcagaaaattaacacaatagaatggatttacg

SEQ ID NO: 16406 - DNA, 1635 bp, Heterodera glycines
gagtgtccatttggcgggcagtgcggcagaaaagcccttccgagcgacgcgaaagcattcttcgccgattcgatggccaaagtgcaggcgatgaacatgctgaacatctcttccaacgaccttaacaatgcgttgtgttcgcttctctgcgacgggtaaaaccttttggcgtgtttcatcacattggacacttcgaaaaaagcaaaaagaaccaaataaaagcagcaccaagtgccaatgccggcgtaaagttggaaaaagtcgcagcccaacgaatgcgaaatgcgttcgacaactttcaaatcggtgagggaagtcgactcattcgctattcacctgtgatatagagggaaatgggcggactcgtcagcagcacgaggaaaagctgccctccgaacagcccaaacaccaaaccgccaatccattggcccaaaattgcctttgaaaccgcttaattggtgggaacgaaattgacaatgatcagagagagagagatcactcactgattttgccatgagtatgctcctcatttagcattcccaaagcaattgccatcggaagaacaataaaatagagaaaagcagcagagctaatagtcttttgaaaggcacgagtgtccgcaatgccatcgagaaagtccgatttataaaaaggaaggcgacgacggaaatcgccgattagtcccctcccggggtaccaattttgtgctgtctttcgaaaagttttcttttacatattagttaatcgagtaccttttccctttgcttctcattttcaacattttctacaacatttgtaagttcgtaagcccttaagcgaattttggccacaaattggcgttctgtggccgtggtggccaattcatggtaaagcagcggatcggccaacagagaagcgaaagtccgagcgatttctgcggcagatttagtctcttttatttggaggggggcgaccacgaggacaacgaagcgaacattagtcaatccgacgccaaagtttgtgggaatggcgagccgcgcgaaagagacacgggcacgggaaatatgctcgattgaacagcttaaaagccaaggaaaatggggagggcgatgggatggtctactgaaggacgagccaacgctggtcctccaccagcccacgatgctcatccgccaaaacgccttggaggtgttcacggagggcgaatgctatgcaaagggacgcatcgcatcagcgacaggcaaacggcatggcacaccttcacctacgctgctgaccgcacatgggacgaacagtttggtagcaatttgccgaaaggagacgtactcgagaggggttttgtccacttcaactgctgatggattgtccgttgctgtcccgtgataaagcggcttttcctcaaccattcttaagggaatgcaattcaaacaattgaacaacccactcactcacttcatcacaatgtcttccaaaagtgtctcagttacgttaaggagcactgtgcatcgttccaacaaatgctccgtgtccatcatccctcggacttcgcattgaaaattccgtggagtgaccagcgattgaatgcgggacaacaaaaagtggggggagggaaagtcgacggggaaattgccacggtcagaaaaggagggcattgct

SEQ ID NO: 16407 - DNA, 916 bp, Heterodera glycines
  unsure (1)..(916): unsure at all n locations
ggaaagggaaactgggcggggccaattaacgagccaaaagtgagttagaatctctcncaaatgagacggtaccagcagaggaaagtaaagtttctccacccaaaggaggtaagagtgtttatcaaatatgcaatgtttttggttactctggcttcaaaatattattgccattaggtaaaataaaatttttagagaggatattttttcgaaaatcagtacgaatcggacctgaaacaaatcgatcagtattgatcgtaaaactatgcaattgaaaggagtgatcagtaaaaaatatttaatcaatcggcgtcaacgattaccaaatcgaactcatacatatcataggaatgaatgattgaaaaattatcaatttgtccgtcccccaaagaattattatactccaagttcaagttccgttgttgtacagttgtgttgctgtactgctcgtcctcctcattctgttgttgttcagttgcattgttgaacacttcgtctttcttgaattgtggctgaacggtctttccccgggatgcttcttttgtgaattgttcgtggtggtatttgctgccattctttggctgattattctctttacgaatgtgcgtttcctccttaaattttggtttgaaagtaaattaaagtcacttaatttgatatgattaaatttgaaaacaaagagagtgaaattgtgaaattaataatgccctctcgcctgataaagcaaagcgtcttttggttgttcaaattgagtcgtgagttgatgcgaattggtgggacaatcactgccaaacaaaagtaagagagacacagcgaggagagcgagaagaaggaacacaatgatgcagcagaggcaatacttcaaacatgagaacattgtaattttaggctcccanattcaattatttaaagacctgca

SEQ ID NO: 16408 - DNA, 2783 bp, Heterodera glycines
tttacattagattaatttgaaccctcaaaagtttattggagatttcttgccaaaaattacattgaagaaatttattaatatattaattgattaatagaaaatattaattaataagtaaaaatctagatttgatattgttaatgaaaaaataattctaattcattaattatttcctaatcaataatttaaaatatgaaatcatcccaacttgaattttaataattcaaaatgaattttttttctgatattaacataaaaaataaaaattagacttattcaataaaaaaatgacgattaaggaaaatttattttttgatcccatattaaaaagttatttgaaaaattcacaatatttaaaaaatattctggactaatttggaaattttctataatgtgccaattcttaagaaaaaaattaaaatcataaaaattaaaatctttgaataataattattatatatatatatatatatatattaatatgtattaaataaggtttatcaaaattgaatacaaaatttaaatgaatgaagtaaagcgaaatattttaaaatactaacaaaaattttttgatcattcattttaaacacactttaaatttaatggataataaatggaacacataaataaatgtgaaatctaaatttgcttcatatataattaatatgcctacaacaaaaaatcgtcattatttattttaaacaattgaaactgataaaaatattattaagtaatgaatttaataaaacaaatgctgtaaaaaaaaatcaaatataaacacaaagatattaaaatttttaaaaaaatgtgatttaatgcaccaaacaaataaaatattataccaggataaaaaattcattttatctaattaggttcttttatatctttattattaattaaaactaaaatcaataaatacaaaatttttaataaaatatacccaaattttttaattttttccgggtggcgattgttgtctgcggagccggccccgaaaaaactcctttggctcaaaatatcaaaatttgatgagtttttggacagaatttgttaacaaatagtagttttacaaaaaatactttgaaatcgcataaaaaaattatcgatgttcaaaataaatgaagtcaaaaaataatgacaaaccaactatttattcatttaatattcaagttatcaattactaatttttgaatattttaaatatttaatttctattttagtaaatttttactcgcctttttaacatacagtaaaaaaaattatattctaaaaacatttataaataataaattaaaacatcaaataaaccatttttatcaatttatatggaaatgacattaaaccaaagcaaaattattataatcgtatcaacaatggacaaaaatgagaagagagaaagcctcagtccaaaatttcattttaaaatattataccaaatctaataaaataacattttggtcaaatttaaaacaaacaataaattaaatgattataataaaaaaataaaagatttacataattacaataatgaataaaaataaaaatgaattaatattttgcgtctatatacataacaaataatgtttttttgagaaagaatacatgtataaataaaaataatatatagaaaaggcaaaataaaaaaaatcacaagaaaaaattaatcaataaattaattagatggacagaatcaataataaatatttgaaccaagtcgagaataaatttaaaatttaacaaaagtaataattataaagagtaataataacgtaaaattattttatataaacaaaaaaaataaattacaaataaatatttaaatgcacagcgcaccaacctggaacacgaacagtgtacgaaaccatgaggtaaatataggtaattaaatattttataagatgtaatgaataaaaaataactcaagattaatttttcaattaaagaattaaataaattttctcataaaatttttattaattttggaatttttttaaatatcctattaaacattcaaaataataataataattttggcagaagagacattttcacacaatgaatattataattgcttaaaatgttgaattgtacatatttttagagctcgttaaaaaataatttacgggagcgggagccgggagcgtgagttcgaagtcttacgggagcggcaatcccgtaaactcccgctctcgtgaaaatcccgtcatttttaacgggagtcccgggcgggagtaattcgaaaatttaattaaaaactcacaaaaatatttttaatgcacaaatttgaaggacaatctttttattaaaggaaaaatatgtaagcagaaaactagaaaaatcagattttgggtcgaaaaccagaaaattttttcaaattagttcaaataaattttttttataattattctaacaaaaaaaaattttaactttatattttcgacttcctttcttaatgttaacaactttttacggcgtattttttgaaaaaaaaatttttgtgcatcaggtaggaggtgggagataatgaaattaaaatgataaaaaactaaattatccttaaatataaattgattttatatttcgcatagaaatttaaaattttttatttaaggcggaagaagcacatcaaaacaaaattttattaactaataaatcattgagaaaagcatcatcaacttacttcagtgaaggaaacaattttaaaaaataaaaataaattaatacctattattattataaattaatagagattttgaacaattttttaatcacatcacaaattg

SEQ ID NO: 16409 - DNA, 3747 bp, Heterodera glycines
  unsure (1)..(3747): unsure at all n locations
ccccccccctcccccgtccgcccgcgctataacccaacccgattttggagcagtgcacccacaattataatcagcacatggtcgtgtaatggtaaaacggtaatattttctacgtatttttgtttttgtttgagtcgtaatggactaaatttcatgtacaaacatgacggcatggcacccacacttataatctgacgcgatggatcaacggatggaggacggcgggacaaatcgagggaagaggataaacaagagacgaattctgacgaggttttggggatgggtggatggcatgatcagtcttcccaacaaatttgcctagacaggtgatgaagcaaatagtcgggtgcagctcatccacgcccccccccccgagaattttttaacagttaaaaactgatgaaattgtcaaataggtaaatgaaataagaagctataaaaatgaaagctttttcaccgattttttttggggggggaaaattaaaaatttgcattttgaaaaatttctatttctaattttttgtcttctgcagaattccggccaaaaatgggtgccccgtgcgctgctcgtcgacttggagccgcgcgtgctcagcgacatttgcaaccacgaggccaactcgtactcggaactgttcgacatggacaacttttaccagggaccgaccggctgaggggcgggcaacaattgggcacgcggttactacccgggcggacacattgtggacgacatcatggagctgatggaggcggaaagcgaacgggcggatcatttggagggctttgccatgtgccactccattcttggcggtgggtgaacagagttttgtgtccatgggaatgtttgacaaaaatgtttttaagcggagcaattattgttagttacatccccatatcgtttgcctcatgaaaatagtttaaaaaaacaaacaaattttctaagtttattgcaattggatttttttcctgcattagtgaaaaagaaaaaacctttatttgaaacttcaaaataggtattttgttgtgaaagaattgaaaaattaaaaagaaattttttttttgctaaagaaacctctaacaaataagaatttgacgaatttgactactaaaaaaacttcaattaatttttatattaatttttattagatttaaatttttaataatttttccaactcgtcgtccttcagtacgtcgtatgggcctcgccctggcgcacgccttgttcacatatgccctcttccccttcgtacccgctttgcccctcccccccgccctcaatttagccaagtttttcgttttcagcaattccgccgttttctccgccacccatcgctgcgaattgtccacttccgcggccaaccattccgcgcccgactcttttttggctgctcccaaattcaaatacgcagaaaagatttgtttggacgcctctctctcccgcggggacgacaaacggcgcgttttttccgctgcgattggtcatattttggtcgggtgagagaacaaaagttggtctaacagcagcagaggaacacccttaagacatgtgcaagaagtgttcaatgccgggtcattgtccgaatgtatcaaagcgtgtctaatggccgagtcgagctacgggttcagatgcaaatcactgatgttctacccgacggatgctgatcaggcaaacaaaagcatctcgaaagccgagaggggtcaaaaattggttgttaaccccggcgggcgattagattattttgtgcgcctcattttatttttagcatttaaaaaaacaaatttctgtcggatttgtcggaacacccacccaattttatatgcttttatttcagaattgtctgatgaattctgagagcagattcacccaatccgatgtttttgtacaggaagtgggcacaatctgatcaaaaatgatcattccgttgtcctttggcaggaccaaaatgtgcacatgctttacgtggacatggaacagccgcggcttcccccctcgccgcagcctttgcccgacgacgaaaggcgccgtttcaaggcaaaacatagcaaagaaaaagcgcccaaatttgacgccccttttccaaattaataaaatccgtgccaattaattgatctttgacactttcaggacattcccatcggcgcgagtgtatcagaaaaggacggagatttgcaaaaatggaccctttggtcgaagtgtcctctcagctcatccgttccaatgcttgccgaaatgcggcatcgctatttgaagtgccgcgaggcgaaggacgtgagaaagtgcccaaaagagtcaatgccatgccgaaaaagtgagtggacaaattggatggacagaaaaggagcacaaaagggaggaagagaaagaaggagcaccaaaataatctgacaaaattggcattttcaagttaaaatgtaacgaatgaattaatttatattgaaaataaatccgaggaatgccaaaattggcgaattgaaaatttaaagagcatttgcagtgccaaaaccgctgagaatacaaccgatttggacgttgacagcaaatgcgacggcggcctaacactccgacgaccgacggatgccggtcgattgccttgcggtcagagacgccctcgggcgaaaaaagccaaacgaacgaacaaatgctgacacatatatttattctctcttcgtttttgtttttattttttttagaaatttgcaaaaaaaaaaaatacacaaagaaaaaggaaagggtagcggcgagatcaaagggaaaagggaggggcaaagagagacaatggcaaagccaaagagcacaacaaaagtcggccgaccgatattctccgccgttttctttccgttttatgcttttccccccgtcctccaccaccgttgccgttgtccatcctccgttttgtgtccagtgatttgtcgtcgattgcgtcgtcccattgccggagactgaagaaattgaatcgcatcagctgattgtgaacgtccccagccgatgagcagtcattcgaagaaacggaactcttcccgcacataaacgttttgcgttgtcttcgccgagctaattaagagattgtcattaattagcaaagaaaaaaaaccgattagccaaccgatgtcgctgaagggcatggaacgtaggtgccctttgaactttttgaactgctccgctcaatgatcggagaagggcaggcgaccaaacaggcggaaacggcctgaaggaaaaccaatgaaaaattcgaattgtagtgcttgattagagctgaccactttcgccaccattatgtgctgcttttcgcgcaacaatttgacacgcaaacgattggcgaaaaactcagtttttccaaaatacgccaaggaatttgtggccgaattgagtacaacgccaaagtcggatagacggacgaggatggagaggataatgccgaacgattcgatgccgtagaaagactcgtaaatgtcgaagaaaatgggaagcgacctgaggagagggggatggatgatcagaaaatccagcccaatgcacctaaaaatcaggaatttgatcgcgataaatatggccaccgtccgtgacactttctctctgagttcttccaatgcgaccaccgaacggcgccgactttgtgactcgaaaagccttaaggtcaaccaatttcgaacagagtctgaccaatcactttcactcacatgcgacgagctttcagcgatctgtgcactttgtattccgtgacaattgtcatcaaagtgnatcgtcag

SEQ ID NO: 16410 - DNA, 555 bp, Heterodera glycines
tcggattcccattggacatcacgttaggcatggtattatagtacaaggaaatggctaatttcttaaacaatcattttaccgaagaaattgtgaggagaataaattcgccgtgtccgattaattaaccgttaattagcaataatgattcaatccgtcaatcgctagcttccttatacgtgctaacgatccgcgatttgacgttcctgctcccggccgatgtttgttgttggtccactaattggggaatttgaagatgttcagagcgttcactgtgctgagcagtgataaggaagtacagaacaccgatcaaagggaaaaagacggaggaaatgatcattggtcaattggatgcttccaactgaaatacgtgctttcctgccttccccccccctaatgtcacttatttaaatcccctcacggccggtcttctttttttcgttatttccttttaccattgttgacataattgtcagctgatcgtttccattaatccatcgccaattccattctttgcacattttcttccatattcactgcgtgttaagtcatgtgcgg

SEQ ID NO: 16411 - DNA, 1523 bp, Heterodera glycines
gatttggttgacaaacaaaaatgttataaccaaaaatttgggctcgtagtacgaaaacgagcccaacccaagtgtttctgtttacctaatcttttattagcaaaaaatccggagataactcatattaaatttaacagtcaaaattatgagtttcgtcagtttcttatacttcacattaaaatttatatccaaaatgttttcccactgtcagcaattgaatggtcatcattcgaagtgacaaatgagtggtcaacaagtacgaattggtctcaatttgcttgccattctccaaatattcgtccattgtttttgcattgaaatgaccttccaaaaggccctggagagtgaaaaagtgccaacaatcaaaaactaattgctcaattaattaattaattaccctgatgaacaaaagaatgtccactgattgcgagccgaacacgagaaatggtcgatagataacacaaaagttgaccatcccatgggctgctccgtcgttgctagtcgacttcttcaacagactgaacttcttgccgagttcggcgtgcctttcccggtccccaaattgtgcccggccttggcccactttctcccccaattctctcagcagtttgatttcttccccatcattttgctcctcctcctcctccccctccccttttccgtcctcaattcccccctcattcgcctctctttggccatcctccgcatccatcgctgcgttcgccaaattttggtcaaaatgccaaagcatcgtttgccattccgtcgggtcatgcgggtcaatgttcggcctcattttggcagtgaacaccagcagtggtgccccgttgtgctgctgctgctggtcaattagcggactttgccgaaccgccaaatgccaaagcactaaaccgatgaagcgcaaccgcggcacaatgcccacggcattctgtaaatgtttttcgatttttttttgacttattacatccctttttcgcactttgtcatgctttttgatcgctttccacattactcttgcaatttcaaaaatgcgttcagtttcgtccaatttgtcttccgaatgttcggccatttctttggcttttcctaatgcttcatttaatgcacaaattgaataagcatcattttcctgtggaatttaatcagttttttaatttattattatttttgttttacgatactttttccttttcaaattctcccccgagggcagcaattgttgcgtttcgcactttttcaatttccgatttgtttgccagcataatcttcaactgattcatgtaatcaaagtgagttttatgcgtcaaatttggtcgcttattttccaatgattgaacaatttttagcctttttcctttggctaaataatttatattttataattttaatgcaatatttatccaaattattcgtttcaatgctcaccaattctttgagaattcagtgcattaaatgtttggaggtttgtggataaattgcaataatttttatcattttttgctaaattttaattttttaatttt

SEQ ID NO: 16412 - DNA, 3050 bp, Heterodera glycines
  unsure (1)..(3050): unsure at all n locations
ttttgatcttttaaagtctgaatattatttancacactttcattttaagagaatttgacagatttaattaattttcaaaattccctgtacaactttgcatgcgagattttatttggccaaattttaatcttttaaagtctgaatatttacacactttgacattaaaagaatttgacagatttaattaattttcaaaattccatgtacaactttgcatgcgagattttatttggccaaattttaatcttttaaagtctgaatatttacacactttgacattaaaagaatttgacagatttaattaattttcagaattactatatttgaaaaaataatgttttttaaagtagttttttttcaacaatttaaagtggttattgacctccataattaatatataaaccaaaacattttaaaataaaatattaattatttaatttatcgaaaattagtaaaattacactttatcaagcgcatggggttatatttataaaaaagcccttttaaagaaaatatactaaatttggcaattttgatttattatcttaattaaacgtatagaaagagataatagctatatttactcatttgagtctattgtattcgttagattttatattctcattcgctttttcattattttttttataatgtttttatgtgcctccctactaaaaaaatatttttttaatgctaaatcactaaaattcaaaaaatgcgcagaaaaacgtgcttttcgtatctttctcttaaaatatatctgaacaaatatttagcataaaatgaattcatcctttttattcgttataatgctcgtgctgcgtatttgcggcgaacaaaatgtcgcaaatcgacgctatataacggcggtacatgagggtgctcatgtactcgcactctggaggtcgcgctatggagacaaagtcgaaagcgtgagtattaataaaactttaatttatggatatatttaaaattagagatttttttttttggctctaaaaccgtcaaaataggtagaccttggtcttaaagacacaaagataggctctaattaatacaaaacaggcactaaaaccctgatttttaggagtataaaatgattaaaatttattcaaaaaggtaacaaaattaagccaaatcagtattgagacaaataatttttaaaaacgcaaattcttatcaagaaaataaataaataaattttgtgcatgaatttttgagaaaatttcatttttaatggtgtgtttttgaaaattttagggtctattcttatgggtatattttccagaaatttgtggggtcgattcttaggggtatatttttcttaataattttgggcaaaatgccaaaatagtcaaaattgattttatggctttttatgatctaaaaataaaattggcactataattcgcaaagtaacttatcaacccaccataaaaacttgtttttcatgccatttggagctcaggaaaaaataggctaatacctaaaaaatacatccctatttaatacaggtaacggttgaacgaacggcgacaacatttggtcgaacaatgttttgggctaagcgttggtacactcctgaccagctgttttcgcgtctgattgcgtcaattggtgagaactttcttttttgtaataattgccgcgattttttgcgaaaaaacccttttttttgctcaatgttttgaagaaatgagctaaaaaacgcaattctttttaaaaatctcgattcttatgtcactatccgtcactagaaatcacttttttggcgtttcgtcactaaaatagtaaaaattcactatttgcatttttcactatacgattttttgaaaaaattttcaaataaaaaagcaataaaacgaaaaatagacccctaagaatcaaccccaataatttaaaaaaactcttctaagaaatgaaaaaattttcttaaatttcattttcttgccaagactttgtaattaaaaaaaattttatttaatttttggctgaaaattgtgtcactgttcgtcaccatttcgcactttttgccaatatttggtatttttagtcactgttttagttaacttttcgatatttttcgtcatctaaaagtcgcggccctagtaataactaaaatggtgatgaaactaattttattttttcatacagcaggggaagaggctgagatcatgtttttcaatcaaggccctcctcctgagggccttaaaaccgaccaaaccgaaatggacgacgttgctctaacatgggtatgtgaataaaaatttctaaaacagttatagattataaatcagagttcccaagttttttttcaaaataaggcaaaatggctcaaaaactaagattcggaccccaatttttgcatttttatttacaaactaagaataagcacaaaacaaggaggtcgtgccaaaaaaggataaatcttctaaataaggcatttttaatttctaagatcgggcacgcacctccaaacaatgacaaatcttacaaataaggacacttgggaactctgatatagatacatcacttctatgagaactcacatgacgtggcaccatttgtggttcctgtgcgataccgaacaactgcccaagggcgattaatgatggcccaactgatagcaaaagcacgaagaacatttcgggaagcgtttggtacagaggaaagccgccaatgtttaagaatggtaaacttcaataattaaaaataaattttatcttcttttcaatttttcaatattaaaattttttaattcgagtttgccgacgagctcgttcgcaaaggaacaatgaattatggtgaaatttttcggtaagcgctttattttatagcttattttgagaacttagaaaaattaattttagaattctcggcccaccaacaaaccccgacaatgtggttgatcactgaagggcaaaaaaaaaaacacatgcataaataattaaatggaacttatgataaaataataaatttttaataatatcttataaagttattttttcgantaaaaaattaaaataanattaaagtcgcaatcccttcat

SEQ ID NO: 16413 - DNA, 1190 bp, Heterodera glycines
agcgaccaataaaaaagtagtttcttgtaatgttttttacaaaaaatagcaaatgaaaatggtgagggagcaagtatcggatgaaaatcaaaaccaagtataaagttcaagcaattaaaaataatagaaaaaataatttttttttttaattgtaaataaatgcgtaccaatgacccatgaataatataataatgaaatttttatttattagtagtttgcatttaaataatttttaaggattgtatttatattccttcttcataattttgtttttataattgttcttattcgaaaaatatgataattattaatatttaatttggtttacaatggaaatatactaaaaattttttcttattttttcagacgagaaacttaatttaaaaaaatttatattcatattttttgccatttgaggatatttatgcctatttaatgccagttcgcaattttgctaatttttcttgaataaataaaagttttttaatttatttattgttattacaaaaagttcaataaaaaagttttgaagaaatattttttggtcaaatctccaaaaaatgtggtctcttcaatttttgcatttattttattattactattattattattgactaaaaatgtcgtaaaatgaaataagcacagaaattcgttttttgagttcatttctttaatgcatataagcaaaaaaattaaataaattaaagtcccagcctatttgttagtcattattttcattaaatttttaattttcatcacaattaaattttttatcaaaataaaaaaatctgggtatttatgagcagaaaaagtgcaaattcattgatcgatttgatgaatttcgagaattgtatagccaggaagaacagaaagaatttgcaaacgaattgggcaaactctgaaaatattaaaagaaatgttcaaccagttgatcagtgatttttgtttgatcatgatcttgatgacttctaaaagcatagtttgaaactttataaaagatttttgtagggaatttaaaaaacattttttatttatgcaaaaataaaattaaaaaactttcaataattttacatacctttttttgtcatggaaaaagattttttcgaatgactttatcaaatgctgattttttatgagcaactgatttgaaatcgaattaaagaaaaaatttttttaaaatttattttttt

SEQ ID NO: 16414 - DNA, 1855 bp, Heterodera glycines
tggaagctgggacagaagtgatatacggtatcagtatttttattcttctattcattctttcctgcatactctcctttttaaggtcaattgcaaaaactttacattgcatttttaattgtttctatttaccatttaaagtcatcaaaggatttataaaaagagacataaaatacgatgacgagttagaaatgaatctattaaataataaacgaaaaagaaatgatttaaatgaatcaataaagaaaaagagaaacagaagattaaaaaacttaagcctaaaagcaaccactagcatgactttcatttctataatagtattggcacttattaataaaataaattgcgctgccgaagttgcaatcattcaggcaacttcagaggattgcatccgaaaaacgaatgggtccatttgtcgaataaaaggtacagcggaaatgacaattcttccagctggtcagaaaatttctctggcactaaaaaatcaatacagccaaactattggcttattaaaaataaaattaaattcactcactctaaattgtgtgcaggaaacggtagcttggctacgagattacggtataaaagtaaaatcagcaagaagatgtcccactatgggtacatgtaagaaagggaaatgtgcaaatattagaacaagtaaaaatattgaagaattaaaagagtattgggattacccaggaaactcgtattgtatggagggagaaagagtttggggttcaaagtgtgccctaccatcattcgggattaatgagtgttttttttataaaataatagcaattccaataactccgacagtgtggaaacaagtaaggtgtttaaattgggattatgaaattaaagcggaaattgagctaaaaagtgaaaataaatcagtaaaaaaggaattaactctgtacccgggaattacagaagaatggaatgagttttcctttacgccccaaggagtaactccgcctatttctcctcttttaagtgattatttctttatttcacaaaaagacataatttatgccggaaaagaagtaaaaactaagttaatttgtaaaaatcaaataaatgcttcaaacttcgaatgtgatttacaaaaagatgtttgtcgtgaatgttggataaacagcaccaaagaggagcctttaatccaatgcgaatgtgaagactatttaattgaagatttggaacctaaactcccgtttactaatgataaattaaatttaagaagtgacggaagtaaaattttaagcgaaacgagttatacaccgatacaattattagtaagagtagaaaatttaaaaatagtggcggaaatagacggaaatatttgcaaagcaaaacaaattggccaattatctgggtgttatgagtgccaaacgggaggagtacttaattacacttgctggacaaattggggagaaagcattgccgagataagatgcccaggaggtttaatctttctagcaaagtgtaaaaaagaaggtgagaaccaagtggacattcttccatttaatcaagccaaaattaatatgaattgcaaaattatatgcccgggagggaaaaatgagttaaaaataaagggcaagcttatgtatataccagtaaatgaaagagtgtttaaaatccgcacttcagaaagattaaaaataaaagaaagcggcaaattgaaatgggacgatttatttgaattcgattttaaaaatttatttaatcctttgcaaattttaataatctgacctctctcattatttttgtatttctcacaattggagtcatttttattttatggaatttttacctctgttatgggataccgatttgtcatcggcatttttgatttttgaaa

SEQ ID NO: 16415 - DNA, 1657 bp, Heterodera glycines
atgcggaaaagggaatgaaaaaatttgggtgggaaagggatggaaaatgggaagaacaattgcgatatttcagaaatggtaatgagcacgggcttaccaaatgggtttcagttggatggcctgaattgggctcaggttcaccaatgtattccccctccctccctgttttatcccaacccaaagataatgagaacagcgattgtacaaccgcaattattggcacaacagcctcaaccattggcacagcaaccgcaaccattgacacaacagccgcaaccattgacacaacagcctcaaccattgacacaacagcctcagcaattgccgcaacagcaaagtcaacaactgcctcaacagcctcagcaattgccgcaacagcaaagtcagcaactaccacaacaacctcatcaattgcaattgcagccgcaacaatcggttcagcagccgcaacagttggttcagcagccgcaacagttggttcagcagccgcaacaattgccacaacaagaagtaccgcagttgttgcaacgagtgttgtattcggtacaaccacccctaccatcgcaacaacgtcatcatcgacctctctttggaagagaaaaccgattcacatctcgtagaattggtccaaaccgttcacatccgtacactattcgactgccagcaacagcacaacaaccattccgtgaagcacaggaagttcagccgtctttgatcaattggccctgggacaccccccctaatctcaatgtgccattcgagattcgccgtgtcctactccgtcgcttagcccaagaaagggaacatgcatttggcctagccggagcagttcatcaatggaacccacccatggcaattcttttgttggccctcgaatcattctacagcagccttctcgccatggcggtaaatgaagatggtggatcggtgtcggcacaacactgatcagtcgcggcgggagtgtcatcgccaatcgattaaagcgatgaggaaagaaggaaaaggatgactaatcgaccaaagatcgaacaaaggacaaatcatatttaaggagtgattgttttacattcgggatcattcaaattttgctattgggaaataaagcaaagagcattgagattgatcaataaagttatttgtgttaaatataataaagaaaagggttcccctagccttatttactagggaaggtcatcctgatcactctgatcatataaaaggaacgacaggggtattattttgtaaaaagtctttttttccccaataaacttttcataccccatttttcgcaccgtgaatgttatttttattgaattctgaaccggtttgagtagtagagtacaaaaaattgaaaatttcgaaatcatgtttcccactcccttctcccaggggtattattttgtaaagtctttttccccccaataaacttttcataccccatttttcgcaccgtgaatgttatttttattgaattctgaaccggtttgagtagattagagtacaaaaaattgaaaatttcgaaatcatgtttcccactcccttctcccaggggtattattttgtaaaaagtctttttttccccaataaacttttcataccccatttttcgcaccgtgaatgttatttttattgaattctgaacgcggtttgagtagat

SEQ ID NO: 16416 - DNA, 3299 bp, Heterodera glycines
cgcataattgtcgaacactgtcggcacatattcgttgggaaatttgttggttgtgtaggaaatgagcagacaagtctttcccaccgcgccgtcgcccaccacaacgcatttgatggtctgcatcatgcacagatgatttgctcaccaattttatgacagaaaaaaagactgtcctggtctgattaatgcttaaaaaagtaatgaatttgaagtcgaaaaaagttcataagaaataaagctcggcgggataggggctcccgcgagatttttttacgggattacggccccgatcacggaaaattttagactccaacttccgtaaattattttttacccggctctaataacaaattattttatgtaattttttttttgtaattaaaaagaatattttgtgatttatgattttgcctaaatttttaaataaaaaattagtgtattgatagaatgtctcttgaagaaaatgaacgttctttctttttatcaatcaatcaatgaatgtgtgtgttttgtttatgtagttctgcggaagattattgggagatagagacctttatacaattatgtatatgttctatacatatatatgtatttacactattggtttttgttttattgaaaattcatatgtatgtattatcctcccgggagtgcctcggctgtcagcactgactgttttttctaggaattggtggaagaaggcgggaatgactttaatttaactttatctatcctttaatttaactatctatccttcatttatagtaacaacaatgaaaagcttacaatagttctgctatatatataacttacctattctttcgcacatttttcacaaggatttattgaaaaacaaagaaatgaacgtgtcaggccccgcgattgatcaaagtgggaattcatgggattaaattaaacattcactgttatttcctgattaaggtgaaaaaaatcggaaactacttcaggatttgcaaaagaccaaacaacaaatgatgatgaggggtgccaggtaatttcggatgaagaaagggctattgtaaataatagggtttttttcgttgacggaccaaaacaaatgtggtatcaatcgtaagctctcgattagacaaatcgatttaaagctgaaagaaattgaagcgactaaaccggtctaaagctcaaaaatgtaaggaaaattgggcatttctaattttaaaacggtcaaacccgaacaaatttgatatcactcgaaaaattttatgagttaggtttaaaaatcagtggatgaagtcgaatcgacggcatctaagcaccgagacaactgagtcctagtgaaaatagacatttaatggcattttccatgttttagtgctgtgagtcgttccgcccaatcgccacttttgccttccgcttcatcgagcagtttgtcctccctacaacaagcatcgactgatagtacgcagggaacattcgccaccagtgggcaacaacagcacggcactttagcgaataaatccaacacaatgctcgccatggaaatgatccaaaaatccagtataatcttttacccgaccaactccaattatggcaaccaacttctgcccgggtttccccgttttttggctgactgataaaacattttacggagaaaaccgtattttaaaattaaaaaaagaaaggcaacatttaaatatacaaatcgtgttccctcctatgtgttaatagcacaatgcgtgttgggtactactaggtcgttgcataaaaaagggcgctttttcaaaatgactttttttaagacttgattaacgtttgttatgtcttttttgtgtgtaattcttttatctgaatgttctcgtcatgtttttgccaaaaattttgattttgtccttttatatctaaagttacagtccaaaaaattgggtaaggtcaacaaaatttggctaccattttacaccaacgtccataacttgagttaaaattgtcaaaacgacttaaaacttggtcagattatgaaatttgatgagcttaacaagaaaaagcctgaaagaaatttttctgaaaaagaaaaaacaaaattttttggccatgtttattttggccaagtttccaaatctattggccaaaccgaaagtcaaaaacaaaatccaaaataattccatcggggttttgaggctttttatgcccttaaataatataaaaaattacagaatcgcacaagtttccaaaattgtgttatgggcgattattcgaatttctgaaaacgaaggccaaggagaaaacacttgtctttggacaaaggatttttcttatatacgctatgtcattccaaaaacgaaagttgggccttaaagaaaaattccattcttttgaggatggaagggaagggaagtattagaatttgtccaaggtcattaaacgcatttatttaaatagtgatttttgatgggaaaagtttcgtgttaattaaattatgcaaattcacttcgtccggaagttcagtgatcgaattctccgacaagtcgatgacctccaaccgcagcagtcgcgtcacgacggagggaaatgtgctgaatttgttgttggacgcgttcatttgggtcagcgaattgcacgcggccaatgggtcgggcagttcagtgagctgattgccttcaattttaggaaaattaagtcgggaaaaaataaaaatacctaaataaattagttttgtaattcttattgttagaaatttactcaattgggaaacaaaaaaaaggcaaaccagaaacatcgagcaattccaatgtcttcaaacagccaatttcgtcgggcaaattggtcagacggttgttggcgatgtacaactgtttgagcatgctgaaagtgccgatggtcgaaggcaattcgcgcaatttgttcgacgacagctccaaaattctgagcaaagaatggacctgaaatttgaaaatttggaccttatttttcatgaaccccaaattatcgaccattttaagtaaaaaatgaagaattaattacctcctcgacaattcccgacggcactcttttgatgccggcccctttcagttgcaaacttcgacttttcttcgactgttccaaaaggcgtcgtaaggcactcgacgagagatcatttgagccgaattttagcgcggacggcagcgctttttgaaggcgagtcgccggactatccttttttgaggacgaagatgacggatgaccctttgagcgatttgagtgttcattgcccataatcagcagacaacaagaacgaaaataaaaggccaattaaatggatttaatatctgaaaaatgaaaatcgg

SEQ ID NO: 16417 - DNA, 1550 bp, Heterodera glycines
atagcatcacgttttctgctgttcgctgatcgcatggaccgtttttacgctaaaacactgacaaaaaatgaggcaattaacggagacggacggggcaaattccgcctcaactgttggagacaatgaaaataataatggcattgatcagcagcagaaacggtccgaagcgctgacgaaactgcgccaatggcggactcgaatttcgaccggcaaaatggaccaggtgaacggtcaatagtcaattgtgatcgccaattttctgatcaaatcgatcagttaattgggctgattttgacaactggtcaatctgacagaccagcacacagtgatcactcatcagtcggcgacacacatactttctattttactttttttagattctcccaggcctttttgttggaggactacggtatggttttacagtatttacagaaactgtattttgccccaagaaatttttttcttgcattatatctgtgccgtcttttctgaccaatgagagataaataatcagccaatgtccgagaatgaaaacaattatgcctaaattttaaaaaagtttaaaaattaattgcctatttcaaatttccattaattatgaactcattagtgaggcaatgaatgtgccattgttatccgataatggcatcagtgcggttgtctcagtgcgcggcctttcccccgagtgccattttgggcccggcattgcgctgcttcggttgacacttagcgactcgcctggcgaaaacattttccagcatttcccagccgttaattcatttgtgcatggccatcggctcgaaaatggttggcattatttagcaaatttatttatttttatttttttattaattttatttgccgtttaataaacttcctcgttatttggtcaatgtcattcgaaagcccagcactttaatagtctttttttctatatttaacattcctttgaatatttttttattttttatatttttgatcccctctttacgaattatgtatttatgaatgaatgtaaccaataaaactcacctatttgatcagaaaatgtgctgatccattgtttggccggtgtcagccgaagtgtgtgcctttgcctggcctatttgatgacggtgaccaatttggactatcccaatgctttggacttcgtttgtcgtcgccatttcggcgcgaagccaaattttggtttcaaaatgcaactgaccaagtttggccagcaggtgactaaccatttaattttatttattattattttattaaagtgttatttttcaacagtttgtccaaagggaacggcgccgacttttcgccgaattttctcatttcaccggccaattgcgtgaccaatttcaaagcgattgcatgtttaccaactcgctttatgttggaggttcttccgaagcaatttttgctgagaatggcactgacaaaggtcaaaaacggcacggagccgggaaagaagccgaaagtaagccaaggaaaagtcaattcgaaatttaattggcagaaaattttcattccattttttttggttttaatcaaaataa

SEQ ID NO: 16418 - DNA, 2136 bp, Heterodera glycines
ccagcatttcccagccgttaattcatttgtgcatggcttttctatcgaaaatggttggcattatttagcaaatttatttatttttatttttttattaattttatttgccgtttaataaacttcctcgttatttggtcaatgtcattcgaaagcccagcactttaatagtctttttttctatatttaacattcctttgaatatttttttatatttttgatcccctctttacgaattatgtatttatgaatgaatgtaaccaataaaactcacctatttgatcagaaaatgtgctgatccattgtttggccggtgtcagccgaagtgtgtgcctttgcctggcctatttgatgaccgtgaccaatttggactatcccaatgctttggacttcgtttgtcgtcgccatttcggtgcgaagccaaattttggtttcaaaatgcaactgaccaagttcggccagcaggtgactaaccatttattttatttattattattttattaaagtgttatttttcaacagtttgtccaaagggaacggcgccgacttttcgccgaattttctcatttcaccggccaattgcgtgaccaatttcaaagcgattgcatgtttaccaactcgctttatgttggaggttcttccgaagcaatttttgctgagaatggcactgacaaaggtcaaaaacggcacggagccgggaaagaagccgaaagtaagccaaggaaaagtcaattcgaaatttaattggcagaaaattttcattccattttttttggttttaatcaaaataatattttattgtatttttgtgtgtctgatgaatttgtttttttgtcgaaatatgagcatcatttgaggcgaacaccggccgcgtcattctgttgacgaggattatttgaaggcggagaagcggcatagaaaaagtgcaaatggcacagcaaaaaacagcaatggcaccggcacttgctcaccaacttcccctttggcattagcagaggaagaagcattgccatcagcagcggagggtggcaccaccgccacgcggcggcgaatgccctccggggaggaggagtggggcgtaagccaaagcggaccccaaagaatggcacatgaatgatgaagacaaggcgattgtaatttggcacaattaacaaagctactggcgcagaccttgccactaattatctcctcctttaattttgctttttcgcagggaaatattgccgacaaatgccaaagattggtttctttaggatagggcctaatgtaatgaaaggaacctccgactcattcagttacttaaatgggcatttttcatttggccataaacccaaaaagtatgacgtgccgtcgccatccatggcttaataagtgttattactcattttgtttgcgtataaattggtagtgccctgctgaaatttgacacagcttttaatctcttctcgcgtggacatttaacacttttaattaatttcctacggctgcggctttccacaaaaatgtcgcccatttcgaactgcaacagttcactaatgtgtcaaataaatttctgtttaaagtctttatttttcttctcttttgtttgtttctccgttaagtgttcattttgatttccttaattgattattccttttattttctcaataacaaaaatttaattattattatatttttcattaaaaaatgattaaaattgtctccgtaatttacttccctttttcccccttttgttaaatatgccattgttttcttctcttctcttctttctcttctgtctggcgctgtcttcgaattttacatttttccgaaagcaattaaataagcaatttcaaaaaattatacgttctttaacacgcaatttgaaatggaccacaaattatttttcaaattgtaaattattataattttaattatgagtacgtaaaacgtttcatagaacatttttacaaaattttagtaattttttcgacctgttacattttgtcaatgcaatcaatatgaaagagaagaattagctaattgtgtaatcaatagggttgtaaattatatggactaaaaaacgctaaatatggacataaaatatggactaaaaaagcccgaaatatggactaaaaagcccaaaaacggccaaatatg

SEQ ID NO: 16419 - DNA, 3152 bp, Heterodera glycines
  unsure (1)..(3152): unsure at all n locations
aggtcctggggaggagaacacaaaataaaaatcacaaagtttaaaaatgctaataattttcaattcgtttcattgttgtaagaatggctcgaaattttgcaggtaaataacttactataagagctttatgtatgcaaaagttcaaaaagcttcgattacgtacaaatttttaaaaaatacgcaattttttttttataaaagttgaaaatttgttgtaaaaagataaaatgtgctagtttttctgcaaaatttcaggtcattctggcaactacgaaacgtacaaaatcaacattttaaaaaacttcataatttttttatttacctaaaaatggaagccctattttttataattttaattcttttcgcgagagagaaaactgctgccacttctgtgatgccaaaatgagatgaagagacaaaaaatccaaaagtgcggtacaattattgtcttctattacgtaattttgtgccaacaacattgacggcattgtgccattgccaaagagcgcccatacacttttaatccctcagcactcattatgccgtcagctcaaacccaaacgcacacagaaaaaaaatgatgaatttaattttgtatatgaacgacgtaaatgagacgattagaagaagaaggagaagcgggtgtgaagaaggaagagcttcttccattgacgaaatatttacataatgagctaggtctttggaaaaaaaattccattttttttattatttgtggttgccgaggaaatttccccgttaaaattcagcgacaaaaataacgaaaaaaaattcaggaaaatcgtcaccgattgtgaatgaatgatggtgttctttgatanacccaaataaatataattttttttttttgaaaaattaatttttattcttttttttacccaaaaagcgcaaagaaaatttaattcccatttcatttttaaattatttaattattgtatatacatactaaatgcatttttgtttctcagaatttaatttgtcaaagtgcgtgagttaattaatattgaatattgtctcaattgcttaaattaaattttttacatacaccaggtcaatggaatgaattaaaaatgaactaagtaatgtaattaaaaaggaaccaattgtcaggcttcaaaatcacatcatttttaattaaaaaaatttccttttattgtaatgatttaaatagaaaattaagtacatataaaagtgcttttattaaattataaatgccgaaaatagaaacagttcactcaaaaacgaaagtaacacgcccacggccttcttttaaatcaattagcattctaaaaatggattaattaaatttccaaaataagcctaaaattggcatgctgtcaatgtttttatagaattttcttttcgttcttttccaatatttaattattattatttttttgtatttaaattaaaaaaaaattgtctatttttttaaagtttcgaaattaattatttcggtttttaaaataaaatacaggttgcttgacttttacacatttatttatctaaatgctaacatattcatttaaatattttgccggatgcaatttttacctcttttttccggcacttttatttacattttctttaataattaatttacaataaaggtgaaatcggcggaaagacacctcacagacaaaatgagtgggtgcgaaacattcccacacaaatattttgccggaaatctctttacaaaaacaatgaaacccatttcccttaactaactaattatcgattgctcatttgactaattaatagcgatttaccggcttaattagacccattaggtcgattaataaggttttctttggtaaagtgccaattttttttacaacatccctttgatttataaatgcaattattatatagggaaaatggatatctttttatgcttttaaaaattaattttcctcagaaaatgtaattaatctcttgacaagccttatgccattaaaattccaaaattttaaaccatttacatgctaaatacggcaatattttgcgattcaaaagccacaaattcttagccgctttttaatgggcggagccgcccattcattgtaaaggattaatggaaatataaaagcggcattggtttagcgcattcgcacatataatctctgtttctgcactaatttaaaaataacttattaatagggacgtgaattttaggttttaactattttttttgctcaattgttttgaagaaaggagctcaaaaaacgcatttccgcataaaaatttttcgattctgatgtcattatcggtcactagaaatcactattttgggattttgtcactaaaatagtgaaaattcactattttggagttttgtcactattttttcactatttcgacattttttggaaaattctttaacaaaaatgcaataaaaccaaaaaatacacccctaagaatctacaaaaaaaaatcaaaaagcactcctaagaaatgaaaaaaattttctcaaaaaggtattttcgtggcaagaattttaattttaaaaattatttttttatgtacctattttgtttttttgcccttaaaaatcccagccctactcattcatttgcaactgcaatcagtgaataaaaattatttttgcttaatttttggctgaaaattatgtcactattcgtcactatttctgaatttttttcactattttgtcactattttggcatttttactcactatttaagttaactattccgggatttttcttcactaaaattcacgtccctacttattaaaaatgtaaaaatttatttttaaagttagaaaaaaacaaaatgcttcgacaaatattttcctcttcgaaaatttctttgatcttacgcatcttcacattgtttatattcttccttatctttcgccaaaaaatatgcgccgatgcgttccttctcagtcatcgaaatttggtaaggcattataaatcaaaataaaacaattaaatatataatatctaaaaaatatttttatttttgtttattttaatctcaagaagaattcgaagttttaaaattaatttaaaatgaaaagaaaaaaaattaaaattttgttttctttggtatgaaaaatttttctgttttttcaaatatcattttcttcatgcgccctgcgagcttaaa

SEQ ID NO: 16420 - DNA, 1890 bp, Heterodera glycines
  unsure (1)..(1890): unsure at all n locations
aaaaatatttaaatctgatcaaaaagcctcacaatgatcaccaatgcaaccagggcgaatagcaaaatgcaccagaggatgacatttggcaccacggaattattgacataagcatccgagtttgccgatgacgaattcgatgatggcccatgcccattgagctgcttgaaaaattggcgcaagtgttcatagtcttcactttgggaatggttggccaaacaaaaatgaatgccgatgacggtgatcaaaagaatggtgatcagaacagtggtggtcattttgattagaaaatgtttaaaatttgtggaaaaaatacagactgaaatcagaacaacataaaatgagatgaagaaatgatcaaattattttttaaaaattttataaaatatatttataaaataatttctggtacataaatgatttttgataataataacaattagggcttctaattgcatacacccatataaattaaaaagtctaatattaaaacaaagaatttttttaaatccccatttttttgttaaaagtgaaaattttacgtaaatttttaacgcaaaattttcaagtttttaaaaaattgagggtttgtaataatgttttgattatacgaattttacatcagttttttttaaacttggtgaacatataattggaagccctaatcctaataataataaaatggtgttaaataatcatttgttgaatgattgattcttttctctcaattgaatattctgacagctctctctctctctctctccgatcattgggtaggcaatgaacggtgattaagcaaattggtgtaatcattttttgtaatgtccgattatgcacatttacccaactgattggaaatgaataaattattttattatttaaaaaaataaataaataatcaaaacaaatttacagatatggatggatatagtgaagaaaagcaatgaaaaggaaagaaataattatgtgtaatgttcggaaaatgtgatttttcagtatcaatatcattaattagtttaattagttaagtccatttatcgcgttttttaatcggtttttccgagaaagcggtcaaaagtcgagcttctctcaattaatgaccacatcaaatgcattttcgctttcgccattgcttctctttttgtcaatctgaaattgatcaatcagccatacccaaaatttcgctgtaattgatttgttatctataatgaattaataaaagaaattagcaaattcaaaactaaattaggtaaaaaaaattaataaattaacatcttatatattttcaaatttattgaagatttttttcctaaaatcattgacaaaaaataattaataaaataggtaatttcttttagactaattatttttaatgaaattttaagatggaatttactaaaaattttcattcttttttaacaaaattttataaactctttcttcccgcatttcaatcaaaatttaatttctgaaatattgtaattccttgccaaacatcgattaaacctttcataacatcaaatctataaaaaatagtttttatatattttatggtttttgctcgtaaaatttttgcgtccaatgaaacatttattttcgccaatttttcgtttttttttaattttttgattgtgcacattaatccgcccagcagaattagtaatggcgacagttcaagaggtttttgtttgtcaaacacagtcacatcctttgatattatttcgccattttttgtttttttaatcggttcagaattaattattattactaattgcatgggagtgagagaaatgccaaaacagcatataaaaggngcacagattggagcaacaaatcattcattaatttccgctcaaaagtgccgtcgatttcctccctacnnaaagcatc

SEQ ID NO: 16421 - DNA, 1555 bp, Heterodera glycines
cttcaaagccgagcaaaaaggctgaattcgccgaatcggtaccaaaaagtgcagttgacagagacggggacggaccaaccgcgggtcatcacaaaggtggacattcgcattggatttgagaaaccccccttctcaaaagtgggtgcaacagcaaagcaacgagcgaagtgccggcggacacgggggcactccggtgaagatacattcaccgcatcagttcagcccatgcggacggacgacggacccgcgggaatttcgagaaagacagcgacgtatgaaagagacgcggctgagcagcaccgtgtcgccaggcccacgctcgcaactgctgacagacggacggacacgggcggaggtgtaattgtacactagcaattagggatttgatctgccgacaaatagggccatacttgggaaagggtgggggcatctgtttttagctgtgtcctatttcggcatttatttttgatctttcaaaaccactctgatttatttgcacagacggggcttgctgatgggagcggagctttgtacattgggacggcatcgaaaggcataatcgacagaagtcaccagcacaatgcacaggtgggctttaacaatgatcacatttaattgatcattagcagtgaaggaatgccaaacggaaaggattgaaaagatactcaacaaagacaattttcgttgatttttatgacttaaattttgccaatcttttgccgcgctgattaaattctgatcaatcatttgtcatgtcaattgttctttgaaggtttatcggtgcctttacgcacaaaatccattcaatgaaatgaacggcgatttgattggttatctgaacgagatggagtcaatggaaagtccgcaagtgcgaaagtcaaaatcgagcccaacgattgcggaagttaatggaggaaaagcagtggaaaaaacgcagcaaactcaacaagggaaaggtgcacttaataagcttaatcatggccatgggaggcaaaggaattcgaactcggaaaaggggccgagtccatccgggcaaaattaaaacaaaatgaaaggtttaatttaacagagaaagtgatgagaatggtgaacggacacgaagggagaagcgcatccgaagaagcaaaaggaaacaatgggacggtggtggtaaacggaaggagtaaagatgagagaaacggcggaaggacagtgacaacgataggagagacagtgagagaaaagagagagagagaggggggggagtagggggaggggaagcgagacgaaggcaaagaaaggcataaatttcaccctgacattatgtgcaagattaggcactataaaaagtcaccagcagtgccgcaaaagttactgttacaaatcagttttcgggaaaaacggcatttttttcaaatttcaattaaacctataatttttctcaaaaaataagattttttttctcgaacttgaaaaaattagcaaaaaaattaaaagaaaaaattttgtgtacaagttccctagtgcacgcctggggaaataaaataataaaacactcatttttaagatggttagt

SEQ ID NO: 16422 - DNA, 1729 bp, Heterodera glycines
aaaaaaattaactaaaaaaattttgtgtacaagttgcctagtgcacgaactctgtataaaataataaaacactcatttttaagatggttagtgatgccaccgacggagaacagcagcaacagaaaaggaaaaagaaaaggaaacgcgggaggtcgtttttcgcttcgattgttcacagaaagaacaaatgaaacgattaattaggcatttaagtggtgatctcgaaagtgaacagatttattgaaaatgaaaaagataaattttagaaaatgacgcaagaaaacaataagtgaaagggggtaattgagtgttaattgggcaataagtgaattcttttgggcaagtgcgcttttggcttacaaatttgttagttttttgtttttttatcaattatctaatttttttttagtccgtccgttcatttgcttttctcagttgctcttaataagcaaccctaaatgtttttcatttctcaatcgtcgcacaaaagttgcgcttaattgcgggcaaaagtttgccccgacattcgccaaaaccaatgcgaatttcgcccgtcggactttcacattttcctgaagttcaaaatcagttgcttaccaccctttgtatttcaattgcaacacccgaaatgatcacttcgtcgccatccttcagaaatttacgcgtctccccactttcgcccaatttgaccgcatttgttcccttccaggagagttccaacagacagccaaaagagtcgggagtctcgaaacaatgaaatgccaaacaaacaacgcaaaaatgctaccggtccactcaaagtgccagagcccataaggtcgccgacccgaacgttgcaaccattggacgtgtgatgagccaattgttgtttcaaagtccaatagagatgctaaacaaaaataatgaggaaaagcgtgggcaaacaataaaactcgaaaattggttcgacaaatcggaactgagcgatcgcttccctccgctaaatgtccaattgaaaatggagggaaatggacgacaaacgtttaatttcaacggtcaaatcgatgttgaagctgtacggatcggaatgattcagatgggcaaacggagatggattttgggaaggattgtcgacgacgaacggacggagtgcttccattgtgacgacccacggggaaatggtggtggcgaaacttttgccgaggaatgggcccagcggaacatactcccatttttggatgtcccttgctgaaatgtctttcgcccattttgtcgtttgctcttttgcccaccactccaatcattcatcagaaccattccgaagatgtgttcctccgtcttctcaattggaattggcgtgcccaaagcgttttcgggccctcccacgaaaaatgccatttccaactcaaagtccattaaccgacttgtcacaaagttcggctgggtatctgaaaataataccaaaggataagggcatgggatggatgcgaaaacgagccatcttccgccttgacttggccccacgggcgattgactgccgtgccggagacaacaatgcttgacgccctgccatggtaagcaacgggcagccatttcctaatcgcatatatatgaaagagtgtgatttaaatgtggcaaaatgagcaaatatcagcaccaattctccataagtgcgttgtctttgccacgaaacattgtgccaacattcgtggcatgataaatagatgaataaaagtcagtgtaatcgcct

SEQ ID NO: 16423 - DNA, 430 bp, Heterodera glycines
gtgtactatagtcaaccccccgtaaaaaaacggcacaaatgatataccaatcgattcgtctctacgagttatgcacgaaaaagtgggtctccagttgcggaaatgccaaaaaaaccggtttttgaaccggtttaaaactcgaaaatttgagtgaaaaggggggctcctaaccttttaaaatggtcaaaatcacacaaatttggtatcattcgaaagctcttgatgagctaagtctaaaaaacaaggtataaattcgaactgatgccatttaggcactgggacaactgagtaccagtgaaaatggacacttcagtctcgaaaaataataaacgggaaataacaatttaaaagcaaaactcgcaaaagggagcatgcgaagacggagcaagtagtggggcgagacgaagggcggaggaaaaagtctgacgag

SEQ ID NO: 16424 - DNA, 1528 bp, Heterodera glycines
aacattgcaatttaggagaccactcaagggcgtgctgatgaagggaaagcgtgtgctgatttggtcgagctctgccgagacggaccctggcattgtaaatgactgaaaattgaaattcccattccaatctgcactttaggtcagttttgccgaaatttggactccgatcctgcaaaatttgggcgcaacattagtcggcattggtcctggtgaaccgtttgcctccaaatcgagcgctaaccttgaggaaaagatggaattctgttccaaaagtacacatttgagtgaattattgcaatttcttttggatttatttctacagttgagcctcacgtggatgtgctgctagcggagacggactgccaagccgaggtggctgttgtgtccaaagaacacaaatatttatcgacaataataaataataaaagtctgaggagagagagtgaatgaattaattgccgaaataaatttgccatttccgcttgacttgccatggtgatgatgtgaattgacagagatttcaaagagaaaaagatagaactttgtgtgaattgaatgaatgtgtgcaagtcagcggtgggcctttttggatgtttatttattgattgcacagtccgaggtcaatgatgatgaatgaatggagcgaatgatatggctttcaaccctcggcgaattttgaggaatgcgcagtggagtggctgcacgtattttggcttctcggtccacctcaacgcgttccaaaccactttaaactgtgcgggtgttcacagagctcgcagtgagatggaattccgcacagagtgttacgggaagggggccttgggttgtgccaaaaatggatgaaaatgaatgagaaaaatggcctaggactggcaaaatttagagcagaaatttaattgccttcgctgactgcgccaaaatgttgtgtccaaagaacacaaatatttatcgacaataataaataataaaagtctgaggagagagagtgaatgaagagaagagaaggcaaaaagcgaatgaatggggagagaacaaaatgtgtgtggaacagtcactatttatgcacttcgacgggcagagagaaaggaaaagacattgagggaaaagatagagaaaataaatgaatgcatgtctattttgtcttatcccaacagtggccaagctggtcgaggaacggggcggtttggccgtgtccagcgaatgggtcattcaggttggtctttccattttttttaagccatggttttcccggaaagacgtaaagccatcccattttaaaggccatcgtcactggttcgctgcccgacctgggcgagcccggaggcgagaagttccgctacgattttgtttagtgttggctgaatgaacatcaacagtttggtggtgaatgacggcggcaatggactttgactctacttgaacacacctaacaatatcataaaccattcgctttttccctttcttggaacgacacccggaaacttttctttttttgttcagaattatctgccctatttaattactattt

SEQ ID NO: 16425 - DNA, 3021 bp, Heterodera glycines
aaaagaaattcgccacacaagctcaattcaaataagatcaaggcaaaaaagggagaacaagcgagaggagcgacgaaccaaaatagacaaggcgacacacgtccgatgggccaagaaaggtgagtttttccattggtttttcgtaaaatctctaattttacaatttttagccgctccccagcccgacaccgatgccgaaaagccacaaccatctgaagaagggccgtcgacatcagaagcaacggcgcaggacaacgacggacaaccatcatcaactccaacaccggtgacaccgctggaaatggacgtgccatcggtggagatgatgggaatcggtgtgtcattcccttcaacgcctgcctacgaagaccaacaaattcaaccaatgccgtcaacatccacggcacgctgtgacgtggtggcgacaccatcgacttcaaagggcgacggtggctttggtctcgacgatggtgagtgagaaatttcaccaaaaatttagttttttaagtcgtttcattttcattacattgaaattttaattttaggttggccgctactctcatctcggcacacaagagaagatcgttgagaaactggtgaagcacacgacgatgttgaatgcactgcacgaccgtggcgttgagaacaacaaagaaaatgacatacccagatttttgaccaaattttcacctcacttttatttattttcacattaatatttcgaaaaatttgagtggtttgaaatgagttaaattgtttagctttcacttagaaaaattctccattttaaaatctttttttgtataccaaatttattcagtttagttgggtatgaagaaagttatcctatataataaagttgagtgtgtgtatgtgtccgtttttgaatttgtgtggcgatttgtttagtttttgcgttaaaaatgtatttgaaaatgaaatgtttgatttttgctttttttcatttttgttttgtcagtttttgcaaaaagcacagttaaaataaatttctctttttttcgtttttaatgacaaaatagtttttgtatgtttattaatgataatgaaatcgcaatgaatgctttctattgcatttcttaagagaaaaagtttttgtttttgttattatcaaaaagcgtttggaaatgaatgctcttaacacttttgtaaagaaaaagaattgtttttgtatatgcaaagtcaatggaaatgatcttacacttagttttgatattgtattgaaaaagttttggttcgagaaattgtttgaccttgaaatggagtttttttgtttttgtaattaaagcggatgtcaattatgcctcttttaatggatacggttttaattggatggatttatcgcacttattgtttgttttgacaaaaataagtttcttttaacgatataaggtcagtttatttgttctttttttgtacgtagatgtttatgtaaaagaaattattaaaatgtaagagaacaagtatttataatgaaaaggattttctacgcaaattgtatttcataatagaaatacgtttttaaaattccaaaattatgctgaacaggtctgaattaagtcccgtgattgacatgccgatgaatccgtaaaattgagttcattgtttggaatagtgaaggattgagtcctcggtgattggaatggcggagaactgagtcctcagttattacgatgccgaagaatccgtgaaaagtgaaggattgagtcccagtgattggaatgctggtgggattgagtcccgggaataggaatgatggagaattgagtcccagtgattggaatgctggttagttgagtcccagttattggaatgtcgcagaattgagtcccggtgattggaatatcgcagaattgagtctcgatgattgcgatgccgaaggaccaggtgaggttaggtcccagtgattggaatgcaagagaattgagtcccagtgattgaaatgcaggagaatgagtcacggcgattggaatgcataaaaactgagtccgggtgattgaaacgcaggagaatagagtcccagtgattgaagtcctggagatttgagtccctgtgattgaaatgcaagagaattgagtcccagtgattggaatgcagcagaattgagtctcgatgattgcgataccgaagaatcaggtgaggttcggtcccagcgattggaatgatggtgagttgagtcccggtgattggaatgctggagaattgagtcccagtgactggaatgtcggagagctgagtcccggtgattggaatgcaggagaacagagtcccagtgactggaatgctggtgggattgagtcccgggaattggaatgatggagaattgagtcccagtgattggaatgctggtgggattgagtcccgggaataggaatgatggagaattgagtcccagtgattggaatgctggttagttgagtcccagttattggaatgtcgcagaattgagtctcgatgattgcgatgccgaaggatcaggtgaggttaggtcccagtgattggaatgcaagagaattgaccagtgattgaaatgcaggagaatgagtcccggtgattggaatgcataaaaactgaatccgggtgattgaaacgcaggagaatagagtcccagtgattgaagtcctggagaattgagtcccggtgattgaaatgctggtgtcttgagtccctgtgattgaaatgcataaaaactgagtcccagtgattgaagtcctggagaattgagtcccggtgattgaaatgctggtgtgttgagtcccagtgattgaagtcctggagaattgagtcccggtgattgaaatgctggtgtgttgagtcccagtgactggaatgctggagggttgagtcccagtgattgaaatgctggagggttgagtcccagtgattgaaatgctggagggttgagtcccagtgattgaaatgctggagggttgagtcccagtgattgaaatgcaggagaatgatttacggtgatggaatcataaaaactgagtccgggtgatt

SEQ ID NO: 16426 - DNA, 1968 bp, Heterodera glycines
tatcaaaaacatttagagtgtgggattttatatttttgattgtccatgatcaatttaagcagcttttgttagaaatagcaatggcattttgtgaaattctgagcatgaaaaattgaagtttatttttttgtggcactttttcctaaaaacttttgcggaatagagggaccggcgttgccgataagcgccgccaggaaaaattttgcaatttttaatgcgattttttaacagatttgcccacaaatgaccaaatttgcgttgagcaataatttaataattttttggaaattttgggtaagattttcgttttaatgctcttttaaaaccccaaattattataagatcaaacattatgctaatttatcaaaattaatcataaatttaaaagaactgaagttttccccagcctcaaaaatcctcaaaatttctcaaaaagccacaaaatgaagataaatcctcagacctggcagccctgattttactggagaagtatgactaagttattccgcctcccgaagccgggggtcccgaccgggtcattttccaagtccctgccccggtcccgccatttgagcaggaaaaacgggactagtatgcttttattttttattttttgtacaaacaagatttcactgttatatctatttcggtatttaatacatctacttaatgctttttttcccaatttgaagccattccggttttattttaaacttgagaatttttcaacaaataaattcttcgattaaattatttactgtgaaaagctcagtttttattttaattttggtaatatagtttaaaagatttttggttctgcctcacttcattattattagggttataagttgtatgcactaaaaatccctcaaatatgcccaaaaaacccaaaaaatgccaaaatatgcactaaaatatgccttaaaaaactgccaaaaatggctttgaactctcaaaaaaaacgtcaaaaattgtgtataaattatgaactgactttgaaaacaccaaaacaagggctaaggagcattttttagacaattttaagttccaaatttttaaatttttattatatgcaaaacaaaattacgttttttatataaataaatttttttccaaaatttcttacaaaaagttaaaaaattttcggtttttaagcgtgtattttaaaaaaattcccaaaaagtcaatccttaggggtgtatttttctcttttttcgcattctttttatgaaaatttgccaaaaatgaccaaaatatgctctcaaaacccaaaaatggccaaatatgcatttattctcgaaaacccccaaaatatgcttttatatgcactaaaaaccttcaccaaatcaaaaaattttaatgtagaaatgctatttttgaacccctttcttcatagcatatgcgcagaaaaaatatgcaaaatcatacaacttataaccctaattattatacaaaaacaaacaccctcacaaaaaatcactaataaatttaaggcagccgcagagaatggggatgcactacctggcatgggcaagaacattgtgatgcagtaaacaaaatgtttggctcagaatgcgcatgccattacggtgaacaagacgaaagcttaccgtatttcccggattcacatttgcaagatgaagtttcggaaaaatttacctattcttagggatgtatttttttaaacttttatgtcgattcttaggggtgcatttttcgtttttattgcatttcttttaataaattttcaaaaaacaatcgtaagtgaaaaatacatagttaaaaaacgccaaatagtgatttctagtgaatgatagtgacataagaattggaaaatttcaacgcagaaatccgttttttgagctcctttcatcaaaacaattgaacaaaaaaaaaaaaactaatttcaataaatcgcggccttattcataagaagagttaaaattgatcgatcgtggtcatccgtcg

SEQ ID NO: 16427 - DNA, 1659 bp, Heterodera glycines
  unsure (1)..(1659): unsure at all n locations
gacagctaagtatgggtacttcaatttcgatgttataatttttactttttcgctcgaactttgacggggcgtttggtcgccacacttgtttgaccaaatcncaaattatgattggttagtcattgaaagcaataaaaaaatgcccaaaaaattggtcggacgggcaaatttcatttccttaccttttttattttttagaaaatcttttttttgtcgcgttgtaggcgaaaaatcaaaaaaaaatgttgaaattgttataaggaaaaatacaaaaattaatgtagcttttaaaaaattaatataaaatttaacctaataatttattaacatttaaatataaataaaatttaatttagtgtttatttttcattttgccaactaaattttccatcccaaatacctacagtcatggtcatatgtttagactcaaagagtgaatattgattaaatgcgtaataaagctgaagttgcaggcaaaacgggaaacacatttcacggtttttgtagtattttttatgggctttcaaatggtaccattcattatcaaatttgttaagttcacaaataaatacaaaacaaaatccaaatgcagccccaattctgtttagactcactcattagttcttcaataaaatcaatattttgtaggccaaaaattctgaaaaaattcctgctaagctagcttttgatgctgatcaaaaaagtctcttacagcaacttgatcagatcactccttcatagtgatcggcacaccacaaaatacagtgaaaatcggggaaattttcgaaaaaaattcctagggggttgtgaaattttttttggaaaattttatcaagcccattagaaaggggacaaaattttggcaaattgtgcggtttttgcaattttttgctagaaaaattgggagatttacctgattaattgatgttagcagagtgctgtccccgtttaaaatgagaagccgagtatttattgaatttaagattttgtcaagaaattttggcaaattgtgcggtttttgcaattttttgctagaaaaattgtgagatttacctgattaattgatgttagcagagtgccgtccccgtttaaaatgagaagccgattatttatagaacttaagattttgtcaagaaattttggcaaattgtgcggtttttgcaattttttgctagaaaaattgtgagatttacctgattaattgatgttagcagagtgccgtccccgtttaaaatgagaagccgagtatttattgaatttaagattttgtcaagaaattttggcaaattgtgcggtttttgcaattttttgctagaaaaattgggagatttacctgattaattgatgttagtagagtgccgtccccgtttaaaatgagaagccgattatttatagaacttaagattttgtcaagaaattttggcaaattgtgcggtttttgcaattttttgctagaaaaattgtgagatttacctgattaattgatgttagcagagtgccgtccccgtttaaaatgagaagccgagtatttattgaatttaagattttgtcaagaaattttggcaaattgtgcggtttttgcaattttttgctagaaaaattgggagatttacctgattaaatgatgttagcagagtgccgtccccgttaaaagagaag

SEQ ID NO: 16428 - DNA, 1078 bp, Heterodera glycines
aaaataaaaacaaaacaaaacgggaatccttacttttatggcattttggcaataattctttttttcattttataaatactctttcagaaatgacgcattccttcacaaattctttctgtttgcctttatataaatttgtaaattcattgattcgttcaatgaattctttctttttctcctcataaaaactctttttgttgaaatttaattcttttttccatttgtatattttatggcgattttcgactaataattttccaattttcgtctcaatttgttgtttgattttaccattggtattttcctttttgcttcaacttttctttaattgcttcaaatttttgaattatttctctcttttgttggtcatttggctctgctttcttattttgatcacttttggtattattttcattgtaatattcgctcatttgatcatttgggttcgttcccatttcttcatcatccatttgttgaactgcccaattttcattttgatcaatttttggttgttttatattcatcaaattttcttcagttttattgtcccatccgttgccgaaaatttcatcaaaatttggtgggattttgacggatttaattttataaataatgaaaattaaaacaaaaataaaataataaaaattcatttttacaatttttgaaaaatatttgctatgtatatggcaattacacatattccatttcattttttcttaatagggagggaaaaaaactgtctgaaaatttaatttttactgattttcaatttaatccaaaagtactaatgtaaaatctttttttctattcctaagtatttaaaacatcaaaatcgtccaaaaagaagcattttagtaaaacctaattttagccctaggacgaaaaaaatcattgtgccgaaaaatcgtcgatttattcgctcattttatcactgagtatgttcggatgcttaaaccgttcatttgatcagatgctaacttttaatttttcttgatttttggttttttccccttcattttccatcattttaatttttgacacaattcttagtcaatattttcataaaatttggtccaat

SEQ ID NO: 16429 - DNA, 1333 bp, Heterodera glycines
gtaacaattttggtaaaaataaataattttatccttacaaaagtgggttcttccgtactttcacggaattaccgataattttgggcgaaatgcgcggaaagcgaacccatcgaatgtatttgccattcttgatcgtttttgtatgttttatgttttcaaagaacaattcttatttttataatttatacggctaataatttgtataattatttaattaattttttaaaataatatataattcatttttaaaaatatttaaattgaataaaatggtttatttagggaatcggccttgttttcatgatattttatggaggagctgatatatttgtgaaaatgaatgaaaatggttaaaaaattattaaaaaaaaatattgttaaaaatttcccgcacaaaattcagtaccgaacaactcaaccaacgcatcagcagttgaacataatcgcaccataaaaaaagctgacaccgaactgagcaaaaccacacttcacacaattagtgaaaattttctatttgttttaatttgttttcagattaaattaaatgttatagtaaagtttttatcattttggcattttttcgaagaaaaatagtcattgaattctttgaaattttttcttataaaaaaaatttattgagattttgaaattttttatttaaggctggctactcaatgacacttagtagctttaattaattcattatggcaaaaatttttgtcaaaaattatcaatatggcggaatttttattaaatggccaatattatacaatcaaagatttttttttcttattttatattttatttatatttttcaatttaaataaatttgaaatttttgtttaataattgttttagaaattggttcctatttcttttcttggtttctcacattggctctgaatgtttggctttattcaattgttcttcgtgcctacttttttatgaagcgccaaaatcaaaatatgaatggcgcagaacgaaaccaaaaatttgaaaacattgcactttgattactcaaaatgtgattcattgacaaatttaattgatattaattttctaattaaaacatttgaatgttgacatttaaataaataatataaaacttttatctttattgaatggtatttggtatttaaataaataatatattcctattaaaaaatgaaaataatttttttcaattgtcgaagattgtttgcaataaaattatcaaaagccttctcatttatggtgagaaaaagaatcatttcaaaatttatttattaaaaacctaatgaaaatggcaaatttaatttttttttattattttttttttattattatcaatgaa

SEQ ID NO: 16430 - DNA, 2410 bp, Heterodera glycines
agtgataaaaaactaaaataaaatttataaaatagagcacatattgcggattttttgagtttattatttttataaaatactttttcagaacagagttctgaatttttttctgaaaaatcgaatttttccagaaattctggaataacttatttattttggaagatagaaattccaaatgaatctcataaaattctcctaattttttgctatttttcaaactttattccactaaatttgatcaaaaacgaagagagttatgaattttcgaaatttcactggattttccggggctcaaattttgacgatttttcaaaatttgtaaacaccttccaaaaagtctgaaaccacaaataaagtatatattcgtcttcagcaccataaattaggccataaaaatgcattttggctaatttaggagcaaaaaaatttttcatgaaatgcaaaaccatggggtcccccctatggttttgaatttcaaaatcacaattaattttataactttttttagactcgtgataatgagatgatataaagcacattatatagggcttaaaattccctacaaaaattgtctaagaagattttttgctaaaatcaactcctgccaagttatagacccaaaactgaaataagccctcatttccggaaaattttctatttccaaaaaaattttgaaaaatttttctgaaaatgccaccaatcgatagagcgtgaaaaacggttgcttgaaagtggtcttggttttgccgagaaaaatctgcaaaaaataataaaattcaaaaacggaaaattttcgagggggcctagctcgaaaatttctgaaaattttcaaaatccgaaaacatggatggatagagctttttgagctgcacaaaaaagtaattatcaccatcccgctcagatcaaaacacagcgagttatttgcgaaattcaaaaaatgccaaaattggttttcaaaattcgccgaagtgtacaggccaggcctttgatcctagggcttcggccaagaagaaaaaaattttccaaacatttcaacttagtcgcctcccagcagaagttttttgctccgggttcccagaaaaaagttttggcccaaaaaccgcatgcatttttcataaaaaggccatttcagcgccgctggcgctcagttggcctccggaccggaatgccattatttttcctggatgcgcctcaaaaagttgcttaagtaatgccacattcccgagcccctcccgccagccgttcccgagattttagttttagcaatgaaactcgatgttgctttagttatatctaaactagcgggtgcgtgaaccgtcggctatttagctgggaaaaagcgcttcgcgctttcggagcttcgctacctaggctgttacgggggaagaggtacaaccacgggtgggaaggtacaattctgatcagaagaggtacaactacggttttttcagggatttttaggccgcttcgcggcctcgaacgggcgattcgcgcccgttacaacggtgattagaagaggtataaaagtgataaatagaggtacatctgtgataaaaagaagtaacgggcgcgaatcgcccgttagtgcctgcgccgcggctaaaacctgtctgcaagactcgagcctccgccggtcctcagagcatgttcaccaccgaattgaacagatacaccttgccctgactccccttgaatttggacctcatttcttcccacttttttctaccctttcatttctcctcacttgtaaatacttgtatatcagctcattgtgatggaccaaattgtcacgtcaatgggcgcaactgtaactgcgttcaccgaagggaaaataatcctggaaggaaccggatttgataaattggaaaaaataattataattatttgcaactgctcagagttaacaatgctcacaatccctccccacgccaatccctccactcccggtctatcccaaaatcctctcccctcacataatatatgcaccaaatgtcaaaatatgcacaaatatgcacataaatcgcgaaatagtgacggatgagcagagcaaaaaggcaaagtttaggaagaaaaaatgtgcgaagttaaaagccattttataaatcataaatttttatgaatcgtaaaagtaaatatattttttcgattacgcgaaatgacaaaatcatatgctaataaagcatcgattgccaaacgatggcattggcattggcatcatgggaaggcatttccaagcaaagtgctttattgacggaagctattcatttttaaaaaacacatgtaaaatgatgaattaataatgaaatgttggtgattttatatcaaatggcattggaatgatgtcattgaatagcccaaattaaaaaatattattcacgcaatttatgcgtagaaatgaacaaagaaacgc

SEQ ID NO: 16431 - DNA, 1841 bp, Heterodera glycines
ttagaagaggtacaaaagtgattggaagaggtacaaaagtgattagaagaggtacaacagtgaaaaagggatacaaaagtgattagaagaggtacaactgtgattaaaagaggtacaacagtgatcagaagaggtacaaatttgatgaagaggtacaaaagtgataaaagaggtacaaaagtgattagaagaggtgcaacagagattgaagaggtacaactgtgatcagaagaggtacaactgtgattagaagaggtacaacagtgattagaagaggtacaaatttgataagaggtacaaaagtgataaaagaggtacaaaagtgattagaagaggtgcaacagtgatcagaagaggtacaactgtgattaaaagaggtacaacagagattagaagaggtacaaatttgataagaggtacaaaagtgataaaagaggtacaaaagtgattagaagaggtgcaacagtgatcagaagaggtacaactgtgattaaaagaggtacaactgtgattgaagaggtacaacatgagaatgtaataaacagatggcatataaaaaaaatacaaattatggacaataaaattaattaatttgaaacaaaaaatttattcatcaaaaataatttaatttaaatttaaaattatttattaatttttaataaaacaaaaaggttcaaattaattaaaaacggtgaaaataacttaaaatgcatagaaaaataatatacgccgtccggattcgaacttgcccccccccctcaaaatgatgccccagaatccccaatcacacagggattctgaggtcttaacgatgtcaaaagtaaaatctgatcacgtattcgtgatcagcgtcataaaatagccctaatgacatgttttttgaagatttttagtgaaaaaatttttcaactcaaaaatcctatgctcacccctttggtctggaatcccaaaatcacttttatttttataacatttttcaaaaaagtgataaaaatgtgaaataaaatttataaaatagagctaaaaattgcggatttttgtagcaatctacttttcctgaatatcttttctgaagcgagttataaatttttttctgaaaatccgaatttttccagaatttctggaataacttttttatttttgaagacagaaaattcaaataaataacataaaattctcctgatttttctctatttttagagcttaagttcacttaaattgaccaatccttcactgtgttatgaattttccaatattcgcccaaatttcagagggtcgaaaaattgccaaatatttttgaatttttaaaaaattctaaaattttctaaactgaaaatgaacatcagattcgtgctcagcaccttaaaaatacccagaaaaaaatttttcaccctatttttcaaccaaaaaaaaatttccgaaaatttctagggggcctagctcgaaaatttttgaaaatttccggccatataatacactattcgatagcattttaaaagctctacaattttgcactaaggcgttttttcgataaaaccaacccctaacgagttatggactcgggactcaaatgtcccgcttaggccaaaaaaattttctatttccgggaaaaaaccgaaatttttccgaaaaaaataccagtcgatagagctcgaaaaatggttgcttgaaagtggtctccgttttgccaggaaaattcgttaaaaaatcctaaaattcaaaaacccgaaaaccgttttttaggcctaactcgaaaatttttgaaaattttcgaaatttttaaatttggaaaaatcgaactcattagactctacaataagtctgctggccaccctgcgctc

SEQ ID NO: 16432 - DNA, 2255 bp, Heterodera glycines
  unsure (1)..(2255): unsure at all n locations
gaaattgccaattatttcatttaggacaaggcaaagcgacaacgggagactcagcagatagaaccgggaaatcagaattgggaattcctcgccatgattcgcgactaccaatcccagctgatctaccggcctttgtcactggaggacgaagtaatggacaatcgtatttgcgtctgtgtgcgaaaacgaccgttaggtaaaagggaattggcgagcagagaagtggaagtgatcaccgtgccgaaccgagaccatgtcattgtgcatcaggtgggacaccataccaagatgtccatgtgtttttttaatatgtcacataaatttagcctcaagtgaaggtggacttgaccaagtatttggtcaaccacaaattccgctttgactacgtcttcaacgaagcggcgacaaatgaaatggtttacaggtctgtttagctcgacaaaataatcagattatcgaaatgggtgttttagattcagtgcccagccgcttgtccgaacaatttttcaacgaggattcgccacctgttttgcctatggccagaccggttctgggaagacgtacacaatgggagggatcatcgaaggacgacgccaggcaataaaaaaacatttatttggcaaacaattatcattaatttcaggattgctcaaacggaatttacgccatgacagcacatgatgtgtttgcgatgcttcattctcctgagtatgccaatcagaaactgaccctctcgtgcagtttttttgaaatttatggttctaaggtgaaaagggttaaaaacatatttgaaaaatacattttaaggtgtttgatctcttgaataaaaaatcggtacttcgcattttggaggacggaaagcatttggtacaggtggtcgggctgagggagacaaaagtgcacagtgttgacgaagttcgtcataatttctgattaataaatgtactatgaattgaattgtccgtttttaggttttgaaactgatcaagcttgggtcggaccagaggacggcaggtcaaacatcggcaaattccaattcatctcggtcacacgccgtcttccaaataattttaaggaaatggtaagtctattatttttagtggcgttttctttaacatttttttgcagggaaaaggagcgtgacaacctttacggaaagatctctctaatcgatttggctggcaatgaacgaggcgcggacaccatcagttcggaccgacagacgcggctggagggagcggagatcaacaagtcactgctggcgctgaaggagtgcattcgtgcgatgggccaggacgaagggcagcacattcccttccggggctcaaaactgacgctgatccttcgcgattcattcattggccaaaatgccaagacatgcatggtgagaagaaatgcacaaaagttgggcattggtctttcattcatatacattcttcaacagattgcgatggtcagtccgggcattagcagtgtggagaacagcatgaacacgttgcgctacgctgataggtaaccataaaggctgatacaaagtgtaagtttacgataagcacactaccggaacatttctgctaattgtgaccctaaattcgcgttttaagagtcaaagaactggacggtagggatgaccaacagccgatggaaaacgacgaccagcgccaatgattattgacagtttatcccaatcaaagatgaacgactttcttccgactttcccaaatcgctccaaaaattctcaaaaaagaactgtgcattctttcttcaaacgatccgaataatattcccaagcattccgtttgtctgtttatcttgacccaaatatttttcctatttcaatctttttcttctcccccattctcggctcattgtgattgatgacgatgctttgacccacaacaaattgaatcgtatttttttgtataggaagacagaattttttttataaattattcagtgcataattcattaaagtttttggatgttagacaacacccatttaaattgcagccctatgaacattaatcccttttgtttttcgtcattcctctctttctcttctgtctgattcgttctttcagatgtcttcttcggttcagcgttctcttcgtccgtacatcgcctcctctcatncattanattaccactctgaggacaacggnggtgcttctgctgtgaatgtttgcgcggaactctgcgcttttctctgtgctaatggattcgcacgcgcagccaaacggagaaaaaacgcgccg

SEQ ID NO: 16433 - DNA, 1340 bp, Heterodera glycines
agcttggacttcgctcgttgctgcgttttcacaacaaacgttacactgcgccaaagtcggaggagaaaacgcagcggagtctcctcgtggtgctgctggacgccgacttcgcgaagcccatagcactgcgtcatgtgttcgctttgcttgcactcgggtccttttactcaccctaccacattcttaagtggtaattactctaattgcagtcccaactcgccctccttcttccttctccccggtctctctacgtctctctccgtccctttgaatttgccacgcatttccaccgtttctttcacttccgacgggcctccagaattagtctgtctgacagcgaagatacgaaaactgttaaggccgattgaattgacgcgacgatcggacggcaccagattgatcaagacgtcgaacagtgcattcgaaacgcctaaattcgtcagaccggcgggaaaagcggcagcaaaacgaaaagcaagacgaaaataaatgaagaactatgaagctctttgaccatacatacagtatctcacaatcagtacatttgtttattttcaattaaataaaaagcgacttaaagttaaaattgcatagcaggtcgttttcgcgccgccgtttccgcgccaggttcgttttcgcgccgtcgttttcgcgccaggttcgttttcgcgcgggggtcgttttcgcgcccgcgcttttttagcactagaattgcgaatatactttaaaaaaatacttagaaaatttactaatagtctattaagtttaaaaatacctaaaaaaccaaataattttttactccgcgggtggatccgaacctgacctcaccccagccggcttcagaatctcagatacgcagggattctgaggtcatagcgatgtcctaatggaaatctgattagagattggttatcaacggcataaattttctaaaaaaaaacttttttttgaaaaattctgagtgaaaattatctactcaaaaacaacgtgcctccccccgtggtcgaaattcgaaaaatcgttttattttatttcgtacataggctaggcataagctttagacctaggcttaggcctagctaggcttgtttgggcctacataagattaggcatttagtaaaaaaaaacacgaatacacatatttattttacatatatgcaaccgcgcaaaaacgacccccgcgcgaaaacgacagcgcgaaaacgaacctggcgcgaaaacgtcagcgcgaaaacgacggcgcgaaaacgtcagcgcgaaaacgacggcgcgaaaacgtcaacgcgaaaacgacggcgcgaaaacgacggcgcgaaaacgtcaacgcgaaaacgacggcg

SEQ ID NO: 16434 - DNA, 2885 bp, Heterodera glycines
tttttacggggagtcccggggcgggagcggggagtaattcgaaaaatttaattaaaaactcaccaaaaatatttttaatgcacaaatttaaaggacatcaatttattaaattaaaaatatatagaaaaatttataaaggagaaatttgaaataaaaaaatcttatttttgagtcaaaaatcagaaaattttttcaaattgcttaaataaattattttttataattaattcgaacaaaacatttattaactttatatttttgactccctttattaattttaacaattttttgcggcttattttttgaaaaaactttttggtggtgaccagagtggaagagggaggccggcggtgccgataggcgccgcagggaaaaaaaaattgaatatttaaatacaatacattgtcagattatgtccaaaaatagccaatttttgaaaatttgaggcattttttaaagaaaattaaggattttaaggttccggcggtgccgataggcgccgccgggaaaaattttttttgaaattttggctatatatttaacagattttcaataaaaaatcattatttttaccaaaaaactcaattcttaccagtgcatttttactcccgtttttgggtaaaaatttccgggagcgggagcgggatcgtgagttcaaaattttccgggacgggagtcccgaacgggaatcccgtaaaaattccgctcccgttaaaaatcccgttcaccgaaaaaagcgggagtcgggagtgggactcccgtaaaatcccacgggagtcccgatcccgccggactctattgttaagctattaattcaatttttcgcgcacaatagctgatcacttttccaatcacccggtgcgctgggaattgtttcaagaaatggccgccgaagaaaatgtgataatttttggcattgaaacgtaaaatccccggtaatttaaggttattgttcacatttttcccgcctatactgcgatacgatggatgtctttgggaaggacattcaaacggattcgcgaaatgtggactgtacttgaaaagtacttccgatcactgagagaccgagattgtcccaaatttcttcgtcaaatttttgatgatgaattgacgccacgatcagaagaatggaaagtggttgtgtgtgttatgtgttttgccttcgatcagttcaatcaattgaatgttattagccaggtagtactaagtacttagaaaattactaggttaatttttataaattcagaaaccgacacttccgtttcccattttggccaaacaaattaaaacattaaaggcgaagctggaactttcattgaatgaggaattttatggggaagagaccagtgaacttttgaaacaattggaaaatgatggcgcgatttatcaaaaaaaacaaattaaaagccgcctttaaggtgttttttcattaaatatttgtttagctttgatttttcagcaattttacgaggacgcatatgcatatttgtgcaaatggtcacggcaattttctgagatggatgaagtgattggagattgggtcatttttgagtctgagccaacatctgaaaaagttcggaaggcgtataggcatttttgtggggcgtcaactgctgatgaaatgaatgatttgtttgctgagatcgctgagttgaaacagacactgaaggagctcgagggcgagcggttcaacaggaaaaacgtggatgaaaaatggccggctattttcaaaaatcctaattttgtcctgctcaaatcactagtctctgcaattctatcaattttcccttccaatgccttttgtgaatctgtcttttctgttctcaagaacatcaaaacggacgagaggaatagtattggcatacctttgttgaattctcttatttcaatcaaattcaattcaaaaatttcgtgcctaaatgttcacaattattttctttcattgccaaacttgctcaaacaggtgaaaagtggtgataaatatgttgtttaaatgtttttacgttgttatacattgaattattggctaaaaaaatatgccgggtttttgaaaatttttgccgggtttttcaactcgcgcgcccggtttttgggttttggcgatcgcacccctggcgcccaaacgagctggcgcccaaacgagcgcgcccaaacgtgagcgcccaaacgcagtggacccgcgacttttagtgaccgaaaatcccaaaataattaactaaaatagtgagtaaaaaggccaaaataatgacataattttcagccaaaaattgagaaaaaataatttttattcactgattgcagttacaaatgaggtaaatttcctttctaataatttcttggcaaatattgacattttaaatcaaaaattttcaccattaccaattcggagactgcaaagaaattcaaatgattcacaaagacaccgatagatcgcattgagccaaaataaaaaattaaatcaaataaaaaaatatggcgaaaagtaatataatttgagaatttgaaagataatgacctaaaatttttttcaaaaaatcacaaatggaatgtaatttgtacaagaaacattaattaggctccattatcgacaattcttaagtcctgctgatagtttccagcagttttatggataagctgatcatgaatagaacatttccagacaccacgctttataaatcaccccccccctcacctccttacatctgtccctttatttgttgcttttatatattttattaattcgcaagggcgggattttgagtgacctacctaaatctgcggtcgctgatcgaattccagtcaattcttagcccagaattcggataaaaacacagaaaatgacagttcgggcggcaaaaataattaggtatgtatgtatgtatgta

SEQ ID NO: 16435 - DNA, 3135 bp, Heterodera glycines
tatatgtacatgcaaacgttgacttcgcccggtgagtgccccccccccccccaatttgtcaatttgtccccccccccttcgccttcgcagtgttttacgtgtgccttttgtctttgatcgtcgtcggtgcgttgtgccatgccgtactcattcattgtattacgacggcaaacacgcgttagtgacaaattgccatggtttgcccgaatagccaattcaattttcaacttcagtaaacaccgccattgtccacaattttactgctgccattcaggtgctgtgccattgccaactcagctccctccttctctttttgccctttttcttctcccttcgcttttccttttcttcttccgtcgttcttttattttttgtctctcttttatcttttgtcactctttttctttttctcttttacccctcccactatttcgttatttccccttctcttttcaggtgctcgttgcctacgctctttccattgaggtggcggcgtttcttcttctccatttcaaattaaagtgttactgatttttgaaaaggttttctacgacactgagcccgactggaacaacattttcggcgtcattctcgcgatggccgccacggcattttattttatttctgaaagggaccgcgaattgaaaccgcaagggcattcggaagttcagggggccaaataccaccgaattttggcacaataggcaaagattggccgatggaaatgaatgaatgaataacttatgatcaatttattaacaattcaattaaattaaaaacaatgaaagtaaatccctgagaatgttctggtcaatggaaggaattgtgttgtaacgcgggaattgctttgttaaggcgaatcattggcgaggagaaaaagcattgaaagttaatcatggcgaagtgccggtcagaaaatgccgcagtcgtgccaaatacgagacgagatccttggggtgaagcagatattgggagccaattgaccattgatcattccattggcacaaccgatcactgcgatcagtcacaaaccttggaatggatcatctgattgaccaacgtttgcagcaaaaggtccgcttcctgcggagaaaagcaaataattgaaaatacttttcattcatttatccgacaatatcagccggtgttttgtccattgatcagactaatcaatcagtcctccccaattcagtcccatttcccaatcagtctccaattgttcctctccaatcagtccctcccctcccccctcactttgataatttccgcccttccaatcattgcattttccgctgccatttgttgctgctgctccctcctctgttgttcacctccgatttgcatttgttgtgcgatgtaagctgttgagccattcaaagtttgctgagtttgtggcggggaaaggcattgtccgccgttggcaccgtacggctggccaattgagctgatcaaatgcgcttgttggagaagaccgatcagaggagagacagtgggcggatggaagagagtagaagaggaagagggggacgagggagaagggggaggttgatgattggaagagaaaaagccgaccgaagacggaatcggcacggggggcggggcgggggcattctgaacggaaagcgactgaaaaagcgaacgcaaacgaacagacaattgaacggagagcggagagaagcgcagtggcggaagagccgagggccgaagcggcgacggaaggcggcggagaggcggcacgctttgcattgtgctcacgttggagcgattgggagatgagagcgaaaagagtttggtgatttgggcccccattttgcgggtgattaatgccattggcgttggtctgcgaattttgttgctgttcgagccgaagaagttccttttgaagcaatttcattgagacaccgaaggatcaatcaattgggagcagttcatttcccccgaaaaaataaacaaaaaactgaaagttttttagtcttctaataaattaaaaagtcggcgtttaaaaccccccccccttcgcgtattttcattctcccccattctgacattgtatgtgctttcttacaaatagtatctctctccctctctctttctttctctctctccctctctctttctttctctccctccctctttctttctttctctccctccctctctctttctttctctctctccctctctctttctttctctccctccctctctctttctttctctctctccctctctctttctttctctctctccctctctttctttctctctctccctctttctttctttctctccctccctctctctttctttctcttcctccctctctctttctttctctctctccctctctctttctttctctccctccctctctctttctttctctctctccctctctctttctttctctctctccctctctttctttctctccctccctctctctttctttctctccctccctctctctttctttctctccctccctctctctttctttctctccctccctctctctttctttctctccctccctctctctttctttctctccctccctctctctccctccttccaaattcccccattttttctcttccacctgaatgatcggcataatgtgccaatgctgctgttgcatttgccgttgatccatctgtctctgatcagctgtccgttgcttttgctgctgcagaaatagcaattccccggccaactttttggcatttccaatccctcccccaatttgagctccatctttgctgccgccggtaccatttgccatcaaagccgctttaagcgtagtcaaaagcagcgaatgattctgttgatttggcgtaaattggggaggatgggacgcagcagcgaacagcgaatgttttaaaggcacagaaagtgactgacaatgggaaaaaatgtaaagcgaccccccggggggggggtaattagtaagcaaaagttaccggtgggggattattgcctaaatcggcactgtccacgaacatcgccgaagaagctttccccgctgtcattgtttggcgttggcttttgcctccaatggtcgctcccgacaacggcgaccgcggcattgacctcattagcagtgccgcaactgccgctgtttcgccaccggac

SEQ ID NO: 16436 - DNA, 2471 bp, Heterodera glycines
aactaattttttaaagtatgcttttgagtgtggcgtgctcttatgctgttgtcgttcgtttttattacatatttattgtctttgctgttttgtgctgttccggttccatttcaattttttccattaaatttgtgtctgctgagcctccgattatccgtgcaaaaaaaaaaagagaaaattctttttgaaacacaattttgtatacatataatatttttaaatatattctataattaatttagtcttttaaaaactataattttctcatttttatcatattttttaatttttcggttatttttccataaaatttttaattcgttttaaccccctgaatttttgacaccattgattttttcccggaaatatttttgcttaattattttaatggatttactgaaattaaagatgcttttatttttcaagattggaacaatgaattccaagtacagaatccttaccatttaaggataaaaccctcctttttaaattaaaaaggcacaattagaatattttaattgaagtaaaaagtaaaattgataatttgactaaatcttttctaaacaaatttaaaattgattaatttaaattgtaatattaaatttttaattaaatttcattttttttcctttttgtaaaataattgtgaaaaaaaaagaaaatttcaaaatttttaccctttgcgctcactaatctcttttgacgatctttacacatttgacctttctcccgctgtccccagcaatttttgttcttattgttcacattttcttctgctaaaattgaaacgaatcgattttgttttcgtaattttttggtttttaaaatttttgtaaataaatacctaattaatgaattttatttattttaaaaaataataagataaaaacatttttaaaatttatttacttattatttttttactttcttttcatttttgtttatttttccaaattttccaaagcctctgaacaaacatttggaacttttttgttaagccaacccccaaaaaaccacagctgctaatctgttgaataaggaaggcaatggtgcagtttttgtggtttctgcggaaaacttttttttaatttaagaaccactttttctagggtagaaaaatacattgctcatgaactagcattgctttttgtctttaacaagatggttgaatagtctttttttaaattaaacacatttgagaatgtgttgaaaaattgaatacttgataaaaaaaactataaaaccaaaatgatatatatatatatatatatatatatatatataatatatatatatatatatgtataaaacccgagctaagattcactattagcgcatttttctaccctagaaaaagtgctgcttcttacagtaaattttattttttcgcaaaaaccaaaccacaaaactgcaccattgccgtgaattgtatatgttttttttcagataaaatttttgagcatttaaattcggtaacccctcacaaatgccaatttaatacgagaggcaacaaccaagcaacaatagaatattatgaatagttaaatttttatctggatttttaattaataaaattgtatatgaaaattgcttttttgatccctgccctaggataaatttcaaaacatttttttcaaatgaattaattgcccaatttttcggctataaaatttttctttttcttttttctttcctcctccaatcacttttgcttcttcttcttcttctttttctgctgatgcttatgtgcacacctcacctcattcacaaccaaacacataatcaaattatgcgcggcgtattattcgcaggaaaaatgcgcaacaaaaaaattattgggcgtggcggaggaggggagaaaagatgcgcgcaaatccgtcgatgaatgagaaactccattaatggggcctcaagtgggacggataaagcggattaaatagggccgggggataaagcggataaagcaaattaagaaaaaattaacacacaaaaccataaaaaatcaagggccaaaagggtgctagggagatgaagcatgcttaatgtatatttggcctttcagcactttttgggagctaaaacgggtagcggattttggggatagaggaaatttatagaaaatgcccaaataaaaatgggttaataattaatttttaaagtaattcctttgtctgggaaaaaatttttaaatttttctaaaaattttcattagaatttttaaattttatttttggctttttggaaataaaagctaaaaaataagcaattaaataacaaaaaagggaccttctttttgttatttttttcttatccaaattaaaattgctaaaattttgtaatttcgaaaaacaaatttttatatttttatttatttttttattttttactcaaaatggatgttccaatttccaaccccaaaagtgaacatcgattaaagcaaatcctcagcatttatccgttgtattaatccc

SEQ ID NO: 16437 - DNA, 1602 bp, Heterodera glycines
caaaaaccctccctcctgatacccaaaaatctaatgtccctcaaattttacctacttctattgacaaagaacaagcggttttccctcagcgggatctcttgcataaaagtaaatacaatctccgctctcgcccaaggtctaacagttttaaacaataacaaatgcacttttctccttacccattttcatactcacaattaatttttaacttctcacaccactttttttacaacatttttcccctttttgttttcattccttcacaccgccttgcacccaaaatttttatgattaattctcgtttccttcccttctccaacagaatgatccccttcctgtccaacatccccgaacacaaatacctctccaacttctaccccgcccccttcttctaccctccctcctcctgtcacttcctttcgtcagagcaatgttaccaatccacaaaagcaacattcttccaaagatacgacatagacaccgaaatcctgaaaaccacctccccagtcgtagcaaaacgactcggggctcgtgcccaaaatgaagctgaccccgcatcagtaaaagtgtggcacagcacgaagcagtcaaagatggaagagattctcttccacaagttcgaccagaaccccgccctggcagagtgcctcatttcaactggggagaaatttttggttgaagcgagtcacgctgaccgattctggggcgctggtgccaccattgacgacattcgtcaatggaactttactgggcgaaacaccatgggccaactgctaatggaacttcgtgaaaaattaaaaggttttaggattcctcattccccagtgtcccttctcaaataaacatcataagtctcacacctttattccccccccccatcttcctctttcccttccaaaattatcgacccctcctttgcactccaagttctccttaaatgctttgttttgcttgtgttactaacaatgctttaccatacttccacattgctgtgttgttttctaatctcgttttgtcctctcctcgaatatctcttcactgccacattaagtatgccgaaacgacaatcgaaacactggattccaaagacgaaatgccccagactccttccgacaacgcctcttgaagaatcgctccaagctctgacaactaatgctgattcgaccatcactccggcagcatcttctactgaacctgctgactcttttgatcctctctcacattctgttgtcccttcatctcctctatcctctatggagactctgttggcccttatctcggtctcttctccttctgaaaatcagaatttgtccaacaatagtccggctccttccccaccacgaactgaaaatcaacccatgtcttcttcctcggacccggatataatctttttggagaaatctcaccccccaaaatccaagaaatgctccccttgccaaagtcaaatttgaaaatgttaaatcccttaattgggatgaaagtatggaagctgccaacaccatatctgattctcccatccctagccccaaatataaatgttctcatgccccatttcccattgcccaatctcagcagtctcaggaaactggtgaccaaatcccc

SEQ ID NO: 16438 - DNA, 2588 bp, Heterodera glycines
  unsure (1)..(2588): unsure at all n locations
gcatcaatccccaactttatggctgtcaatatccccttcatctcgtncaaggaattgccgttggggcataaaattttcaaaacatctcagggtaaaaacataattttcaccctggtgaccggagaaggacttattacccccaatttcattccgacaccccatctcaatcatcccctcataaaaggtgtgagacttaatatttatgtcaaacaaattgccctggggacccaaatttctgagttttacacctttccccaaaacttcccagcaaacaaccttccagcatcgtcaggtgacaacaacttcgccatttcgatggactccacatcaccgcccaggtacatctttcctttcaatccctccctcacaaaaaatgataatattaactcttttaaagccatttccgtagccttaaaagcgcaggcccactttttgtcctcctcccaccaaaccacctctgtttatacaaaattaaaattggtcccccataatccaaaaaatgaagagatctgctcatccgtcaatccctcaaacccttcctgttcctcttctaatgcctcccaagcgatacgaatccagaaagtatttccatattttttcacccactctctctcttcattatctgaattcataaagttcaacaatacctggaaacccgactccctcctgattggctccgtcaacaaaaagatttgtgctcaaggcaccgttaaaaacgttaaacttactgatcctcatatcttttctgttgaaatcacagttaatttatcagagacagaaggtcacagctttgatttggaggacctaatcctcttggagatccctatgtcccagactcaattgaaaaataggtctgccttcttttcctcctccattcccctcgctactgcttccaatgaaagccctcaaggacaaattctctcccaaatccttggtttctccactctcccaaaaattctcccctcctctgatctgtcattttcctcattctcccaaaaactctttccaagacccaatcagggacaacttgaaaccctggacctccttttcaacccctcccccagtgcaatcatcaccgaagccggaccaggcactggaaaatccaaaattatcattatgtccatccaaaaattcttagaattagggaaaaacatccttatcaccacccacagcaatgtagccctctgtcgtttagctagcgatattctcccaaatttagaccataattcaaaagcccttctcatcctctctgcctccgcaaaagaaaaatatttttccctttttgagccttttatgaaaaatcttttaataaaaactttagctgactttaatttgcaaaaattaacccgaaaagaagccaaaatcattaataaatataaaatgaatgctctaaaaaaaccacaaaaagcagatgaacgttcttctgcagaaatctttatcagagacgttgggactgaaattcccatcatctttatcaccctcagtatgttagaagatattccctctatgttaagtcttataaatatcatattcattgacgaggcaggtcaggcacctaccaatcagattcttcacattctctccctggccccaaatttagaaaaaatccttgctgctggtgatccaaaacagctacaatttcgctcctctgagcttcctgaggaattgctccaatacggatttaattcctttctttctcatttaatttccattcctaacattcccaacacaaaactcacaatttcctaccgaggacacccaattctcacccagtgtcttgctgattctctttatcatggagatattgttgccggagtaacggctgaacaacgctccatgattacctcttccaattttcccctacccaatcaaaatgcccctcttcttctcgttgatcttccaaatcctgattatagagaattaacctctttttcacgtttaaactctgcccaaacccacattgcccattcaactctttctcttctctctctcattttacctccatctgcctcaattacttgtctttgtctgtattcggcacaggcaaaagctatcaaaactcttccccccttaaaaaacgtcactattttgacggttgattccttccaagcccaagaatcagatgccattgtccttatcaccacccgatccctccccatcactcccgacgagatgagcagatccctatattttttaaaagaccccaacagagtttcggtcgctgtttcccgggccagacattttttttgtttaattggaaattttggtactctaaaagcatgtaaatcctggtctaactatttaaactcggcctcttctttctcccctataatcggtcagcattatatttttaataaaattgaccccctaattgccacttttagttcgcactttgccactaacgatcaatttctcacttttagaatgccaaaccgcgccatgccgactcgccctccctctcttttttcagttagttttaattcccccccacttaacccaaacccttcctcctcctcttcttctgccccccgtcccatcccctccctcttccaaaacatcatttccactcccccccaaaatttctcctc

SEQ ID NO: 16439 - DNA, 2883 bp, Heterodera glycines
  unsure (1)..(2883): unsure at all n locations
gaaaatgtgaaaattaaatgaattgatgaaatttatattaatgtatttaaaataaaaaatatatttgaaatttgatttttttttaaatttgaattgaatatgntaaataaaaatatttaaaagttaattgattagtttagttatgtaaattaattaatggatgtgtaaaaaaatttaattaaaaaaaagctaaaaaatttttttataaaatttcaagaaaaaaattaaagaaaaatcagaaagaatttgattttacttgtttaagctccatttttttcgctgcttcattccagtgggataaataatcagctcgttgcagtccaaccatcagcggctgtcggatgccctccttttggatgactttggccaactcaatcagtttggcatggaacgggtcgccctatcaaattataaaaataaattatttaaattagctataaaaagatttaaagcgttttattagaccggtcagttatttttgacgaagattttgatgatcataccttgccattaatgcaaaggattggttaaattcaagaaaaatatttttcattttcccaaaagaattttttattttgtttaattttgctactaataaattttaaaaatatttataagctttctcatttatttttttttaccaagtttttggaaaatttgatttttgccaaaaaatgcaaatttaaggtttatttaatgaaaaaaatcagttttcatttgacgaaagtgatttttagttttatatttcaatgaaattgaaaatttctcatgctttttcgagtaaattaactcaaacattttttagaattctccaccaaacatactgaaaaaatttaaaaatttgatgagttttcttttctgtgcccgaaaattaaaattaatttaattttttttaatcagaaaattcatttcccaccttgatcacgtccttgtacgcctccatcaggaagtcgtggtcgcatgcgatgcggaagtacagttcgttcagcgactgttgcgcgtcagtcgcctgctcgtacaactcgcgggggaacggcgacggcaacagggcgattggaggcgccactgacacatcgttggagtgtttgtacttgtcatccccactgcgtccaacgaggcctgaaaattttaaaaaaatacgcttctttaattaaaattattagcaaaatgtcataaaattttaattttaaaatataaaaattggaagccaattaatattaaattgtgtgaaatatttggtatagtttaattgtagattcattaattattggaatttacatttaattgtccccttttatgaacttgctaatgttcaatttgatcaaattaaaccaaagaattatccgagttttttggaaaattaatataaaaaataatcaaatactcatttgccacggcttttttgatcattaattcttgtaaaattaaagtaattatcaaaatagtaaaaattgtagtaaaaggccaagaaagttataagtgccatagtgtagtagaattttgacaatttaggcatttttaactcgtaatgaaattgagcaatgtttgtctggccaaactgtgttggtcaaaattcattttggcacttaatgtggtgacagtaattccgtttaaatttcagtttttcagttaattgtatgtcagcatcgcacttaaccaattggcacaaaaattctattttttgccatacaattgggcattattggccaaaaaaaccaaattgtcaaactgccaaaaatcggtgccgctttaccaattgaatgcgcgtagtcaaccgcgtactcggccaacaatttcagctcggcatcattgcgcactgcggccaacgcgtagtcattggccttgagcgggagttgtgccatgttcgtcccctgtgcctgttgcagcaactttttttgctgaatgccattggcagcgccaaccgcggcatgaccattgttgattgaagccatttttgatgcacaaattgtaggaaatgagcagcaaattaatctgaaaattacgaattaaggaaaaaaatgacaaacaaattaatttaaacaacaatcatcctaactaatataagccactgacaaatgagcaacaatttgtcctaatttctaaaaatggcattatttcaaatagcaaaatttttattttatttttaattatttcttcatttttgatttaaaaacacgaaattagcaaattttgcatacccgccaaaatgcaattgttgtatttaatttaatgaatttaattagcttaattaatgaatgaaaaggtggagaagttaatatttttattttagcttaaaacattttcatttggaatttttgttttatttttcggatttttaatgccctataagatgtggcaatttggaaaacaaatttatttacaaacttcttgactgtttttgattacatatagcagtgaaaaaatgataaaatgggagggagactttttggtgtcggggagggaaatattcattaattagttgatttgtgagctaatgtttgctgtggacaaaaggatgagccaataaataccattcccgataaaactgataagaagcaacaatttgctcttaaattgtgctgatagcccccccggggtgtattttgtatggtgaaaaacattcattcatttatcgtcgaaaaaagaccatcatttttagcacaataaaaaaatttgtgggcggattacgataataaaacgtacagtacgccaacataattaattagcccattaaactgattacgaaggcggaaaatttgatctcattatcgtcattataatgagtccattttttggccagtggtctttcgtttttgtacaaaatcagctgatcaacaattttaactttttgagtggaatttagcaaaaggaaagtgtaatgaa

SEQ ID NO: 16440 - DNA, 2020 bp, Heterodera glycines
attcaccgcactcggtataaacggtcaaggagttttttttaaagtatgggaaaaaggcatcagtgtccctactcaagtttatttaccagacatgaatttaaaaccgccgggggcttgggaaataaaattaacgaggcattcacacatcattacaaaatcaaaaaacaacgtggaaagagagaagccaaggctgaagataccaaagattcaaaaattgatgtcgcaaagagggccgcagaacgcgccgggagagatgtagaaagacatctcaatcatatcaacaatgtctcgagttccatccaaaccaaactaagcacactaagagaagtaaatcctcaaattttagaagagcctgatataaaagtgtggtttgacaaaatggtagagaaggggaccgaaattcaaacataccgaaatgaacttaaatcttttcaagaagaagtagataaagccaaaaacacaacattagagcatgtggaaaagaatgacttgaaagaagcaaagaaatcagccgacgtcgcaaagggaatagccaaacaggcaaaaagcaaatattcatcaactctcgaggaatataatgataaatcggaaaagggttatatcggaatagtgaataggcttaatgaggctttgggtgagcatattaaacgtaaagatattgaaaatagacaagtatcggaagctgagaaaggaccacaaaaaagagagagactagccaatgaggatgttcaatttcaatatgacagcattgatcaaaaatttattgtctatctttctgctgctgtctcccacatagatttgtcaaaacacctcgcctatgtgcttggttttaagaacacaaggctatttcacgcggaagaggcgaattatatgccagatttgacgggaggcgtaaggcagctatacatttatgcaccaaatttaatagaaaacacaattatcgggaaccaaatggctccactcttaagaatagttaacgtcgtcaatgacccagggtcgattagtgaagttatatatagcaccgagtactttcatcgtctacagtcgaaacgaatttcagaaattacaattgaaattcacacaccgtttggcgaattcgttaaatttcactggggaagttgtattctcacattacattttaagaaaagtatattttaaaaaatgacacatgtgtttttcgatcccgagtcggtcgattggtcatcttttttcacttcacaacatgggaggggacagaagcaatactttgtcgggagcaagtatcaacggggattcggtttcctcggtaatgtggcacgtttcttgacccctattgcgaggaatattgcctcgagtgcaggacatgaggggctcgccgcggggcagagagttctgagtgacatcgctcagggccgtgatttaagggatgccgtcagggaacattcaagacaggggctgactaaccttaccgataagttacaacaatgtggtaaaggaaaaagggccctgatcactaataagaaccggaaacgtgtatatgatcagttaagtttcatctaaaggtataaatagaataaaatacacaaaaagttaaaaatgacaactctcaagaaaatcgacaagacgagtgaggacggtctcgaggggggcctttcgctgttcgacatccccccgacgaacgttgcaattaataaatccagtattagggaattactcccgctttcagcaataaatcaatctggaccatatatctttagacttttttcagataatcagttttgtgatctcaataaaacttttctttatttgtcaacttcaattgagagaaaagacaaaagtaattggattccgattactaaagatagtgaagctgaccaacacgtcggtgtcattcaaaattttgggcacagctttgtcaaaacattaaaggtgtcaatttcaggtgtcgaatcttatgattccggcatttactatgcgtttagggcatatatgatgaatgaattgggattttcagaagatgccaaaaagggtctctgtgaag

SEQ ID NO: 16441 - DNA, 1885 bp, Heterodera glycines
ataattcagaaaataaataattttaagacaaaaaaattattcagaaccatttttatactggtcttaatggaataaaattaaagactataaatgttcaaattaaatatttgtagtatatttatttaattatcattctaatgatgttcaaaaaaacaataatggttccgcagatttatcagaacgaaattttgttttccgaggcgagagaaaataatttggattggtggctaatataatatacaaaataattaaacactctaaaactgacataaaagaataaatttaaacctttataacgaataaattattagttaatgatatcaattgtaagcgaaaagaaatatattgttataaaaacgcaccggcgacgctggcgatgacacctgcgacgcatccgtgaaccagtcgcgccaaagttaagccggtgatgaaactggtgtatccggagacgatgttgtttgcggcgccgcccgtgcgaaacgattcattggcttctgaaaaattggattttgtcctgaaatcgtttgcgagaagctattttttgacactgttggttataagcattaaattgtgaaaatgtaaacgtggtaatataaatgtatttcatacagacaaattggtaaatcgcggtttatttttatataatttattaaaaaaacggtaaatgatatttatgaatgagtaaaggttaaaaacggtaaatgatttatatgaagtgaataaaggatcacccccgcttatcgaccatattgcaattatgtccagccattgattgcgcccctgccttatgcatgtggcctctcctcacgcggcggtttgccctggaagctggtcggcttgtatcgcggctcggggaatgcattcaaccgatgactttcatggcagcagttccaacaccgcaatttgcggacaatttcgggaaaaaattttaaaaaataataaaaaaaatttctgaaaatatggaatgaaagatttggaaaagttagtaagtttcttctatttttcagataaaaataaacaattttaaatttttagctattcttagtcgctaacaaaacgtcagtaactaatccataagcaaatttattttttaaaacgcccatttatttaaaatcatgtgaaaattaatttttgtcaacactgatggattgtccggaccccattttaatcacttaagagaccaacatcacattttgaccagtgaaattaattcttagaagttaaaaataaaatattgactttgtaatataaaaacaaaattttttttattagttttgaattgataatactgattaagaaagaaaaatattaggaaattgattttcactgtctaatttcaatataatataaaaatttaaaaaatgaaaaaaatataagataaaaactaataaatatttattataaaaataaaaaaataaaaatatcttgaatacaaaaatcaaatttatattgtgtttactaattttaaaaaatttcagcttgcaacaaaatataatgatacaaaattaatattaaataaaatatttattatttaaaataaataaacttagtgaaaattacataaaataaagtacacctatccaatttttaattacgtcgtttgaatgcgaaaaattttaattgcagaaacgaataagctatgtaaaaacatttattgcttcatcaaaattataaataaaaaataggtaatataaatttttattttaacaaatcttctgcagaaatagttattcggtgttgcatagcactgacttgaaatttcccgcttttgaagcgcttttccagttaaaaacgaatactttttaaaataaatccaatttctttagtccaagtaaatcgatgacttgaagacacagtaaatcaccaatcattttttcataatgaa

SEQ ID NO: 16442 - DNA, 995 bp, Heterodera glycines
catttaagaagtaaattaataatatgaatagaaattaaaagtaaaagattacaaaatgtttaattaagttttaatttttatttaatatcacctgtgattttaaaagaataaataatttctaaataaatgtcaaaaatatttattatttaaatttataatacgaaaaaaatatcttacaattaattattaattataataagcaccaaaaaactagctttgtggaacctttataaatcaaattttataattaataatcaagaatagaataattaatacataataattaggacttccaaaaatatggatataaaatcgcgaatatggccataaaatatggacataaaatgtcaaaaaaatggacataaatttttttgaaaatttctgatgttaattaaaattgcattatctttttcatgtttaaaaatacttacgcaacacaaataactaaatttaaacttttaattatttcttaaaaaaattaaagaaataaaaattatgattttgattttatggattataagaaaatatattaaaatatcttaaaaagtttaatagactcaatatgcatttaaaataacaattccgaacgcaacagagatccagaaatctgtgacttatgcaagaaatcttaattctaattgacgcagaatacaatattggaaagcttaatataacaaaaattgaaaaacagtaaagagaattcaccgaataaaatatttgattagagatttcagaaaaattcatcaattaaaaagtataccaaagtagattaagtgtcagctttggggcgacttttacgataaaataaaagcatccaatcaaattaagaattaaacaattacacaaaatttttaaaaaatgaacattggaacattagtaattaaatgggtataagcccaaaaaacatcatttcatcataaaaaatacatgtaacaatggccatatgtttgggggcgccggacttttcgaccagtggacttttcgacagaaatatt

SEQ ID NO: 16443 - DNA, 691 bp, Heterodera glycines
cgaaaagtccactgtcgaaaagtccgggagccatgtttggttggtatcaaaaaataattgttcaaatttcacattctttaatatgcaaaatggtattctttttaaatctgttcaaaaatcaatttaatttattttaaaaaataccaaatcaggtcaactgatatttttaataagctatttttgtcagcaaaaagcttttagattgtctaattaatgataaatttataagaacattgttatcgattcaaatttccgagtcacgaaaggcaagaaatattacttaaatgaattttataattatatttaacaatttttttgataaaacaacttcaattgaaaagataattacgaaaaatagaagtaaaataaaatgccaaaaacatttaaaatgtaataattgtataataaattattaaaaaaaacacgaaataatgaaatctaacattaaagttgtctcccaacaacacgctaatccagagggtgaatgcgtgaagaagaaattaagaaacaaatattaatcaagtaaaatgtttttaacaaataaaatttatcgacataacttattttatactatcgtgcttaatattttttcagctggccttaaaacttgactatttttaacataaaaattaaaagataaaaactaatatagggcaaataaaacaattaaataaaaagctgatagtaaaaa

SEQ ID NO: 16444 - DNA, 1183 bp, Heterodera glycines
ggttttgtgaatggctgcttgatgcggcttaaatttctcggactttaacccaagaataaagaaacggatcgagccagaaacttatttttgtcaaccattcgtcgcgcaacacttcgaacggtgggtagttaattaattcgtggtactaattagtaaaacgcgaatttacatcggaaaattttttaataacaggaaaaaaagtttttaattttattagtaaattttaaaaaaatattttttttttctttgacagttttgttggctatgaacacccggagacatttttcacccgagctgatcgggcccgtatggtccacgatttgttgatcagagcgcggtatgaccgtggtgaaagcatcaacaaattgcgatttggcatcgacaaactgctcaggaacaggacttacacagctgcattcccacttcatgatgtgaaatttggattttcttatacaatttttagtattaaaaattatattttaaattttaaattaattcatataatttttgtttacaaataattttttctgtttgttaccatttaacggttttaatttttttataaaatccatatgaatattttaattgataatatagaaattcttatttaattttggatttttaagaatgagttgagaattttcaaaaaaatttttagaacggaaatgttaaaatcaaaacacattctaggaatgggatttcttaaatgaacatatttgtttaaaacggaataattaaaatatttaaatcatatttttaatttactccaattatcattaaaatatgattaaaatttttaaaccaattaaacttttaatgcaacataattaaggaattgaataaaaaagcgaaatgcgtcgattttgaacggtgcaatgatcgacaattgttgtatgagtcatgggtgaaaatgaaaaatgttttcaaatatcagccgcttgatttgatccgtacatattttggcaccaaaattggcttctattttgcctggttgggctattacacgcgatgcctgtggccagtgtcagtgcttggcattttgtttgtgctttacggactgttcacaataccaagcgatacacccaggcaagtgcttgcttgagggtcttaggttgtattacagaaaattagagtactatcgagactgaaaattttgccgtaccgagacttggatccgggattt

SEQ ID NO: 16445 - DNA, 1301 bp, Heterodera glycines
cgataattatcgtccaattacttctagtgactatgattgcgcctcagatgtttgcctcccattaattttgcttttaagaaaattttaaataatcacgacggtaaaaaacgcattctaaaaaatatcaattaaaaatattgtgccattataacagtttagaaatggaacaaagaatgataaactgacaaagggattgtgaatgttgtggcgaaaattaggtcccaaatgtcatggcgtaattgttggggcgcctaagttttaaattaggggcgcaattttttttttttttgtggcgcaattgtcagggcctattatcgggctcaaagtcggggggttctaagttttgggcgcaaatattagggcgtaattgtcggcgctcaaatgtaatacttttggcaagcggttagcgataggtcctaatttagcttggcgcccagttagcagcgcccacctgtcccagccaatatttagcagaaatatttgtaaaaattaaataatttttaaatcgtttcagtggtcaacaattctttttgctgccatcatgtccatttggataacactgtttctcgaagggtggaagcgttaccatgccgagctggcatacaagtggaatgtgctgggttttgaaccggaagaagtgcgtgaaatagtgccaaatttttcaaataattaacaaaaaacaatttggccactaattaggaaatgatgcgtcccgaattccaattccgtcgcaaaaggatgagcaaattgaacccggtcacaaagcaggaggtgaaaacaaaataaattcaataaaaatctatgaaaatttgcatcatatgcaggcccatacccaaaaaaatatcaggagcgaaaatttagtccaacgatgtcgattagtgatcatcgagaatttccagtctcgggcatcattagtgccgacagatgtcgtctggaaaaaattttcaatttttgaggagggattcatagaatttataaaataaaacttgtacaactattttctaacccattctcctgcttctgaaattttttgagtctatggtcccaactgttttgacgtatattttttattacaaatatttttaataactcaaatttatttttaaataattcaaaaatttaaactctaaaaattttactgtattttcaggagccgtacattcctttcatggagaaagcatgccgtctctgtggctcggctgtcactgtgttgtttttcatctttttagtcattgctttactgttcggcatcattgtgtaccgagtgattgtgcttcgagttttttatgccagcacatttt

SEQ ID NO: 16446 - DNA, 1051 bp, Heterodera glycines
gacccttgaatcgaaatgacctagcaccattgcttttaatttcatttccattccagggtcacttccggcactgctgcaatgattaatctgattttcattctcatcatgaattttgtaatgttattgttttttttaatatttaattatgtcatttaaatgatttatttaaataatttttgactccttattttttttgtttacagttttacagtaaattggcactcaaattaacggaatgggaatgtccgaggactcaaagcgaatttgataataggtaaaaacgatactaaaatattatattattattacaattaatgttggtaggctccaacttttagactaggttgtttttaagctttctcaaaaacaaaaagtcgaaaattccaacatttaaaaattctaaatttattgcttaaatgccatttcatgattaagccactcaaatttattaattaaatgccaaattaatatttcccttaactttcagttacacatttaaagtgtttctgttccaatttgtcaacttttactcgagtttgttctacatcgctttcataaagggcaaatttacgagtccgtctcatgtgaatcgtgggatcaacgccgatcgaactgagctcagatttgggtatataagaaaattattgcttaacattattatacagatttttatgtttagaaaatcagttttttgaagttttctggcgccataatttttatgaatcttaacaaaaattttttgatagagaacacttagggctattgaataatatctcgacaatgttggatttggttggcaaaaaaaaagttatagccaaaacaacgcgctggggcccaatcctagactagattgtttaacatgtgaagtttttaaaaattaatttggtataaaaaagctatggtcaaaaaggtgtgaaaattgtgtaaattccattttttcatatataattttggtaataaatttttcatatcgcaaacgaaatttttctgaaattatacagactgctaataggacttttaatcactgtggaattatgcaatttttattaaa

SEQ ID NO: 16447 - DNA, 1311 bp, Heterodera glycines
aatgtacaaatctcgttgaacaaatggccaaaatacggtgaaaacggcggagaaatgcgatgacattttgatcgatgtaactgaaaagcagaaaattagacgaaaaattccaatttaatcaaatttttacatgatatgaatgcgtctgaatccgatgactttgttgggcaacggattttgcgggattggcaatggatttccatcggaattgacaatttgcatttgcttagtgccattctctccaatttcgtggcaaatttgcattttgcccaatttccatttgcgtgttttgaagtgttcgttgacgatgcagtcaaagcgacggctaatcagtgcaatttcgaggccgagttgagaaggcgcaagaaaatcgaacaccaaaagcccacaatcgctgcagataaagctgaaaaatgaagaaattttcaaaattttctgtttaattttttacatttcgttatctgaagacatttgcagcatcaaaatgaccgaaaaatatagggagaatggaagaatgatcggtatgagaaggaggagaagaaaataggcatttttatactaaaatattagcgtagcgctccgacccttcgagggtgggaaaagtcagtcggctatacataaagagaaaggtggtgattcatgcttcaaatgtattccccaaaccgtgggattactggtgtttggtatgaaagaatcaacaataagcatttgtgatgagaggaaataagcatctaaatccgtttccaattgtatgagatcgatcatttctcaaatataattaaatcaggacaaatctgataaatcaggatcgatggaagccctgcttaaattctcagtggcttatttaggtaaattatccaggctattattatttgtattaagatttattttctgggtttgaccgttctaaaaggttaggaatccacgttttgtgcatttttccgcattttgaatcagttcaaaaataaattctattggcctaaacttttcaattgatattaaaagtatgggaacgggtcgttttggcgccgccgttttggcgccagccttagtttttttattataactttttttcttgttgaccaaatctaacaattttggtatcattcgaaagcccttcacaagctctattagccttacaaaaaacaaacaaaaattttagcttctaaaaaagttattaggaaaaaacctcaaaattttcgacttttttgcaatttcatgttataacttttttggtaattgtctaatcgcgaagcaatagcttagaaatatcttctaaacatgttaagctttcgaataataccaagatta

SEQ ID NO: 16448 - DNA, 2173 bp, Heterodera glycines
ttttcccttaaacgccgggttcatttgcgggcaaataacatcacacaattattgtcgtaagtgtgattacgacaaatgatgttaattaaactaaaaaatctttatttatgttatgaaaaaaagacaaaaatgatcaaatattttttatttgtccttttgatcgctataaaatataaattttaagcaggaaaaaccgtagaccgatgtggtgatattttgattggtgtaaagggaaaaaaaattcattctgaaaatgctgtgatggcacccccacaaagtgtccaagccacgaaatgtccaaaagagtaaaaacccacgaaatgtccaaaatttttcaaaatttataaaaacaaaatgagtctaatttaggatttttagggttttcggggtcgctgaatacgaatatatcctttatattaccccttgcctaaccttaggcccatctgaataataaaaaactcaaattcgagacttggacatttcgtgggctggacattttgtgggtcagcggctgtgatatttcgtcaaaatgtcgcctaaaaaagtgagcattatgccataacatttataaaatgcaaatacagatttcttttgtaacaaaattaagccaaatcagtaaattttttgtcatcaaaataaatgaataggtaaattttgaagatgaattttgagaaattttttcttttttatgcatcaatttttgggtcgattcttaggtgtgtatttctcgtttttattgccatttttgttaaaaaattcatcaaaatagggtaccgtattttctctaattatcaccccgggggcattatttttcaatctcctcagaaaggggaggataattagagacgggggcattaatggagacggggcgataattagagaaaatatggtaaatatttttttcaaaattttctggctctaaaaataaaaatctagaaaataggcactaataactcgaaaagtagcctaacaacatactattccccaaacgaaaaacaaaacaattgaataaattacccttacatttacgatttaccaaaattctgcgaaactgaaaatgttaaaattaaactatttgccgatgatcttaaggcctatcatgttctttcaatatttccttttctccactccaaaattttattaacaaatttaatcgatactgtaaattaaacggccttaaaatcgcttcaaataaatgtttaactttacatttaggacacaaaaaccaaaaaataaattattttattgatgactttccaattcctaaaaatcccggaaacgaaccagtcagagaccttggcatttattttactaatgatttgaaatgggcacaacaaattgaaattatctcgaaaaagcattacgatctgcttttgctatattaaagtcaatcaaaactggtgatagtttctaagggttttctgggtcgctgaacactaatctgacactcaccattttgtccatttttccgcatttttaaccgggccaaaaacaattttataggcttaaacttttcaattgttattaaaagtatattgtattcaaacgaaagaaacacaaatcaaatgagagcatcagaccaacgaccatttctcaaatataattatttttcgttgctttcatccgcttcttcattctcttcttccgttggtggcgataatggcctaaaattaaatattttttttcgacaaaatcaaaaattgctgttgctgcgctgcgctcacccaatggatttattgatgtcagcccacaaaaaaattgtgactttgttcaaattggcatcccaattttcccattgaaccgccgtcgccttttcactaattgggcatcgcttcaacagcaatctttcagtgaattcacagccatcttcatcagcagcaccgtaacgtggcattttctcaaatgtcagcttttccttggttcggtcgttcaccaattcaaatggctcaattgatgtattccacactgtaaatttaattttgtagctgaccgaagcggtggcacggagaaatgccttaacaaaaaggaagcgaaaatcaaagactatcaatcaattagtcggtcatttaacgaaaatatggcagcaaccatcagggccacctctttcaattgttgaccctccgactaaaaattttgaaaaatttatcaaaaaaattgaatggtaccagcggta

SEQ ID NO: 16449 - DNA, 2292 bp, Heterodera glycines
ccgaattggcaatttgctgctgcggcggcggctgagcggacatcgcattggcaacaacgccggcggcggtgccgaagtccaacggcattgccgagtggtgatggtggttgtgctgcagctggtcggccagcagcatcgcctggtgcaacgcggacactccgccggcaccgccgcgctgggctccaccggaaacggcggccgcggaaagccaagcggcggcagcgagtgcctaagaagcattgtcaaagtttacactttagtaattttcaataattataccgggttttgtgcaaattgcccagcaaatgggtggtccatcaaagatttggccggaggggacgacccattggcgggggcggcggagaaaagcatcgcggggatggcaccggcggtgacgggggactaaaaggataactgttatgccaaagcaatgcatttcaatttgcacttgtctagctattaattgttcggcattgtttcacctcattgctttcctcggacaccgccgtcggactgagcggcgccgcgtccgaagtgccgccaccggcgctcgtcgcctccgccggcgttgaactcgtggacaaactttgccgcttttgcggcgcgtccttcgccaccgttgtcccgttgttcggtccgcctttcagcatgtttttgtattccgtaattcgaaccttaattaacggtaattatttaatttctgtaattaatttcttttgaatttttgtccgtttcgtttttgccaattctatgcccacctttttcccatcaacaatgcatgtccgtttcggtcgcggtctaaatgaattttgtttttgttttttaattgatatttatttggctaatatttattcgctattcttccaaattttaaaatgcttctctcccacctgtatctgtagtccggatgttgctccatgtgctgcttggacagtcgcgactgttcttcataatacggttgcttttcgcaattactcatcgccttaaaaattattaaataaaaataattaattccatttttttgatcaccttccaacgtgagccgagtatcttggaaatgttgctgttgtgcatgtccggacattccttcaagattttccgccgttcatcccgagcccaaaccttcaaaatgttttttttgcattatttaaaatgcattcatttctaaatgcccaccataaaagcgttcatcggtcgctttatgtgattcggcgacttcgcccccgccctttgctgctgattccctccgtttgactgaatcgtaaattatttaattacctattatttcttttatctgttttttttaccttttttccattatttgcatttttcgcctcggatttgtcgccatttgacttttccgagtttgccgaattattatggaaattattcggcgaatttttgcccgaagaagaacaggaattttgtgtgtctaaaattacccaatttatgaagtaaaaaaataaaataaaaagtgcctgaatttgttggatgaatcaaatgttgctgattttgtgttcggttgttggacaaatcgaaatggctaaacaaaaaaaataaatttttaaaataaaataaattgaatttttttttattttaattaattgaattcttttatttaagtgatgtttccccaattggtcaattcgcttaccttccttcaccgttttccactttgaatctgctcaaattgagcggtgaatctgcggatgattgcatcaaattttgcggagtctgtcgatgatttctttctgttcctgttaaataaaataattttaaaatatatttttaattgttaatttttatgtatttatttgcctccgttttgtgtcgccggacttgtcgacgattggcgccgttttcgcccctttggcgttgtcggcgtcctttgatgattgtgaatttgatgttgctgatgttggagttgtgccgattcagccgacaaatggggcgaagcatctgttgaacagttcaaatgcatcggatggaattggcgcggaaatgggcctaaatttgtacaattttaaattattttttaaactattttttcttggaattggcattgtgccttactttgtgatgcgtttgcgctaaaaaattgctggacgggcggaaattctgccgccgcctggtgaatcattgcggcagcggtcgcttgcggctgcggaaagccaagcatgaccgcggtggcagccatttgacgcgcgagtgccgcctgctgctgattcgacgggtgcgcacccgcggcacagagggcggccaacaaatcaaaagacggagaggcatctgtta

SEQ ID NO: 16450 - DNA, 2955 bp, Heterodera glycines
cactttcgtcaaattcgagtccccgcaccaatacgttgtccttaaagcaaaaaaacaaaagttgaatggcaggaaacaaaaaaggcacgaaaagcgacttgcgaatggggtggcttttcgccctttccctcctcctccgcgtcgtcgttcccctcaatgacctcctccaatatgtttcgggcccttaaaacagacagtcatttgccttacaattagcgcgggtttaaatgccttcggacgggcgctttgatccgttccgccgtccgatgcgccaacaaacgactgctcagcgcggaaaagtctttgtaccgtttgattgtcctccatttgtagcgaccgtgctcaagttcgatggtgtatctaatcgaagggtgattttggccgtttttcgacggaattttagcacatgaatgggttcagaatgtggtaactcgacgaaacatcgcgctccacatgcacaattgttgcctccacttgcaatcccggcacccaatagccgcccttttgccgttcgtaaatggtcgagtacggaatgtacccgcgacgacgcctcggcgtggatttgttggccaattcatcgccaccggcgctgtaatcgaatgaggcgtcgtccaccgcgactgaggaaggcgcttccatcgcccaacttaatctgctgaaatggaaagtgaacgaattaataaacgcattttgattggccattcgcaacaaaagtaattaatcaaaatgacactttttaatcgaaatggaagggacaagaagagtttgtttaaacgtgtgaagagggggaaagagatttaactgttttttactacactcataaaatttgactgtgaaaatgaaaagaaatggaaaagggaaggacccctcaccctcccaatgtgtacatatgatcggtgcatgggatgattcacccaaaacaacacctccgatgatttcaatagcaaaagaaaatcaaaaccgctaatcgcaagcatacaattagtaaaaacagaaagtatcaaaacttaaaaaagcatttaggtactatttccaattctgtatttggcaaaattccttgtatgttattatgatttattcatcgtcttttgtatattacagtagtatcaatgatgcaatagaaaggcaatatttggcatgggtatctgtgctgggcgataattaataatattttgaacacagtaataggcgatgcaatgtacaataaacaatcaagtgggagtaaatgcacatgaaggcggaagagatcattttaaatactaaaaagatgtcccgttgatcttgaacagggtggccgggtcaggcaatttgctcttgaactgttcgacgcagtgactgagggaaatctaaaaaagaaattttgcaatattatatatttttgagttgttttctattaaaatcttaatcctctctaaattttcacctctttgatgttgagtttggcagaggcgccgattttgcggtgtccaaagtgcaattgggcagacttagggtccactccgcagtttgctggcaactccacgcccttcacgtaaatcagtggctcaatgccgcgctttacagccggccatacatcgtccttgatcatatctgcaattgcataccaatcaagatttcattattatagtaattgtttcgccattagcctcaccctgcagcagttcctccaccaccggcttcatctgtttcggaaatgctgtcttgtttttcatgtcaattttgcgctccttcaggttcagctgcgtgtggaaaataccgtcccgcacttgtgggatcagttgcacggccagagaaagtgtcagatcgatggccgttttcttctgtccgctctctccaattgttggattctcaacttcggcagcaattcggttgtgtctagaaatcagccaaaagacaaatttaacgtagtagaaaacgatgcgttgtacattttgatcaggatggagtcgtcttcgatggtcatactgggaagtccgtcagccgacacgttgaaaataaaaatgcactggggacagaggttggcaaaactgtaaacaaaattaattttttcgagcagaacacaggcttggagaaaaattagctatttatgccaaatactcacaagtcccgcgtttcctccggcaatctcgagctgttcagtgggatcttctaaaataatattggatgtaagtggaagcatctgacaataaaaccactcacctcttcgataattttgaagtcccatctaaactggtgcagcaattggttgagcactgtctcgttgattgacagcatcagtcgttcggacacaacgccaccatcagtaccgacactgtcaacggaaagcacaacaatacattatttactcacaatggcagaactaacccattcgggagttctggcagttcagtcgccggaggtgtcgaccattcgttagtcacaggccaactgccaatagcaccaagttgggtgatgccatcattgtcttcgtcgtcgacattgtttgcttcagttgatgaaagcattgccggctgatggcgcaaggaattatcaccggaccattcaatttgaacctaaagcaaaagggaatcgccacttccaaattggcagttcaaagaggaaccgaagggattaaatctatttttaaaaattcaaccatttagtagaaaatgaaaaacaaaccgtcacagcaagttggtctctgtctgcaatgactgattcaagtcgtgagcgaagtcgaatggatggcgagcgcaaatagggcacaaattcttgcggaattagctgtgcaaatggaaaatcgctaaaagcaaaataaaataagttgacatgaaaatttaaaaaaataataattacaataggaatttctccgcgaggttcagaacagtgccgtacagcatagaacacacacactcgcgcaccatcgacgcggacattgtgccacgcactgcgccccaatgcccatgttgacctgca

SEQ ID NO: 16451 - DNA, 1693 bp, Heterodera glycines
ttaaacccagaaaaatgcaacaacaaaaaaaatcccccaatttttttgtctaagattttatgcctcacctacctcctccctcgctcccatttttcccatgccaaaaacacccttgccataaaagccaccactgctggtatatttatatccttcgaaatccaaattagattctttttctacaaaaaatgtgtgccccaagccgaaattaatatttttccatggattgcccaagccaaaaaaaaaaccttcgaaaatctttggattttatttcaattttttattcaactaaaatggaacaaaaaatttaaattatttacagcagcaaagctcattaaccgtccaattcattcacatttttcttctctatacgctatttttgaatttgtttgtgccaacatcgtggcaattctttacccctttaacaaatgcaaaaaaaaaaaaaataaatggtgaatttaaaaagcgaaaaataaaaaattccaaaattttatgggtttataaagcgacaaataaaaattccaacatttcgagtaatttctttcattttatagcggtaattttgcacaaaaaaacatttatacaaaatattaaattttttctaccaaacatatttttaaaaaccaagctaccttttgaggggcctcttcttgaaattcaaaaaacgattattatagttttttgatgcagaatatttctggaaacaaaaaaaaattaacaaatttctaacgaaaataaaaatgctgaaacactttttaccatttgcctacagtattccccgtgccaaaccacaacagtaccgtagtgacggcatttggcgcccaaattatcaacaaatcaaatcaaagcgcaatccacaaaaacatttaattgcgcaattaacattttttccaagaaaattgggcattttttttgcctttatttatttattttccgacaacacaaagagcaattattattattattattatttatgtgttcgcctcctcattctttgatgggctcaacatcatcacacaacaaaaaacaaataaataataattcatttcgccaccgaaattatttcttattacaacgaattccctgccgatgatcagtgctttgcttgctttgcccattactgtagcatttgatcacacattttgggccaggcccatccattattcaattatgatcaattgcccacaagctaattatcgcatcatcattcattaattgctgctgatgtgcgacagatttgtttaaaaagtgctcgtgccgtgccggtccgtggcattcatttcttttatcatcgatgaatcaacaaattttcttccggcagaattttaaatatttcgcttattagtcatccaaaaaaattatttgccacccaaacaaaaaattcgacgaaaatttttcgcttaatatacctaataaaattgaagccagtccatttaactcacggaatccgaaaatttgcttatttttattccattccaaacggcacaaaaaaaaaatgattttgccatactgtgtcgtgccaaaatgtacgataccgtaccatcaaaccaaattattgctgctcttggctcacttattgtattttattttgatttcgccgctggcggcgggcgccgactttcgcctccaatggcaccaaatgaattcacggcttgttcagatgcgcgcccggcccccgtgccgtgccgtaccgcgc

SEQ ID NO: 16452 - DNA, 1583 bp, Heterodera glycines
aaacttcgggcttcacaaatgactgcctttcaagcaatttttcacgatggactgttgctgctggggacagaaaaagagggaggaaatgaatgatgctctgatcagatcagtgatcaattaattgatcgcattatttgtaaattgctcaacattttcaatgatttattttcatttttcttcaattttaattttcctaatgatcaaataataaatgttacaagttacttatgtaataattcaatttaatttactcattctttagaaatcatttttaaaacttttaaaatgctatgtcattttgatcaatgacagcctacagtgagaaagaagccccagtttttttcgatttccaaattcggacaatgaattataaaggggggaccaccagcgtggtaataaaacagtcccattggacgctgctgggtacacgaatcttcgagaaataacaaaaaacaaaatctcgacaaattttcaaagtcctttgaggaggcgcgtgctgccgccctcctcgcaacggatgagtgtgcccatatcacttttttgtttgtagtcaaattctgatttaaaaaaaatggtaaaatttgtgggttataatttatttatttaaaaaaaaataaatgaaaattgtcaggcagaattgtgaagaatcaatcccctggcatttgcattgcttcacccaatgcttttgctcttttgatctcccccgcgggggagatgcgccgctcccggaggtaagtgcaataccgggccgacgcgcggtcgagagggggcaagccccctactgcgacctttttccaaaaattggttaatctctttgaccccggtaggggtcgttacggagattaagccgtaaagaacagatttaagtttatttagcaaatgcttgaaatgacaataaaattgtgaaaatacaaggaaatgtaaatggtgtgatcgggggtcacaaacattaaatgatgggacaaaatgatcaggaagtgaatcaaaagtgcttcgggtggtccctccgcacacatccatcaatccatcagattaggccggattatcctgggatcattcgggctgggtcgggcaatgtcaatcgctctggtgccctggtcaattcggtgcctcgccgcggactccttcgacatcatcatctcggaactgtgcaacaccggtcaaatgttcgacataaatgtcacgactccaacgaatggcatcggagaccattagccggcgcattaattggcgataatgctggccaattttcattttattgaggacaaattcgttgtgcgggtcccaaccgccgagtggtccgacaatgaacgcttcgagaagaacatcaaagccaatcgcgcggtaatgttcggcaaggtcttcgtatttctgccgtttcccctgccggcacctttcaaacgcttggtagcggttttcgaatggcattgccacgtcaatgatcagcgccgttttgttttgttcgtcaacggccaggagatcaggccgaacggctgcacccaacccgggcactgtttggttgactctaaccacggttgttggtggtggcctgaaagcctttacaaggcggtcaaggatggcat

SEQ ID NO: 16453 - DNA, 2568 bp, Heterodera glycines
  unsure (1)..(2568): unsure at all n locations
gcaccgccnggccccccaaaaaacctattttttcttaaaaaattagccaaaaatctctaaaatttggtaattctttagacaaaatctgtgtaatttatgccaaaaggaattgaattgaggcgatacattgactaaaggaatgtggagccatcacatcattcataaaaaattaattttttgtaaaattttttggagttaattcaaatcaaacctccgcccccgcccccgcgggggcggaattatcgtgcccccgtccccgcgactctgacccccgccatcccccgcccccgtgaaaagccacccccgcccacggggtccgaaccctacaaaaaaccatcaaacgaaaagtttagatagaaaattgttcgtaacttcgcctaaaatgaatcaaattttaaattgatatcattcgatggccctaagtgttttctattatcctgcaaaatttcaaaaaacttttgctatcgaataatatcaaaatttaaaaatttggttgactttgagcaaatatataaaaaaatttattttgacatttttttgagtaacgtcatagcaccaaaaaaagtggcgaaaaattaacgtgtaaatgctgagggcgcaaaaatggagggtgtaaatgttgacttacccattttaagtggtaaaaaataacctttccacttttggcattttttttttgatttagattaatcatttttgagaaattaattttatttaaaaaggttttcaataatttaattccaatttatttcattattattttttattaattaaataaaattgtgttattattccttgtttttacgggttcaattctctgctgataactcactgttagccgacatcaccaacgcttggtgtattaattggcacaaaaaagcggggtgattcatagtcaaaaattgacatcatcagagttcggcacagatattgacgggaaaaagcttaaacggaaatgccaatgcttaaacggactctctcaaattatatttcgacaatttattggaaaatttaataaggtgaatatattttttaaaattaacactcaaagaaatttaaaatatgcttttattttcccaatgttaattgacaaataatttaatattattccgttccttttttccatcatttgtttctttccatccattccctttttcgtccttctttaatccgatcagaacccgttgaccaatgctggtggaaaatgaaattcaaatatttttaatttcttttgattaattttatttttcattttcgacaatacggacagagatttaagatagtcatgtcccttttcaaatgtattttttgccgaaaaagcattggaaaagctgaattaaccaattctgtacatttgtcttttgacaattaagcaccgccttatacggaactatgcatagtaaaagatgttgacaacgtctcatttttatgaatactgtcaccattaacgcttttcttttaaattgctccaaatttatttttgtttcaccggaaagaatggcagcaattaacacggcaaaaacgatgcagccgatgccaaacgacgtgtgcaagccgatcactccgcttctccagtcagggcgcctaatttagcgatatcgatgatttgaatttcaaaaaacgcattttcaaccaaagataaatattatagaaaatcatcagcctttttcctgtgtttggcctgagaaaatccagaaaaacccagaccttggcacaagcccaaggtcgccccctattcttttgaccaaggccgtagcaagacccttggcttcggggggggggggggcagaagtcaaaaacacgatttttagggatgttttttttttcgtttttttgaaaattcgtgaattcattaatttttctacaaaatttcaaatgaaccgcaaagtcggttctaaatggggaaaatatttttttaaatgaaaattttgaaaatatgccttaaaattgttgagaaaatagtgatcgatcaacaacaaaaaaacagccgatcaatgggatttacgcgcaattgatcagacaacttgagcggaatgagcatattttgtgctatgttggaaatttaaaaaataaatatcttcttttttaatgggttttattatttattgacctaaatttttccaaataattgtatccgaaggttttaaatgatacctaatacccattcagccatttctagcgatcggaatttgagtcaaatgaccgtaaaataagttaaaagcgttctttacaaatagcattttatttgacttctttgcacttttatgacgtttttacctttttaagcaaaaatatttaatgtctattaaaaataaaaattttcagagtcccaatttggtttgtaagaataggtgaaagacaaatcaattaataataactttacctcaataatgaatttcttaaaagggccagccaaccatcgacagtatcaacagcgggggtggcacggaattccgattacggcatttttggggtcagaattccgatttttggctgttgttttagagtaaataaattttctaagttgtagaacaaaatttcaaattgaaaattttatatacacaaatc

SEQ ID NO: 16454 - DNA, 863 bp, Heterodera glycines
  unsure (1)..(863): unsure at all n locations
aattnntggacaatttgcgtcgccacactttgccaacaattctcaccgatctcaaccaattgaattcaatcaacacctgccattgttaccatgacctggtggctgatgatgggccaaatgcaagtggtggccaagcattggccaaatggttgcgcatcccatgaaaagatgggcatccgaagcgattgcgttgccgtgctcataaattaggaaccattgcatgggtcaacaaattcagagaggtcgttccaatttttttacggcattaatcacttcagtgactctcattttaagagagaccaaccaactgggtttcgttgatttcttacaattatacaacaacaacaaaaaattcgcggttcacaaaaaatggtggcctaaaacctcaaaaactgacttttttggcttttcggcaccgagtgccataacttttttatttttgaatgattccttttttgacatataaattcaatttattcactcgtcgattggaaaaaagttttttgttaacacaacaaaaatttattccaacaaacaaaaaggtcttcctttccatcagcaggtcacagagctgaattaggagcatcattaattagcattaatttttttttgtatttttttggcacttacccgcaaaacattcggccaatcggcctccaactcctcctcggccgttctcatggcccatcgctctaaccgccggacctcccgccggacgaacgccctcttctcctcctccccttcaatctcggcccatcttgtggacgttacggccagcttaaattatttatttgaatttttttgtatttgagctaaaattaaacggcaataatgngttttactggtcccaaacattttttttt

SEQ ID NO: 16455 - DNA, 1127 bp, Heterodera glycines
tttttaaaacattattaaaattggaccttcttttgcatcgcacaataagtaaaatcccaaatatttcttctcatcaatgcctttcgtaatttctgcttcaattttccattcgaatccatttatctccacggcatcactgaatctgcttctcccgacagactctcccgcaaattccgacactttttcaatttccaacgcaagtgtcctccttcggttgcttttggctttgttccaatcagaaattcgtccatggcttgggaaatccagcgagtacagcccgggcactccacgaagatacagaaacggatgggaattgaactgataaacgccgagcaattctttttctgttaacacatctgatggaaatctaaaaaaaaaaaattcaaaattgttaaaattccgtgactatgcccgtaggcatcgatggatttgtgaaaggtttataccgatgcatttggcaaaatcctcctcttggatatttggaaaacgaattttgaacaatgccgaaccaagcatttcgcgtcgtttttcatcgtaacattcgatgcccttttggcggcatttttcatcggcccaatgaattgcctaaatttaaaaaaaaactaacttaaaatacaaatgaaaaatttatcgaatttacagcgttccaaatttcaaattcatcggtgagcaacaaacggtcatggtcgagaagtacacataatatttcctgatcaatttgcaaaaagatctgatttgaacaattgggccacattttgacaaatgaaacgcaaagatttgcggggaaaatccttaaaaaatgcataaaattaccgaaaattaaacaaaaatggataatgaaaaaataattaaaaataaattcatccttctcacctccaatttgaaaaggagagcttgggcataagccaagaaaactttgcgcaatttggagattggaatttgcaaagaccggtcaacaggccagggatgttatactttttggctaattaaataatttaattgttttttttttgtcaattaaattaatttcaccggcgaaaaccactgccattgcattgaatccgttcaattaactcaaatcttccgtgtaaatgaagctcagcatcactttgaacgctgctgcttca

SEQ ID NO: 16456 - DNA, 707 bp, Heterodera glycines
  unsure (1)..(707): unsure at all n locations
tcaaattaataatgcaatactgagggctataaattaanttagtgcaattaactgaggctatcgtnaacatcgggtcataagggtgcaaactcaaattgctcaaaaacggtcggaatcatntagttcggctcaaaacgaggaaagaatgtaagttaggggtgcatttgccacttttcgtttaaaaaaatcgggtactgaaatattcactttcaaaaggtgcatgtattagtaaattctaaaaaaaaaatttcgatgaaaaatcttttctatgagtttcctttccgacattttttggagcctcggaatgtcatccctggtgtggagtctgttttcgtgcttatttttgggccgttttaaatcgattccgatcgttttagagcaattttgtgtttggccctatgaccgatacttgccaatttgggctaattgtagaattaaatcaaaatggcattttttaccattctccgctttttctttcttggcgtcagaattgaacattgcctcaaaaacatcggaagcgttcttcaaaatgagttgatgtgctggcaagatctttaaaaaattgggaaattaattgaaatttaaaattgaaatttaaaatcaaacttgcatcttttgcgtctccgtcccccaccaaaaagtgcacatccgaatgctcacccgtgctcaataaatgtttcatccgttccatcgaatttcacaacgat

SEQ ID NO: 16457 - DNA, 2655 bp, Heterodera glycines
ttttgcattttgctaagaacttcattttaacaaaagctattaaattgaatctctcgactcgaacgcactctcgagcatcgctaattgtctcaattaattggcgtcatttgctagttttacccacttcatattgttgtgtttcggtcagcgtatggtggtcaacatgtggcgctttgttctgttcatcagtagtatcggaaccgagccaaaaagtgctagaggtgcagcacagtgcaaacagaatggcggccaagcagttcagacgccaaaacatagcgctgattaattataaaatttaaatttttttaatttaacttaaaaattcttaaatgcgccaagtggaagaaaatgaaaaaataaaattacattttcggcaaaaataaaacaatttcaattttttgtatttgctcaaaagcgtaagttttctaatttaataataaaataactgaaataaaaaaataatttcttgttataattttttttaactttgcaaaaaaaaattaaatattacagctaatatagaagatttctcgttagatcatgaatgatttggtgaatgataatttagtcactgtaaacatttcatgaaaaaatttttccttaaaaatttcaaaaatttgtatcaattaaaaaactaaagcttcaaacacaaatttattaaattcaaatatttgctaaattttttattttaaataaaaatgtatttttgtttttctattcccatgcaaatctaagaaactcggctgaacgatcattgacgtaatacaattaacaaataaaggagaaaaataagcatttcccaagaaaaaattcaatttatttattaatatcattcgaaagctttgaatggaaataaaaaataaaaaagacgacccaaaattgaaactattaaaaactaatttggttacaactttattatcgatttaatttttttaattatgtagaccaacaaaaacacttagagctaccaatgacatttaaatttttgttaccagtgatagtaaaatttgtattttcaatatgaaattttattttttcaagaaaaattggactctgggatttttgaaaaccagcaaagcagaaaatacatccaaaatccgtgattacggaccggaaaagttatccagagccactccgatttagaacactaatgacaaaatcaatttaaattattttgccaccactgtgctgggttgggcaggtagcagagtacccctattattgtgctaatccttcctttgttggtcgagactgagagtcgaaaccaacaatttccgtagaaggaattatgctgagaaagagtgggcacaaggtcgtctcgagtggatgtgagaacaaatccatccgatcaaaacaggtcagccatcaacattaatcggtgtcattcgtccgtcaattatttaaatcaaatctatcatgtgagagctgcgcatatctccttatccaagcaatacctgttcaaaaatcttagtcccaattgattgatcacagggttttttttttaaatctgatcatgaattcatttggaaaagaatgcgaggttagggagtttcggtaagacgagcccttttacccattgttaattttcttttttggtaaataaatttaaaattggttaaattaaaatcaaattggatactcaccaattcatgttgtagaggtagaattttgcggatttttagctaattttaaaaataggaagccaaaagattggatcggagaaatgcgcaacacccaaaacgggacgggacgacttttgctcaatgtttgcataacataaatccacttaaagagcaattataggacgagaattgggcacattttcttggttaaatgtaccagatttggaaaaaaattatttgtagtagacaaatttactcaaaagcaaccgaatctttcaaatcattcgttggctttaagtgttatttattagcatgtataattttaaaaatggataagtttcaaataaaataagttgtaaccacaaaggctcacaaaatagctgttctttatcgaacagaattaagaatggaaaatttatttgcttattagaaaaaaactcccacggtaatttgatgaaaaacgaccaattagcaaaaaataatgttcgatttaaaaaataaataaatattatcaaaaaaatgtaatttatttatatatattaatttttcaatgactgtcaatttatgaaatatatttattgaagaaaatttcatttatcccgaggaataatggtcggaggctctaatgaatgaatagccttagggaatgaatggccatcatatttatttatttgtaaaaatgggtagtgaaaagaaaaaatgtgtcggctgttgtggtgacaccactgccgccatttgtccgtcccccgaggggccatcgatcgacgagcgccgtctccggcgccaatgctcctccgcctcctcaagttttgctgtgtgtgctttgctgaccttcacataattcagtcccaatcaattggtgctgaaatggcgtcgcggcgaaggaaaagcgacggtggagaattttcaagaaaactttttttggctaattatatcaataataaatagggatagtgttatatgttcctaaatattccaaatatgcaatacgcactaaaattgctagaatatacattaaaaacccaaaaaaatg

SEQ ID NO: 16458 - DNA, 1060 bp, Heterodera glycines
attcaaaatgccaccaatgcgatgcccattgcgcttcccctttcggcatcgtccgggtacgcctgggccaacatccctaaaagggaaaggagcacacatacataaatgaaatggttacagcaatttaaataaatgaccgtacccattcctgaagtgctggtacaggcggaaccgacgccttgcaaagaacgggcgagccaaagagtgaagaaggaagtgccaaaggcgaacagcagcgtggacagaaacatgattacgaagcctgaacatggaaaaaactataaaaggccagaaaaaagagagagagaaaagagagaaagggagagagagagaaaggaggaagaaagagagagagggacagggagagggagagggaaaagagagaaaaaaaggtatcgaaagaggaggagagggagccaaaagagaggcaaaatagagcgaaaagagaagcgatttgccatttgtccgctcaccggcaaacattggcaaagtgtagccgattctggcaaaatttaatcagaattacttatcaagaagtgaatgtaaatgtgtatatgtactgacttgttggtaagtggtccaatgctgaaaagggaatgaaaagtgttcctccgtttggcatataatttgacaatttagccaatcacccgcccttttttggccaccaattccccccccccccctccgtccctcttacagagggttggccaacagttggaccaatgcctttgagccgaacataaggccaacgtgcacattctcttccgttagtgcttgatgcctttccaattgtttctgtacacgaaacgctgccatcgctttttgttggcgatctgtcattggcaaagaaatttgattttttaaaaatgaattaagtgcctgctgccaatgctttgctgctaacattcggccgtttcgacgcctttggccgacccatgggtaagtgcaattcgtccaagggactctgaggagggcaagtcagcatacagatcaccataaaaatagcgaaccccgatgctgaactcatccggcaacgcctcgtactcgtcgtccgtgtcgt

SEQ ID NO: 16459 - DNA, 1826 bp, Heterodera glycines
atgtccagctcgctgtaccggttgttcagcaacatatccgttgagtttgggtgctgaatgcgcagcaaatattcgggaatgatcggcacctaaacgaatcggaaagagtgagcaaatgatggggacggatggcctttgcttttgcactttaccactgtggtcaacaacatgttgtccaggaaaagcgcaacgtacacaatgcatagcaacacacgacgattggaacggtacttttgcacgaaggcatccaaccaagcagccattttgaaggggaggggtcgaaagggtaattaagagtaattaagggtaattggggaatgccttaatgtacaaaattctcaatcaggtgtccactcaattctttgcctgttttctgcccattcccaaaatggcattttattttacagcgaaaggaaaaagcgccaaaaaccgacgaatggaaagggaccgatgctggccgaagatttagaacttccgacgtattttgctgcacgaataattcctttaggttgtcaaattctgtgcccgacaaatgctgaactgtgccgcccccggggcgggggaaagaatgcgccgccggaggaatgccgccgcgttccttcccccccaatttttgtttctgcctaagggttttgtgtgccggcggagtccgtccgagaaaatcctacaaaggcgacgagtgcatgagaataatgcgaaagaggcgtgtaaatgatgggaatgggcgcagaatggggcaaattaccactcgtttggagaggttgcggccgggggatggaatattaaatctgacgggggaggggaaatggggagggcaaaaagggagtgggaagggccatggcacaaattggcccggacgccgagccgtatccaatttcagcagcaccgctttttgagagtgttggcatagaaatgcccgattcggacggcacaaatcagaaacaaaaacaaaaacatttgaagtattgctgaagaattgctggattctgataaaatctgtggcgccgttttcagcttttctacttcaattgcttaaccaatttcatgccaattttgactccgattttatctgttaaatgccaaaattgacacttttaatttttgccatttctcaaaagcttttcggagtcactcgcatgctattctgccagaagcacggagctcaatgaatgaatttttgagtccaaccatttttgcgtgggaaatttttttggttggagaaaatggcgtggcggagggggaaagggggggaggggaggagtgatggcacaagtgccaatgccatgccaatactaatgccaaggtacgctccaaccgcacctttgctcatgccaaattcctcccccaaagatttcccctccgtcccgacttttttaaattcgttgacaaaattaacgcatggatggacaaggagcgcaagaagaacagaagaaggaaaatgagaagaagcgaactgatgaagaagtgatgagaaggcatttaaagaaaaatgaaaatgaaaatgaaaatgccaaaaaaggagagaaattaaatgaaagagggaaaagcggtgaatgaaagggcaaagagcggagatgaatcatcaaaaagagagaagaattcaattaattttatatacggatgaaaaacaattggcaaatgtttctctttttgataaatttgccattttcatgagaaattctgtaacaattaccaaattttacattttcacacaaaatacccatttattttgcccatttctgagcttccgacggaacgccgccgccgtcccaaaattcttccaatttcaatttcattgtcggcatttctctttcaattttctgaca

SEQ ID NO: 16460 - DNA, 2800 bp, Heterodera glycines
ggatgccggatttgtttttcataaaactgattttgacccaaaaaacttttttttgggggccaataattcctgaaatttatattttttaattgggcccatcttcaatttacaatccgctgaataaccgttggtacttattgttcatctgtccctgtgctttttttcgtgcttttttcccgggactgatcgaccggaacaagcaagggtaaattgatcggggggatgtgggaaacaaaattgattacattatgttgaaaatgaaagaacgtgattcaaaatagtgctgcactgaaaactagcgggaaaatccctgtttttgttagattctgtttctgtaattttctcaaaaatgcagaaactgaactatttcggcaaaaattttgcacgggtcctgtttctgtcctgaaactcatcgcttatatgaatgcatttttggaaacaaaaaaaaactgatggcttttcctatattgctttgtatgagattataagctgaaattagcctgacaaaccaatttccagaatttccggcgtgttttggaagtgcgcgcggattggcgagcgtctctctttgtgggtttctgccggctgtttttgcatggcaatttatctgctcttctgaacccaaatggaaaagggtgcaaacattttttaaatgtcttttgtgtttggattttgaaatacttttctaggacttgattttggtgctcgtagtggacgattggacccggtcgaatggaaaatttgtcggcaaattcccccgcgttttcttccggaaaagaacgatgtttatattacaaagtaaggaagtttttcatttagggtcaaatatagagagttttacacctttaataaaagcaaaaaaatgaattcccattttccataaggaagacaaaagtggccgctcagttctttcgctgcaaaaaattattggacacgaaatttgatgaggtacgaatccatgcgcttggccatgccatcggtcgtgcgctgagtttggcactttcgctgcgcgacgccatggccggctcagtcaaattggacgttcaaaccagcactgtacaggtgagccaaatgacaaatttaccactaataaaagttttataggaatggagtagtaaaaaataaaaataacagccatcaaataaaagggcctaattattttttcaattttttgttttccttcgttcaggtctctgatgaagttcagtctctgtctgattgtgatttggccgatgttcgccttcgtatggtttcttccgtccatattttgctttctcgcgtttgactgtttccaatttccccgtttattccattggtcattgtgtgtgtgtatttgtttctcatttgttccaataaattgttggtttttgaaatgtatttcatggagagttaattttgccattattttcctcaatttaaattcatattccaattttgaccctttgtagtttattaaagtaatgttctcgcggcgaaatcttttgctttggcctggtcaacggtgagaggttttctcgagacatttctcttcttgtacttttaaattcatttagtctgctccaccttaatcggccttgttcttcatctgtgattaaaggtataaaaaagggacacataccgaactaagagggcaaatttccatgtcccaccacccgataatcactgaacaggaacctgactcattccgcacccaattccgaacctcgagctaaatttcaaattccttttgtttttgcttaatttttcggtcccaatattgctgtgattggttcgggcccgtctgggttgtatgtgtgtgctcgactgcttcagcggttgccacgttgcagaatcgatgtgtttgacaaggcacaggcgccctacggactgattttctacggggtaattcggctttttcgagaaatccataatatacttccgttaattatcaggtggcccccgaccattttgacatgaagaaaagcatgaacaactttgagcgaatgttcaacgacaaccgggatcggattgagctgttctgcaacgtggacatcggtcgtgatttttcttatggagtgagtgagaatgtgaataaagtttgaccaattcttacgttaaatgtttataataattggttttgtatcattacaaccataaaataaataactccctcccacaaaattatcgctgcattttaataaagtttgtcttaatcataaaatgagatttacaggaactttgtgacagttacgaagctgttgtgctggcgtatggggccaaccgcgcgcgtcgaatgtccattccgaatgaaaatgccgccaattgtttgtcggggagcgcttttgtctcgtggtgggaaataaaaaaaggaacatcaaaacattccacttgtgggcaatcagttcaaaactggatgactttcttataaatctctaaaatacttttttcaggatcttttaccccattttatgtgattttgagacaaaaatgttttcaggtacaacggcgcgctgttgagcagctccgagccgctgttggacactgaagatgcggtaaaagacaacctctaattgaatttgtaattaaaatagtttttattttgtcatttttcttaaaaatcccaaggtgattattggcaatggcaacgtggccatcgactgcgctcgcattttgctctccgacccggacgtgcgcttggccggcaccgacatcacagagaaggcgcttcgtgcactgcgacagtcgcgcgttcgacgcgtgcgcgtgttgggccgacgcgggccacaaaacgtttgtactgaaccaggcccgggttaagggt

SEQ ID NO: 16461 - DNA, 3900 bp, Heterodera glycines
atttatatggtgttttataaaaattattattttgcagcttctaccaagcaaccgaaaaatgatgatgctaattatgctgtagaaagtcaaaaacaaaaagttcgagcatcatcatcaatagaaatttcagattcatcttcttctggtgtccagaactctgatgaaaagcggtacttaaaacaatacttattcctaaattttgtgactaaacgtctcaaaataattaatcaaatagtgaagaaaaaggtacgacggcattcgtgactactggacatttcgcctactggaaattttgcctactaaagcaaaatcacgctttttctgtaataaaaaattttattttctaaatgctgctttttctctgattccgattttggattagttggtgagatattcaatggtcgaaattcttaccagtgcttatgttcaatcctgatcctgtcggggttgaaaagtcgcgatcgggatttgatttttttaaaaccaggaccgggattgggttctgaaagccgggattacgggaccaattacagtcgggaccttgatcgcgtgcaaccctaatttaaatccgctttttgtttaatattcaactttacctgtcctactttactaatttacaatcaacttgctttcagattcaatgtggcaacattaaattgcgggttttttcttttataaaattatcaatacaataaattttgaatggcaggcttttacctcttccttggccaatcggaaggaacgacatacaattccgtttgttaaaattgatcaatgagctcaaacattcacggcatgacgtcattgccttgcaagaggtcggttggggcagttctgtaaggaagaagctggctgggcggttaaagcgcggaaagcgggggttgataacatccgtaaaagaaagtgcggatgtgcctcggtagctcaatggtagagctgcccacggaaagggtgcacgaatgggttcgattccaacccgaggcctaacatttttcccattcttattgttcctttaaaatgttttttcttaggtatggagtgaaagaatgttccttcaagttgctcacgaaattaacgaaattttctcccattcgcactatttccacagtggctttacgggtagtggcacttgcgtgcttagcaggttagcagtgaatcagggcttggcgtaactggattttcaaatacggaaatccgtaattacgcccagctctgcaatgactggattcttcagcacttggtttttcatttgatttaaggcatcctatagtgtccactttgctccacaaatactccctcaatggctttcctcatcacgtccaccggtaaaatatttccgaataaaattctcaaccaattatcttatattcttaagcggtgattggttcggtggtaaaattgttggaatggttgagatcatggtggagcagtaccgagttgcattttatacgacacatcttcacgccgaatataacccagagaacggtttgtgtaatattcaaaatgaagcggctgtggtacaaatttcactccgtcttctattgaactatgattttttgatgtcacaattcatccgtcatacctcgcgggggtttgtttgtactgtttatttttaaattgtttttttatactctctaattagacatcttgcttttaggtgctgatttctagttgcggtaggcgacttcatggccagaggctcgattatgtaatgtacaggagtggaaaaagtgagttttgtgaggcaatcgtaaagaatgcgacacctatttcttctttgtttagtattttgtaagagagatggcgcacggaagatgcgtcagtggaaattttaataacttccaatagcaagatgatttaattagattaaatttaagctaaatgatgatttattatagagcaaataaattgaaataataattaaattcaaatatttcaattcattgatacttctgccacttcggctcaccacggacgtttagattaatttgatttgtttattttgccttttctagcggaacttaatctcgttgagtgtgtcaattgcttcaacaaaattcccgggtctgaattgaatttttctgatcacattggcgtttctgccactttttcgtttgtcaaaggtattaaactctgactgacaatgaatctttttttcaaactttagaaaaagtttcagaaaccctttctgagcgaatgcggcaaattgtgccggagaaggaagttttgactaaatcgctcaaaataatagaggagggcgaagttcgcgtgctgggggaccgtcggctttttcttagcctctgtgtggctctaattgctttaactgtcgctacagctaacatccatttgaaagtgccatacttttaccctgccgtttgtatctttcaaaaaaggacgaaattgaaagtttttctttgtttatgtcgcattgttacggtttatgctccctttgttcataggcttctgccttttgtacggtttcattggtgcgtttttttaattttttgcttctatacttgggaaaaccatcgattattattttgtaaatttaggtttgacaattgaaatgaaagcactgaaagaaacgaaaaattctatcaagaagcttttgcgttccttgtgaatttttatagacttataaatttttaaaggtctcattcggtgctaggtcgtaatataaaaactgtcaacatgggcgtttcgtaacattgcttacagatttttcgagaaaaatccgtcataatttttcttaaacaacaccaaaataaataatcttggtattatactatagctcttgctcttggattgctctattatcatcaaaatcccagaaaatttaattaagtttacagagctctgattaaaaatgtttaaaaaaaatagacctaactttctgacaacttaatgaaatattctgaactgtttcatgctaatagagcactctaaaaggttgatatcgactatttaattacgttgtgtttaagaaacttatgacggattaatatgcgcataaaatatgcactaaaaatccaccaaatatgccttaaaaacccgaaaaatgtacaaatatgcactaaaatatgccttaaaaactagaaaaatgacttcgaatcatcaaaaaaaatgccaaaaattatgtaaaaaattcaaaattgactttgaaaaaaccaaaacaatgactacggatcgtttttagacaatttcgaatttttttttaaatgaacaaatttttttcaaaactttcacaaaaagttcaattttctatcattgatacttttgtaatttcgtttcaccacaataaatttgcaataaatttataaattttttgtaaaatataaatagttttataaatgtattaatgatcctcaataaaatttttacccgtttgattttttaatatttaaaagagaaaatttattaaaaatcctcaattagtgacaattttaatgctataccaaatcaacaaaaaacagagggggaaaaacacgcttttccaaaaattcaaaatttttaaaacaaggtcgctgtggaaaatttagaatccaataaattaagaatttacatgcatgtatttattaataagcattttttatacctgagtttttattcatctttaattaaataataaattttcttaacacattaatttaaatgcaaaattatgaaaaaaaacatttttaaggaattattaaaaatgaatcgcttaatcatcgttgatcaatcctccggcttctaagtcgcgcacattccgttattaggctataaaaaagaaatgaaaatattatcgcaaaattttggtgtatttgaaagtttttccaagatcatcaaatttttaaaatccaaaccttataattcttttatatatatttgtttttttttgttttaaatttttattttttt

SEQ ID NO: 16462 - DNA, 1781 bp, Heterodera glycines
cggttcattaaattgctcggaagtgtcggcgtagccctttgcacttggcatcgtaataaagtggccaagcatttgttcaatcttggccagacgtctgtcaatgctgctgcttgacaaatttgagccttctaaagaggacaattggcaaagcaattaccgtaaaattggtcaattaaaacggtatgataatgtaagaattaagccaacttttttatactatatccccttcacatggccgtggaaaaaatggcaattaattttatggcgccaattttgtggcatttgtaccaaattttgtaaaaaaaaaaaattgctgaaatttaatatagcaaaatctgtacctgtacttgtatatatgaaaaatgccaggcatgttagacaagtacaggactaacacccgatcttttgaaattttacccgtttttcttaggggtgattcctcctcattcagacgtgtgtcagccgacgtggatgccatgccaacattccccgctgggccagtgccaatgtcagaaacattgccatgttcggcattggcacggttccgtggtgtatgtacagtttcttcttcttcggcagttgatgactgttgcttcttctttttcttgattttattaagcgaaattgaggaagcacaaccaccggccaatgtttgatgaacataaagcagcacaaaaaggaggaggaaaagggcggagagaaaattgcgctgcatttttacctaatttaagcaaatttatttaagaaagtgccaaaaagtttgtgggaaaaatgccaaaaaattaaatatgttgaagaattaatgaaattttaaattattaatttcaattcaattagttaaaatctaattcaattttatgtgtcatatttaatattaaaaataattttaagctaatctaattataattgtaaaacatttaattatgatttttttataaaaataatataatattaatttattttaattgtaaaaaataactgagaaaatattttttttgcttgtaatatgtgcattgaatggtttttgccacgttaaattagtgacaatgccaatttatttattaagaaagtcaatgttttcaaataaaaatttcagttaaattattttttttagtattttgccaaggttcggaagttaaaaatgaagacataaattatttaattgatttaattaatttgttttattttgagttttgacgaaaaaattttacatcaaaatgaaaaaaaatttggattgaatgctaaattgttaaattttcggcaaacttttgaaaatttttgggaaaattgttgggaacaaattgaatttataagatcgttagaaaaacttatataattttttattataaatgtgaaacatgacaatggccaagtaagagaataaactttcatagaaaaatatgaaagcattgaaaataatcactgagttgtgccattgttttatgccattttccgtcccctccgtccgccactgatcgctttgttcaccgccccattggccactcggccaccgattgtgctgatcactccgtccaacagggaagtgccaatgccggacaacactgctgtgccaccaccaccgccaccattgctgtttgctgctgttgttggctgtgattcttttttagtgtcagtcgcttcatccccatcggcttgcgcgtcatgacggccatagtcgttgttgtttttcgtgccatcatcgccggtttctttgttcccagtttggcccgcgctgctgcctccattttggtcctctccgtttccgaattgactactttggc

SEQ ID NO: 16463 - DNA, 1254 bp, Heterodera glycines
  unsure (1)..(1254): unsure at all n locations
ttaattactgtgcagaaaaacatgccaaaacagcagtaatcataatgaaacgatgaataaatgaaggaggcagcattattattatttgcttaattnaaaatatgaattaaaaaatataataattttaaatatagaagatatttaaatgattattaattaacattactcaactgaaataaataaattaaataaaataaaataaattgaattgaattaaataataaaacaaagaatgttaaaaaatgaaatttcaaataaaattattcgtttatataaccgaatttgagcgttaatattttaaatttttcaatcgacgaacaaacgaagaaaaagagtttacaaattagtaagtaattggaaattggccaaactaatcaaccaaattaagaaggggaatacctaagacaataaaagaaagtaaataatttaacagttaacggaactaattgacgtaattaaaacacggctttggcggctgccaaataaattttaagcgaacaaataccaatttatgacataacatattttaatattagaaggcgctatgaatgaaaatgataaaattagttgttatttcttaaaaatttcttactattttttttgtttgttttttactttacatcaaatataaagcagaattcgatgactaattaacacttaaatatttagcgcaaatttgttaaaatagtaaaaaaaaattttgcataaaaggtaactcgcccggtgggactcgaacctatggcccttccgaaatgctttaaccgtctgctgagctacaggaatacacaacacaaacaaagtaaggtccccagcaggaatgaaaatcatccgcttctaagatcaaattcatttatcagactcatacaaataaaaataataattaaacgaaatggaaaatatttaaatgcgtaatttgttaataatcatcattaattaatcgttcatttgatgctcttctattcgctccatttgcgcaggtccaactgggccaatctggcacatggcactgtgccgatcgctgatggaagcagaagcgcgtcgaacggcactttgctgatctgatcgccgttgtcacaaagcagacgggccaaactgtgagccgggagataattattggattaatcagggctcgcagatctgaggctttagcctcattttgtggttttttgataggtcaatgaggctaaattttcaaaatgaggctttgaggctttttgtggttttttgagaaaaaccgcaaaataaagaattttt

SEQ ID NO: 16464 - DNA, 2310 bp, Heterodera glycines
atgattataagattttttttttgcaaaaaacgataattctttgtaatttatagaaaaattggagcaattgagtcgcaatgacagccgtggtcccgatttttctccgagattagcgcattagccgacccaaaatggaaaattaaaacgctgataagaagtataagaggtgtaaagccttcatgtttggtcggttggttggttaatcaagtaaatatacatattacgcaagcattgcgaaattttggcaaagtgtttggtatttttaaatcgggtgaggtgagaaacttgggcgatttcccatgggaagacgacgtcacatgggcaaaagcataattttgtaaagtttaattaataaaatttaaatatggcacaccaaatacctatttatataatgagaaatgtgggaatataccaacaaattaagggacattttattaatctgtcaagttgcttattaagcatgaaaactatttggcgagaataaggtgccgtaaatttatggggaaaataggcaaaaaaatttcaagaaaattgtaccgaatacggtataattggcataaatgcattaaaacaaaaacacctaagaaaaattgaaaaccataaaaaataggcaagaattttaatttaagtattttatttaaaatcaaattttatctaaactcaagacacaaaacctaaaattatctttcattaaaactttttagcattgattaaaaatgaattatattaataattaatttaatttaatttctgtttgacaaatttctcgcatttttcaaatttttagtataagcgaaacaataaaaaggaaatgattttgacacataaattttatggtgaaaaatgcaaacaatgtttttcatggattggtgttgtagttaaaaatgcattgtgatgctacgctttttcctgctgatacaccaaataaaaagtgataaaattgtttgtacgacagataaaaaacgtaaatgatatgcaacttttatgggccattaaacattgaaaatgaaattttgagacgaaaaatagaaattaaaaaatgagatataaataattttattatttgaatattttctgaattctgagtaggaaaagtgccgaattaatgaggttactccatttttttaatttgaatttttgcacggcaaattttttgtgtcagtaaactaatgaatgaatgaatgatctgttggatttttcgatactaatagcgtattttgcaattcaattttttccatcattataattgtgttaaattctcaattccaaattaatttttcgtttttttccatgccaagaaaatattcaaaaattttaaatgagattcaaatgaacaaatttaaaaaaaggtgtgggcgcgtaaatgaaacaacaaaagacacaaattaatgaaataaatttttgggtgtccctttttcacccttttatcaaataaataataaataacccataaaattcgttgatttgcccatttatttttacttttatttttggtcggcgggcgaaaaaagaattttctgttgatgattataaggaagaaatgaatagatgagtaaagagatgataagaaaaatgggaataatatgaagcgaaaagcaaattgacggaaaggaaataaaaatagtttaatagttcaaatgaatcaaaattctcgaaaaaatggagcgtagccaaattagataaaatttaaaaaacatttaataaattacattaatgacaaaagtgggtaatttgaaaaattggcgttatgaagttactcaaaaaccatcaaaataaaaaaatttgcctttaactttgttcagaatcaagcaaattttttaattgttggtatcattcgattatccctaacaaataagtgtatctattagcccacaaaatttcaaaaaatttcattttgtttaaaaacttatgatcaataatgttcgttaattttccttgagtaattcggtttatggaaatgttaaattaattaataaatccaaaaaatttttaaaaaagcaaacatttaaaaattaatattttgaaaaaaaaattcaaaaattttggcacatttaatttcttaaaatttgtttttgtttaaagttaaaatataaaagttggactaaattatataaaaacaaaaaaaaattaggcgaattaaattaggtggataagttaagacaaaagaaaaaaagctttctgtgctgaatatttattcaatttatttttgctatttgtttgcggatttgcaacaaaaatataaagtcaatgggcaaacaaaaaaaatatttttgttttcgcctcgtcagtggcacaccgccgcgccgcaca

SEQ ID NO: 16465 - DNA, 964 bp, Heterodera glycines
tttatttgttttggcacactcaaaatctctcgcttttttctgttgatttggtgtgaaaatttgtggtagcaaagtcattttagtaagtgcttgatacaaaagtgtacaaaattttcaatttgtgtgagaaaatgtggaagggttttaattaattaattaattaattaattaattactcactcgctttgatgatccaaattgtccaacaaaaaggaaaataatgttcaaaaagggaaattaaattaaaaaaaaaatttgtaaaaatctaagtgaatatcaaaaaagggtattttttattaattatgtgtgaattgaaaacataataaatttgctagttggttggttctaaggatgcaaaatttccaaagagtttttcttttttagaggccaattctttgggctcgtttgcatcatcaaaacggcgctgttatatatagcatgtcaaatttcaaaaaaatttaaagccaaaatgctcgaaaaccgtgggtttttgagttcctttagccataacttttttgaaacttaacaaaactttttgaaatttttgcagacggttagaaaacatttagggctgtcgaagtttatgaagaatttaaattttggttgtttttgaacaaagttatatcaaaaaattttcatttgatggtttttgtcataaccgggcaataaaattcgaattagcttggcattaaagcgattgatttaaggatttttttgtttgttttgtatacaattctgtacataacgtcaattttcgtataaattaaatgccaataaagtaaattggaacttttgcttgcgcgtcaattaggataagtgggggagaaagaagtttggaaattgatttgtgcttgcgcgtcttttaaaattggcatatgccgtttgctaactcaaagtataaaaataggcacctgacaaattgaggtttttggggagtgttcctatttttttaaaccaatttaca

SEQ ID NO: 16466 - DNA, 4444 bp, Heterodera glycines
  unsure (1)..(4444): unsure at all n locations
taattttttatgataacaaatttagcgtaaataaaagaagtgatttggcattgatattcatatttatttatccattgttttaaattatatttatttgaattatgctttgttttaaatgcttaaatatatttgaattattttttaacccctcgtcttgtaagttatttatttttttgttgattggttgttggattctaatgattttacaatttacttatttgtcttatgaaatagtaatcaacttgtattatttttattgtgttttttcacgttttaaaaataaggaattaattttaaaaaattcttattttggcatcgtttttaattaaaaatgcatttttctatttaatttcaatagcttgtttgtatgtgataaaatttttaaatttgttttggaacattatttaaggctaacaatacaaattattattatttacattatgaatttcattaaaataagcgatttttttgcgcagcactgtgccaaaattttcattttattttagtaatagtcctacggacactccgccgccgggaaaaattttgaactttttagtgcactttgtgaacaaaaaaaagtccaaaaatgacatattttacgattctaattgttaaaattgtgattgaattcccatcgaaaaaacattaattttgaaaaatgagaagaaaaaataaatacttgggggggcggggaactgatccaacgcaataacaagaaaccgaaccaagaaaacaacccactggaccacggaaatgttccggaatttactaaaaaaggacctaaaatttataaaaatataagtttaccaagagccaatcattaggggtgtaaaaagtctcggtctcaaaagctcaaagaccgagagactgaaaacctctcaaacagcactatcttataaatgatatttttagtctttgaactaattttaaattatttaaaactatctttatgctgtctgagagttttggaagtttattttcatctccttttttaataatttatgtaattttatattattttntgaatttgatggattaataaattactattnttttaatgttaggattttgtcatgataaaggctgaaattatttagataatcaataaaatatattttttcacaatcagtgaattctatcaaaattngnaaattttttttaaaatatatgcagtttcgcttttcaaccaattttaaattatttattcttaagatctttgacaattgatgctgtgataatagtaaaggcttacctttttcttataattttaggtattatcaaatggattaatctattggtttttcaatttttctgcttttttttttattatttgttttattaatctattccacaaattgtcattttttaaaaatttatttcattacaataatgacaatttaatttatagtatttatttaattttcatggtgacttagctcgttgattagccttcttttgctcactttattgtgttaaattattttaaataaaacttaaaattcgcatttaatttttttatcaataaatatttaaagtatgatattaattttattttaatttttaatttggattttttgtctcttggaatgatttaaaataacattttgtaattttttacatttctttattgttcttttaaggattattcacactttattaatatattcatattttaaatattgttcatttttttctaatttggaatttcgctattttttatttttcttaaactcttgtcactgtccgcttgcttcttacgatttttcggtcctcgactctaatatgttttttatttgctaattattttaaaaatttataattattaatgattattcaaagttaatttatttttcatcaatttataaatgaatgttcagctgttcacagtttatttgattttttatatgataatctctttttgtatcattaataattttgattggatgaatatttgctaaatccgcccctctgcttattctgcaatccattcaaatacttcaatagtaagtaagattaatagtaaattaaattttaaaatattgataatttatttaatttattctgtattttactattcacaaaattagaggagaataaataactcaatctaaaaaatatttattggcaattacaaactgatttttgtatcacaaaaaaaacaacagaattttgagtacaattattcccgccaaaaaaaaacaattaataattatttttgatgtagaaatgcaatataatgggattttttgaaaaagttgaaggattgcaagaggaagcaatttcaactaattaataaaagtaagtgaataaataagggccaaaatcaatattttttaattgaatttaattaattttatttccatttaatgtcaaaattgaaaaacatttgtttaaatcttctttggttaaataatattatatttacaagtaatttgctttgtttctgctcatgtcctattaataattcgaattattgttaataacataatttattttataataaatgtattttttggcttgacattgaaaggaatgtttcatttttacctttgttaaaaatttcccagagtaattagtctcactttattaaaatatttttattcaaatattgttcatttattttttataatttggaatatcggtatgttttattcatattactcttgatcttcacctcgacttctccgaagcttttgaattaaatgtttcttaaattgtgtggtgtttataatttttctattaaaattatttcttatttatgggtttttgtgggttttgtggtgtctaaaattcattaaaaaacttttaatctaattttctataattatgtacaatatggcactttgtttattaataaaatcatcatttattttttgaattgtctcaattgttctgcattttgtcattttttcttatgatcttctacagcttttaaattacccttcttgtcaaggtaatgagaaaaagaatttttaatagaataaatattttcttaatttttgctctttaatttgtcattttttttcttttttttctgttattgtatgaaatatttaaagaattaaatatattttattttattggttaaataactaattaatgaagtgaatttacttttcttttttcgtcctgctacgccgggaacaattttgtaatttttaatgcgaattgttaacagattttaacaaaaaaggcaaatttttagccacttttatatcattcgaaagcccttcaagggttgctaatattgccgtttgtaccccatctttttgaaaaaatatttttgttttcaaaaatcacgaaaaattgtttcctagtgttttctattccgctcgctgatcatgactaaaaaattgaagttttacgcatttattcgaattcggttgcaaaaatttttggaatttttaatgaattttgttaagaaaaacggttaaaaattttaatttttttcctttttttcccttcgcggtcaacccccactccccgcaatagttatccataacagtgaaaagatgaaaaactgaaaactcgatcagtttttctaaagaaggttgcaaaaaaaaaaaacagagacaaaatcagggtgatctgaaaaccaaaaaatgacttcaaattgggaaaattttcgaaaaaatcctagggggctggcaaaaaattttcgtggaagataaatgtcacggatagaaagagcacaaaatttgccacagcacatgtctctataaactttttaatttattaattattgcgttttattttatattgcaattttgtttttcattttttcgaatctgattaattaattattgcgtttcttttgcttttaatttgttttaataataaaattgtgttataatatatggttttttcaaatataaaatataattttttttttctttattactttaaaattgcaaaatataaataatttttgtctctaattagtgtaattttcatttacagattttttaaaaaccggtcaagtaaattttgttaattagcatatatatttttcaaaaagaaaactttgagcctcttagcaagccttattttagatttttattttaaatttttcggattataaaagaaaaaacataacaattcaattacatggaaatgctaacactttagaaaaaacattttaaattaaatatatttaattaaaatggaaatttttaattaaaaatattattatgtcaataaaaagaattttttttgcaaaaattctaaatatttgccttttttatttttcaattttgtttaattcctgttgtcttatcgaattttagaaataataattatgaatattattattttttatagttttaaatttttaattgttttatgtatataatatttttttaaaaattattcattctctattagtatgctcaatcatactttgttttatgaatatcaattttaaaatgcgcaaattaataatttt

SEQ ID NO: 16467 - DNA, 1238 bp, Heterodera glycines
agtagagaccgagccggaccggatccggtaccgatttttaccgggcccggaaaccggtccggcggttttagggaaaattccggtttgaccggtttttcagagatcgggcccggaaaccggtcattttgaaaatgccaaaccggtccggaaaccggcattttggaccggtttttatgtggcattagtgactctttgaccctttatttgattgtttgaatttgtttggcataatgattggaattcgaaccaaatattttggttttcttcaagagtgggtggatttttggttatcgtcggtgataatccaaattttttgaaaacttaaaggcaaataaggacacttagggctatcaaataataccaataatgcttaattcggatggttctctaaaaagttatagtgtattaaagtttcaaaaaattattttatggtcgtgtctttttttatggtagtgtaaactgcaatagaaccgaaatgtgtcccaaaaatccacacaattccggtaaaagatttaatcaaaaaactaaaaagcatttttttttttgtcaaaatctgataaaattcacctcaaataaaaattttccccggtggtgctatctgacgcaattcatttatctcttctgttatttccctcgaaattttttttaaatttcaaacagaaatttaaaaaattttaagcgatttttcaattttatgatgaattatcgcaaagtttttcaaaaaaattaacatttggcacgatttttgtcgattttggggtttaaatacatgtgagaatttaaatttttaccaaaccggaaaccggttccgggcccggcaatttgaaaatccggtttcaccggtttttgagaggccgggcccggaaaccggttgcttctgaaaatatcagaccggtccggtccggcacttttggaaatctcggtctctagttaaaagccaatcatattagcgattttttgtctaaaaacagtacgagtcggggcagtaagagttgggtttcgtccaaatcctatatacatagatactttggttgacataaactttgatttaattaaatgttgccaaatgcaaataacatttttcataataaatgatttgtgagagtgatttaacattgttctgattgttattttctgttcaatatccgtcttcggtcctcggtggtgtgcaatggtctatttagattgggaagtgcaaatgattttcggcttctcatttctaccacatcccgcctccg

SEQ ID NO: 16468 - DNA, 2029 bp, Heterodera glycines
agcaattgctctcgttggtcaatctcccttttgaaaatattggtgcggtcccaacagaaggcgagcttttccttaagcaattggatgcttaaagcaagtccggtcttttccccttttcacttggctttcgtattgcactttctgtgattggaggaacaaaaagggaaccaacagaatggcaaatgccaatgaaattgtgcccagcgcaatcgcaccaatggccaactgaccgacaaaaatgcctgtttaggaattacatttgattaccactcacagaacgggttttctccgcttccgagaacaaatagtcgtgaaatggcataatgtgattttgggatatgcttttgggattagccattgttggcgaggaatgaggcggacaatgaatgggccgtttcttttacaatgcaccaacaaccatcagccaactctgctgcatgcttaagacgggccgaacaggtttttgggaatgggcagatgaatcggaggataatagggagggcgagaacatccagtcggtgcaaaaccataatattgtaaatgacgaatggtttggtggccttgcccaatgagtgatcgatcgattggttaaaatgatcagaattcgccagtgatttgaatagaattttaatggcatttgaaattcatttttgaaataacaaagagcagacagggatcagcagcttacaatggatggacaatatctcttcccctcatttcgcttctcacaaaataacaacgacgtttcacttttctcgaaaaacgggggccgctttcgacagcggcggacggtcacgcgccccctcccctccccccccccccccctttcgcacgctctgtccatgtcaatgtcttttcccgtctttcttcattccgtcgtcacttttctcgatttaacataatcgtccccataaaatgtgatagtcgtaatcatgccaattcacccctccccctctttttttatctttttcattcttttcgcttcataaaacgtataaacggaaaggcaaactgaaaacactgtgtttttattgctattaaatgaggtgacttggattctcaattctgttaattgaaaccggcacaaatcttttccaattgctttcgtccgtcgcttggccttccctttcctctgcttctgttcattcactgtctttacactgctcccctaatgcattcacacctctctctcttcctttccttgggcgacagcgcaaagcgtatccaacgaaagcccacacttatttctgtccctctttcctttccctctttctcctctctcctcttttttcttgcccttttcctttccttttcttcactctctttttgccctcctttctctttgctgtacatcccttttgtaaaacttaacatttcgtttttcctactgctctgtcacttaaaaaactaaatgaaagtagtgatgtgattaaatatggaaaaacaatgaaattgctcaattcctttcacccctgcattgcctttattaattaaattaaaataaaacctaaacctttttttactaattttcattgtagaacataatctccttccaatttctccaaccataaatactaatatgtaattttacatatgtgcattagttagtactttcaaacaatgtgggattatttttgtggtgtcactaagcctatgaaaattggtctttcctttttagcggtctttccgctccgtctaaccatcgcattaaattgagcaaaaggaaactttaaatatccttcatttttattttctgtggtgggatttttttttacttcatgttaaatttttaagccaattggattttcctttttaatccacaatttatgaaccacaaagaaaagttatatttgtattattcgagctgtccgaattgaaatgcccttcaaactaatcgcataattcgaacgggacgatgacagagaacgaagacaaaaaagcaggaacagggtaaagaaaccagggtttcagttttgttgcatcatctatggcatttgcgcctttctggtgttcgtgctctgttttttta

SEQ ID NO: 16469 - DNA, 1119 bp, Heterodera glycines
  unsure (1)..(1119): unsure at all n locations
aaagcgttagtagaaaataaaaaataantcggagcccatattttcgtcataaattgagtcccgaaagataaatagcatggcaaaaattgaaaatatttgtcgatttattgcatattttccatctatgtttgggatgaggaaatatataaaaggataaactttgtataagtatttattatcatggaagtcgtcagaataatatcaaaagacttcgtctaaacaatattgcaataatttaagttggttttatttttcagtcaacaacacggccgagagagattttgatacatcaaagacacacctaaaatacaccgcggtgtgagccctagcgaaggctggacaataaaattgcacaactaatatacctactgttcgaattatgttttatacgagtcagatatgagtttttcctatggcaaggttgtgaaattcctcccaaaaactttcttacggaaaataagcagcaaattttaataaaaataaatacttttcaattcatgcaaggaatttcctgaatctataaactgatccactagaaaagcgtcagtcgaaaataaaaaataattggagcccatattttcgtcataaactgagtcccgaaagataaatagcatggcaaaaattgaaaatatttgtcgatttattgcctattttccatccatgtttgggatgaggaaatatataaaaggataaactttgtataagtatttattatcatggaagtcgtcagtataatatcaaaagacttcgtctaaacaatattgcaataatttaagttcgttttatttttcagtcaacaacacggccgagagaaattttgatacatcaaagacacaccaaaaatacaccgcggtgtgagccctagcgaaggctggacaataaaattgcacaacaaatatacctactgttcgagttatgttttatacgagtcagatatgagtttttcctatggcaaggttgtgaaattcctcccaaaaactttcttacggaaaataagcagcaaattttaataaatataaatacttttcaattcatgcaatgaatttccctgatctataaattgatccactanngaaagtggtagtagaaaataaaaataattggagcccatattttcgt

SEQ ID NO: 16470 - DNA, 1884 bp, Heterodera glycines
ttgaaaatatttgtcgatttattgctattttccatccatgtttggaatgaggaaatatataaaaggataaactttgtataagtatttattatcatggaagtcgtcagtataatatcaaaagacttcgtctaaacaatattgcaataatttaagttggttttatttttcagtcaacaacacggccgagagaaattttgatacatcaaagacacaccaaaaatacaccgcggtgtgagccctagcgaaggctggacaataaaattgcacaacaaatatacctactgttcgagttatgttttatacgagtcagatatgagtttttcctatggcaaggttgtgaaattcctcccaaaaactttcttacggaaaataagcagcaaattttaataaaaataaatacttttcaattcatgcaaggaatttcctgaatctataaattgatccactagaaaagcgttggtagaaaataaaaaataattggaacccatattttcgtcataaattgagtcccgaaagataaatagcatggcaaaacttttaaatatttgtcgatttattgcatattttccatctatgtttgggatgaggaaatatataaaaggataaactttgtataaatatttattatcatggaagtcgtcagaataatatcaaaagacttcgtctaaacaatattgcaataatttaagttggttttatttttcagtcaacaacacggccgagagagaatttgatacatcaaagacacacctaaaatacaccgcggtgtgagccctagcgaaggctggacaataaaattgcacaacaaatatacctactgttcgagttatgttttatacgagtcagatatgacaggtgaatgtcctatggcaaggtggtgggaagagctcaaaaaacaatttctgacaggtgaaataacctgtggtaggtggtgaaaagaagtgaaaaccaatattcgacaggtgaaaatgtcctgtgttaagtggtgaaaagaggtgaaaaacaattggcaacaggtgatttgaaagatgtgaaaagtctaagaacattgatgaaattctagagaagtgatgaaaagaggtgaaactaaaatagaagctattttaaagtggtaaaaaggcaaaggaggggtgcgtgccaaccgaaacctatgtgaggggttgtttctttgaatctgccgccttgtggtttttaattttccccaaaattttgcgattttaaagctttttgttttactaaaatattaattgtggtttttacatgagtaatcaatatcttaatatcgtcccgatctttttcaatgccttaagcttggagattttaaaaggtttaagttgggaagtgttttcaattatctagacattttcaaaagctgtataccatcttatgtcacaaaaatagcattttcaaggaaagaaaattaatattataatttaaacattcaaaaatgtagaacggttaaaatatatattcaaaagaaaaggttcgggaactcaaaaggattgtcttttcatattaaattatttattgaaatatttcaaatttttaaatgcaaaacaataataaattacgttaaagagttaaaagggaatcttttaccagagcattttttgtatataaattagctcagcgggaaaactttagatgaaaatcccctaccattgagtttgggaattcaattaaatttgaaatagaaagaagaacaacgagattacgtggcaaagacataagagtaattattttcaacttccctaaatccaaaatctaaaaataatgatgaataacagaaaaaacatggggaaggggtgaagggagcaaaaaaaaattttcaagaaaaactaagaagaaaattgctacgaatgactttaaacaacatacattcag

SEQ ID NO: 16471 - DNA, 2483 bp, Heterodera glycines
tactttgttaaatatcttacaacaatgactgaagaattaaaaataatgccaaatatggcgatgatttcataagtcagtgcgaatccaattagtgaccagctcgtatggacatctttgaagtagggatgatatttttaggtttttacctatttttttcctgagctccccgtagcctgaaatgcacgaaaaacatgtttttttggctgttgttaagctacttttcgagttattagcacctatttactaggtttttatttttagcacctaaaaaacctaaaaaaattttaaaaaacttattttcacctattttggtgttttgcccaaaatttgttaacaaaaatgcaataaaaaagaaaaatacactcctaagaaccgacccaaaattttttttcaaaaaatacatccctaagaatcgaccagaaaattttcaaaaatgcgcccctaagaaatgaaaaatttctcaaaaatttatctccaaaatttatttattttattttcttgtcgatagtttttgattttgaaaattatgtatatccttaatgacttgacaaaatatttttgcttttaaaagaaaattttcgattttagacccctaaattcggaactttttgtcacctattttcccatttttagcacctattttgcgggttttttagaacctaaaacctacctattttgccagtttttagcacctaaaaatatcatccctactttgaaggccaaataaaactgtaaaataataaccaaaattgttagtaaaaaaaatctaaaatttcaatctttaaaatatccagtggaaaaaaaacttttacttaacaaataccaagtaataaacaatgtaacataattttatgaaaaaaaaactttaaaaaattattaaactaagcaacaaaaaataaacaaggaaaactgacgagaaaaattaaaagaattgtgtatcttttttaatgaggcagcgtgagataaatattttcgttaatgagaccaattaattactattttattgtaatataaaggactaaaattgaattcagtctcgtattttatttgttcaagcatcaattagaaaagatcccgctaataagaccaatttgtaaggctaacttaattttctataggcacataagtgtcataatgcttagaggtgcgccgtgactgaaaaaagccgtgaaacgtgaccaaaaagcccgtcaattttttgagtttaatttttccatgtcggcgaatttttcgatttttacactgtcttttttatggtataattttccaaaaaaacattttgggaaaaagggggtccatcacaggtttcgtccaaaaaatggcaaaatttctctttgaaaacaatatgtacttcgtaaattttcaattttattcagtgtaaatttttcacggaataaccgtgaattttcgcatattccccccccccgcggatgaacacttcacttcgcataaacacacaacaattttaattatattcctgctctccctgccttttattggtcccctttttccccaagcgtcagaaataaagtgaaaaagcattcgattggcaatttggttggacttaattattccgattcgttaatttgggtaaaattaatttacgaatcgcgacaaaagtgttaggccttgggtgggaatcgaacccactcgtgcaccctttctgttggcagctctaccattgagctaccgggcagggatgggccgaggtttcgctttacgcatttcgccttattcgcatttttaggcgtttcgcatttcgctttttggcgcaaaatgcgaaagttccacaccgaagaatgaagaatatatttgaaaatttaaattttaaaacgaatgcatcaatttattattattttgggctgcaagattaacaattacctaaattttttgttgacttgctacgggctaatacgaacgaaaacgagtttttattgggttgatgcttctatcttgaactttttgatgtattttttttttgcctcttgcgattttgatgccttatgccggccacgtaattttggtacctttttcctgcatttttcggtatttttttgaaaattttgcaacttttcctatcatattttattaatttccaaaaaattttccggcgcgcctgtcggcaccgccggaccctcattttaccttgatttttgaaactttaatccaaaatgggtagatttgtcattttttgtgatctgagaaaaaattgaaccgggaaatgcagagattttgttgtttttgcatcacaacctcaaaatctatgtttgaccattggtaaacttttttaaaaaatttcgcatttcgcctttcgctttttcgcatattttggcttttcgcatttcgctttttttcatttcgcatttttcagtttcgaaaatttcgcttttcgcatttcgctttttatttttcaatttggcccatccctgctaccgaggcaaaaccgcccttgcttttatgggtgttatcaagcccgctttccg

SEQ ID NO: 16472 - DNA, 2603 bp, Heterodera glycines
ttttacgatattaaataaatgatgaaaagaataattattcttctttcttaaaatatgctaaaaatcatttaaaagggtgacctttaggaaaatgacaacaatttacacgcattatccctgctaaaataaaaataaagttaattttgattgtttttaaaattcccttaatgaaaatttttcaacaaaacattttaaaaagacataaagcctcttctgttgcggtggtcggaattatgtctttacgtcacaatttttggcaggacaaacaaatcagagattattatttttaaattaattgctattattattattatcaaaaaacactttcacatttaaaagactaaacaatttttttaatttttattaacaaagaggaggtgccggcagatcccttgtgataaattttctaaattttctacaatattaacaagattagaaaccgcagaggtggtcattatgggagacaactgcactgggcgatggacaaataggcgacagccaaatttaggggcataatccaagccgagataaaaaaaatgaaaaaaggttaattatgttgaataaaattgatgattaatttataattaaaattcattataatttgttaattaaagcccaaaagctattaacttataacactaatgttagttttaacaaaaatatttccaattttaattcaattcgaatcactaacctaaatttaagcgaaaaatcgaaatagcttaaattttcggttcggatatgagatttgtcaaaattggtgtccgattcgtgactagcacaaccttgaaagcaccaagaacatttttttacgtttggttaagttttttcatctcaaattttcttttgcagtttcccacctctttcccacgatttttgcccatctttttggatcacaatttgcccacaataaaaggcaaattatgaataaataaaagaaaatgagggaagaaattatgagtgttcaaataataataattagtattttttgccaatggcaatcttcaactttaggtcgtcgttttaattcgttaaaaaatcaaaatttaaatacttttaattagtcgtattgtatttttcacaattaaacaatttatttttttaatccttaatatgctgcccaaacttcactcgcttttcctttgtcgagaatggccccctagacctaaagttacaccagggttgttccgggttacccgaaacccgatacccgaaacccgaaacccggcctttttctcgacccgaaacccgaaacccgacccgatgattttgggtcgggtttcgggtcgaaataagcactggtaagaaaggggtctgggtgaaaattaggtggataaggaaattgagaattttttttgaaacgattgtgttcaatggaatcgaaaattttgtatttgtttttgttcattattagggatgtcaattttatgtaaatgcatatttttttcctggtttctccatgctctaaatagtaggaaaaacactttcttttttatgtttgcaaacaaaagttgggacttttatttacatatttttacatattttcggattttctacatattacatatgtacatatttttatacatatttcttacatatttagttattttttttacatatttatatgtacatatttttatacatatttcttacatatttagttattttttttacatatttatatgtacatattttgaccaatttttgtacatatttttgacatccctattcattattatcctttttctaaagatattttgtatgaatttcttgaatttaagcaaagcaaatggctgaaaaacctgattccatttggttttatttccatcgtcctataaatggcgcaattcgctgcaaatattgcagtgccatttgatttttaaacaaattaaaaatttgtcaattgacccgaaacccgatacccgaaacccggcctttttctcgacccgaaacccgaaacccgacccgatgatttttcggccgacccgacccgaaacccgacccgatatttttctcgacccggaacaaccctggtgctgagtaatttgagtctttttattacttttcctagaaacaaccaaattaaagacattcagcataatttgatagccctaattgccctctattagcatgcaaaaattcaaaaaaaaatttattcagttttggaaaagctataattaaaaaacaacaacttaaatacatgtttttcctaaaatttttggccattactttttgtaattttgcaggcaaaaatgaccaatttttgcgattttgagccaatttttgtgggtttttggaaaaaatagcgaaatttgtttggaaacttgggtgagggaggttttggaggggataacaaccaatgccaagaatgttttatttggttattgtaaagctaaaagtgccacgcactaaaattgcccggaaaagaaaagaaaatgagtgaaataattaattttgcaaaaaaaaaaaattatttgcggagtgaatagaaaaagaaataagaaaaacttcctctttgccctctaatgttctgctgactgccgttgtgtgaaatttgtgccaacggcacacggcacgggacgacggcatttccatccaaaatt

SEQ ID NO: 16473 - DNA, 1662 bp, Heterodera glycines
  unsure (1)..(1662): unsure at all n locations
gaaatcgggattcagaggcccatgatttttcgtaaatcaaattcctctccatnccctggcttggtacaggtcaactgactacgaaattcaagtcctcaaaattttcggaccgaattcgagcctaaaattttttgggaaatcggattacgagacccaggaatttttcgtaaaccgaaatccatttccatccctggctttaaaaatgtgccacttgttccggtgccgttcctccttttgccagccagcatagctgcgattgttcaacacaattgtgtcctccaagaatttgaagcgcgggttcacatgcagcacaacatcatcaccacgaccgttcaggttgacaacaaattgcttctgttggccattgtatgtggcacccgtcatgatcagttcggcaccagtttgcatgccgtactcaattggccatcggaatggcattggctgtcaaagcacagtaaagaattaaattatattgatgtactgtatgatcgatcatcactgtatagatctgcccgggcctctggtctaccctaatacagacctaaaaaacaaacccaatctgaatacagacagactactgagtttaaaccaaggttgccaactgaaaatattcaaaatcagcagttggggtcaaaaagcaacattttagaaaaaaatttccgaatgaaaaaagcgggttttccaaaaaaaaaactttttgggaacaaaggggccggcggctcagggaaaattttttttaatttgagcattttaaacaaattccactgaaaattggcaatttttaggttaattttgcactttgaaaatcagcatctcagaaaaaaaaaatcatcactgaccccttcttgaaatcagcaaaatgatggtaaatcagcagaattggctactctggtttaaacagattttttgatctacacaatccgaatctcggtacaaatcccggtttatccaacgaatcaggaaattccaaggcatgtttacataccgggttttccacagtgtgtaccgcagacattgctgttttcggcaattttaaataatattaattaatattaatgtgatgaaataaattagtaattttaagaaattacacaagtacctataagagaattacattacacaatataattgtaaatgataagaataaaattgaaatggaatggacgactgaaaagaaataaaatgattaaaagcaatcttttatatttttatttaacaaaaaaattatttattttgcaatataataattgaaaataaataaatgtatttatgagtgaatattaagtatgaattatgtataagataatgaaaaatttttgggaaaaaagaagagaagaattgttgagaatgtttgctcagatgtttatttctccccgattaatcatcaaagaccgatggaatcgatgaatggggaatggactcatcaaaacgataaataattgctttcattttatttaaataaattttttttaatttaatatataaaatgggattaggaaaaatgagaattcgttggaaaaaaatttattcaatccaaagcaaattcaaaaatggttttttttcatcgtcttcgtgtgccatcctcgaagaaaacgcccccatcatgggcacaatattttgggacaatgccctttctctccggntagtccgggagcgccagga
